United States Patent Application Publication US 2024/0327476 A1 - sequence listing, part 75

SEQ ID NO: 141220 - DNA, 1437 bp, synthetic construct
  misc_feature 1..1437: note = Description of Artificial Sequence: Synthetic coding sequence
  source 1..1437: mol_type = other DNA
atgggtcgcaaaaaaaagaaacagctgaaaccttggtgttggtattgtaatagagactttgacgatgaaaaaattctcatccagcaccaaaaagcgaagcatttcaaatgtcatatctgccacaaaaagctgtacactggccccgggctcgccattcattgtatgcaggtgcataaagagaccatcgatgctgtaccaaatgccattcctggccggaccgacatagaacttgagatctacggaatggaaggcataccagagaaggatatggatgaaagaaggcggctgctggaacagaaaactcaggagagtcagaagaaaaagcagcaggacgacagcgatgaatacgatgatgacgattccgctgcaagcacgagttttcaaccacagcccgttcaaccacaacagggttacattcctcccatggcccagcccggtctgccgcccgttcccggagcccccggaatgccgccaggcatccccccattaatgccaggtgtgcctcctttgatgcctggcatgccacccgttatgccagggatgccaccaggaatgatgcctatgggtggcatgatgccacctggaccaggcattccacccttgatgcccggcatgcccccaggcatgcctccgcccgtgccccggccgggaatccctccgatgacccaggcacaagctgtgtctgcgccgggaattctgaacaggcctcctgccccaactgccaccgtgcctgccccccagccaccggttactaaaccattgttcccctcagcaggacagatgggcacccctgtcacctcttcctccactgcttcaagtaactccgagtccctttcggcatcaagcaaggccctatttccttccactgcccaggcacaagccgcagtacagggccccgtcggcacagacttcaaacccctaaattccacccccgcaacaacaacagagccccccaagcctacatttccagcgtatactcaatctaccgcctctactacctccacgacgaatagcacagcagcaaagccagccgcttccatcactagcaaaccggctactctaaccaccacgtccgcgacatcgaagctcattcaccccgatgaggacatttccctggaggaacgacgagcccagttgccgaagtatcagcgaaatttgccacggcccggccaggcacccattggtaacccaccagtcgggccaatcggcgggatgatgcctccccagccaggaatcccccagcagcagggaatgcgtccccccatgccccctcatgggcaatacggcgggcaccaccagggaatgcccggatacctacctggtgctatgcctccgtacgggcaagggccccctatggtgcccccgtatcaaggcggcccaccgcggccccctatgggaatgagaccacccgttatgagccaagggggaaggtattag

SEQ ID NO: 141221 - DNA, 1485 bp, synthetic construct
  misc_feature 1..1485: note = Description of Artificial Sequence: Synthetic coding sequence
  source 1..1485: mol_type = other DNA
atggggcggaaaaagaaaaagcaattgaaaccttggtgctggtattgtaaccgagatttcgatgacgagaagatactgattcagcatcagaaggcgaagcactttaagtgccacatatgccacaagaagctgtacaccggtcctggtctggccatacactgtatgcaagtgcacaaagaaaccattgacgccgtgcctaacgccatcccaggccgcacagatattgagcttgagatatacgggatggaaggtattccagaaaaagacatggacgaaaggaggaggcttttagaacagaagacccaagagtcccaaaagaagaagcagcaggacgacagtgacgagtacgacgatgatgacagcgcggcctccacctccttccaaccacaacccgtgcagccacagcagggctacatccccccaatggcccagcctggcttacctcctgtgcctggggcaccgggcatgcccccaggaataccacctcttatgcctggtgtcccaccccttatgcctgggatgccacctgttatgcctggaatgccccccggccttcaccaccaacgaaaatacactcagtccttctgcggggagaacatcatgatgccaatgggcggcatgatgccgccaggccctggaatccccccgctgatgcctgggatgccccccggtatgccccctccggtaccccgcccaggcatcccacctatgacccaagcccaggcagtgagtgcaccagggattctgaaccgcccccctgctccaactgcaaccgtcccagccccacaaccgcccgtgactaagcccctgttccctagcgccggtcagatgggtacccctgtaacatccagtagcaccgctagctctaattctgaatctctcagcgcttcatcgaaagcgctgtttccttccacggctcaggcgcaagcagccgtccaaggcccggtgggaaccgacttcaagccgctaaatagcaccccagcaacaactacagagcctcctaaacctacatttcccgcctacacacagtccaccgcctcaactacgagcaccaccaactctaccgccgccaaacctgctgctagtatcactagtaagcccgctacactgacaacaaccagtgccacttctaaattgattcatcctgatgaagatatctctctcgaagagagacgggcccagctcccaaaataccagaggaacctgcctcgcccgggacaagcaccaatcggtaatccacccgtaggaccgatcgggggcatgatgccaccacagcctgggatcccacagcagcagggaatgcgaccgccaatgccgccacacggacaatatggcggacaccatcaggggatgcccggctatctgcctggagcaatgcctccttatggccagggacccccaatggtgcccccttaccagggcggacctccacgcccccctatgggcatgcgccctcccgtaatgtctcagggcggtcgctattag

SEQ ID NO: 141222 - DNA, 1344 bp, synthetic construct
  misc_feature 1..1344: note = Description of Artificial Sequence: Synthetic coding sequence
  source 1..1344: mol_type = other DNA
atgggccgcaagaaaaagaagcaattaaaaccttggtgttggtactgtaaccgcgactttgacgacgaaaaaattctgattcagcaccagaaggctaagcacttcaagtgccatatttgtcataaaaagctttatacaggacctggtcttgccattcactgcatgcaggtccataaagaaacaatcgatgcagtgcccaacgctattcctgggcggaccgatattgaactggaaatttatgggatggaaggaattcccgaaaaggatatggacgaacggcgccgtctgcttgagcagaaaactcaagagtcccagaagaagaagcagcaagacgatagtgatgaatacgatgatgacgattcagctgctagcacatctttccaaccacagcccgtgcagcctcagcaaggttacattccaccaatggcgcagcccgggctgcctcctgtgcccggcgcacccggcatgcctcctggcatccctcctctcatgcccggggtgcccccactgatgccagggatgcccccggtgatgccaggcatgcctccaggaatgatgcccatgggaggcatgatgcccccaggccctggcatcccccccctgatgccgggcatgccacccggaatgccaccaccagtgccaaggcctggcatcccccccatgacccaggcacaagctgtgagcgcaccaggaatcttgaataggcctccagccccaaccgctaccgtccctgcacctcaacccccggtcaccaagccactgtttccttccgcgggacaggcccaagcggctgtgcaaggcccggtcggcacggacttcaagcccctcaatagcactccagcaactacaacagagcctccaaagcccacctttcccgcctacactcaatcaaccgcatctactacgtccactactaacagcactgctgccaagcccgcagcaagtataaccagtaaacctgcaacattgaccactacaagtgccacctccaaattgatacaccctgacgaagatatctctctggaagaacggcgggcccagttgcccaagtaccagagaaatctgccccgtccgggacaggccccaataggaaacccacccgtcggaccaatcggtggcatgatgcctccccaacccggcatcccacaacagcaggggatgagacctcctatgccaccacatggccagtacggaggtcatcaccagggtatgcccggatacctgcctggagcaatgccaccctacggccagggcccccctatggtgccaccctatcaggggggccccccgcggccccccatggggatgcggccccccgtgatgtcacaaggagggagatattag

SEQ ID NO: 141223 - DNA, 1491 bp, synthetic construct
  misc_feature 1..1491: note = Description of Artificial Sequence: Synthetic coding sequence
  source 1..1491: mol_type = other DNA
aacacagtaatgggtaggaagaaaaaaaagcagctgaagccgtggtgctggtattgtaatagggactttgacgacgaaaaaatcctgattcagcaccagaaggccaagcatttcaaatgtcacatttgtcataaaaagctgtataccggccctggactggctattcattgcatgcaggtgcataaggaaacaatcgacgccgtgccgaatgctatcccaggccgaacagatatagagctcgagatttatgggatggaaggaattcctgaaaaagatatggatgaacgtaggcgtcttctggagcaaaaaacacaggaatctcaaaagaagaaacaacaggacgactcagatgaatacgatgatgacgactcagcagcctccactagcttccagccacagccagtccagcctcagcaggggtatatccctcccatggctcaacctggactgcctcccgtgccaggcgccccaggcatgcccccagggattccaccactgatgccaggcgtccctcctctgatgccggggatgcccccagtgatgccagggatgccaccagggctgcatcatcagagaaaatacacccagagcttctgcggggaaaatatcatgatgcctatgggcggaatgatgccgccaggacccgggatcccaccgcttatgcctgggatgccacctggaatgcctcctcccgtgcccagaccaggaatccccccaatgactcaagctcaggccgtgagcgctcccgggattctgaatcgtcctcctgcccctacagcaaccgtgcccgcacctcagccgcccgtgacgaagccactttttccttcagccggccagatggggacccccgtcacttcaagtagtacagcttcaagcaattcagaatcactttctgcctcctctaaagccttattcccatcgacagcgcaggcccaggccgccgttcaggggccagtaggcactgacttcaaacctcttaattctacgcccgctacgacgaccgagccacccaagcctacttttccagcgtatacccagagtactgcctccaccacctctaccaccaacagcacagccgcgaaacctgccgctagtatcacgagtaagcccgccactctgacaaccaccagcgccacttctaagttaattcatcccgacgaggatatttccctggaagagcgtcgggcacagttgccaaagtaccagcggaacctcccccgacctgggcaggctccgattggcaacccccctgtcggcccaatcggaggcatgatgccgcctcagcccggtatcccccagcagcagggtatgcgaccgcctatgcctccccacgggcagtatggaggtcatcatcagggtatgcccggctatttacctggagctatgcccccatacggccagggcccacccatggttccaccctatcagggaggaccccccagaccaccaatgggtatgagacctccggtcatgtctcaagggctgccttag

SEQ ID NO: 141224 - DNA, 3843 bp, synthetic construct
  misc_feature 1..3843: note = Description of Artificial Sequence: Synthetic coding sequence
  source 1..3843: mol_type = other DNA
atgggctctctcacgttcagggatgtggccatagaattctccctcgaagaatggcagtgcctagatactgctcagcaaaacctctataggaacgtaatgctagagaactatcgtaatctggtgtttctgggcattgccgccttcaaaccggacctgattattttccttgaggaaggaaaggaatcgtggaatatgaagcgacacgagatggttgaagaaagtccggtcatttgcagtcacttcgcccaggatctttggccggagcagggaatcgaagattctttccagaaagttattctgcggagatatgaaaagtgtggccatgaaaacctgcacctgaaaataggttacactaacgtggatgagtgcaaagttcataaggaagggtacaataaacttaatcagtccctcactacaacccaaagcaaggttttccaaagaggtaaatacgccaatgtcttccataagtgcagcaatagcaaccggcataagatcagacatactggcaagaagcacttacaatgcaaagagtacgtgaggtcattttgcatgctctcccatctttctcagcacaagcggatctacacacgggaaaacagctataagtgcgaagagggtggcaaggctttcaactggtcatccaccctgacatactacaaaagcgcacacaccggcgaaaaaccctatcgctgcaaagaatgtggaaaagcattttccaaatttagtatcctcactaaacacaaagtaatccacaccggtgaaaagtcatacaagtgcgaagagtgtgggaaagcattcaaccagagtgccatcctcacaaagcacaaaatcatacatactggtgagaaaccaaataagtgcgaggagtgtggcaaggctttttccaaggtgtctaccctcactacccacaaggccatccacgcaggagaaaagccctataaatgcaaggagtgcggcaaggccttctcgaaggtgagcaccttgatcacccacaaggcgattcacgccggggagaaaccctacaagtgcaaggagtgtggcaaggcattctctaagtttagtatcttaaccaaacataaagtgattcacacaggagaaaagccttacaaatgcgaggagtgtggaaaagcatataagtggcctagcaccctctcttatcataagaagatccacacgggggaaaaaccttacaagtgcgaggaatgcggcaaagggttttctatgtttagcatacttacaaagcatgaggtcatccatacgggcgagaaaccttataagtgtgaggagtgcggaaaggctttcaattggtctagtaacttgatggaacacaaaaagatccatacgggggaaaccccgtacaaatgtgaggaatgtggaaaggggttttcaatgtttagtattctgacaaaacataaagtgattcacaatggcgagaagccttataagtgcgaggaatgcgacaaagcaacgcatgccggggagaagccttataaatgtgaagagtgtggcaaggcctttaattggtcatcgaatctgatggagcacaaaaggatccacactggcgagaagccgtacaaatgcgaggaatgtggcaagtctttcagcactttttcaatactgactaagcacaaggtcatccatactggggaaaagccctataagtgcgaggagtgcggaaaagcctacaagtggagttcaaccctgtcttatcacaagaaaatccacacggtcgaaaaaccgtacaagtgtgaggagtgtggcaaggcgtttaaccagtccgccatcttgataaagcacaagaggatccatactggtgaaaagccttacaagtgtgaggaatgcggcaagactttttctaaggtctcgacgctgaccactcacaaggctatccacgctggtgagaaaccttataaatgtaaggagtgtggcaagacttttattaaagtttctacgttgacaacacataaggcaattcacgccggtgaaaagccctataagtgcaaggagtgtggaaaggccttctccaaatttagcatccttaccaaacacaaggtgatacataccggggagaagccatataagtgtgaagagtgtggcaaggcattcaactggtcctctaacctgatggagcacaaacgaattcacaccggagaaaagccttataagtgcgaagaatgtggcaagagctttagtacattcagtgttttgactaagcacaaagttatccataccggtgagaagccttataagtgtgaggaatgcggtaaggcttacaaatggagctcgacactctcttaccataaaaaaatccataccgtggagaaaccatataagtgtgaggagtgcgggaaggccttcaatcgttcagccattctgatcaaacacaagaggattcacactgacgagaagccttataagtgcgaagagtgcggtaagacattttctaaggtgtcaactttgacaactcacaaggccatacatgccggggagaaaccctacaagtgcaaggaatgtgggaaagcattcagtaagttctcaatcttgactaagcacaaggtcattcacaccggagaaaagccatacaaatgcgaggaatgcggcaaggcctacaagtggccctccactttgtcatatcacaagaagatccacaccggcgagaaaccctacaagtgtgaggagtgtggaaagggtttttctatgttttctatcctcaccaaacacgaggttatacacaccggagagaagccttataaatgtgaggaatgtggcaaggcttttagctggctctcagtcttttccaaacacaaaaaaacccacgccggagaaaagttttataagtgtgaggcttgcggaaaagcctacaagagctcgtccactctgtcatatcacaaaaaaatccacactgaggagaaaccatacaaatacgaggaatgtggcaaaggcttttctacttttagcatattgactaaacacaaagtgatccacactggcgaaaagccatataagtgtgaggaatgcggtaaggcctttaattggtcgtccaatcttatggaacataagaagattcacacaggggagactccttacaagtgtgaggaatgtgacaaggcattctcctggccttcatccttaactgaacacaaggccacgcacgctggggagaagccgtacaaatgcgaagaatgcggaaaggcctttagctggcctagccgcctcactgagcataaggccacgcacgcaggagaggaaccttataagtgcgaagagtgcggcaaggccttcaattggtcttcaaacctgatggagcacaagcggatacacacaggagagaagccctacaagtgtgaagagtgcgggaaaagtttcagtacattctccatccttacaaagcacaaggtcatacatacaggagagaaaccttacaagtgcgaggaatgtggaaaagcctacaaatggtcctctacattgtcctatcataaaaagattcacacagtcgaaaagccctataagtgtgaagaatgtggaaagggatttgtgatgttcagtatcttagcgaaacataaagttatccacaccggagaaaaattatacaaatgtgaggagtgtggaaaggcttataagtggccctccactctcagataccataagaagatccacacgggggagaagccctataaatgtgaagagtgcgggaaggccttcagtacttttagtatcttgacaaaacacaaggtgatccacaccggcgagaagccttataaatgtgaggagtgtggaaaggcgttttcatggttgtccgtgttttctaaacataagaagatccacacaggagagaagctttag

SEQ ID NO: 141225 - DNA, 123 bp, synthetic construct
  misc_feature 1..123: note = Description of Artificial Sequence: Synthetic coding sequence
  source 1..123: mol_type = other DNA
ggaaaaggtttttctatgttctccattctcacgaagcataaggcgactcatgccggagagaagccctataaatgtgaggagtgcggcaaggccttcaattggtcatcgaacttaatggaatag

SEQ ID NO: 141226 - DNA, 3504 bp, synthetic construct
  misc_feature 1..3504: note = Description of Artificial Sequence: Synthetic coding sequence
  source 1..3504: mol_type = other DNA
atgggcagcctgacttttcgcgacgttgccattgagtttagcttggaagaatggcagtgcctggatactgcacaacagaatctgtacagaaatgtcatgctcgagaattaccgcaatttggtgtttctgggaatcgctgcgtttaaacctgacttgatcatttttctcgaagaagggaaggaatcatggaatatgaagcgccacgaaatggttgaggagagtccagtcatctgcagtcactttgcacaggatctgtggccagaacaggggatcgaagattcctttcagaaagtcattctgagacgctacgaaaaatgtggccatgagaatttgcatttgaaaatcggctatactaatgttgatgaatgcaaggtccataaagagggctacaataagctcaaccagtcattgaccacgactcagagcaaagtcttccaacgtggaaagtatgccaacgtgttccacaagtgctcaaattcaaacaggcacaaaatacgccacactggcaagaaacacctgcagtgtaaagagtacgttcgctcgttttgtatgctttcgcatctgtcccagcacaaacgcatctacacgagggagaactcatacaagtgcgaggagggagggaaagcttttaattggtctagcacacttacttactacaaatctgctcatacaggcgagaagccctaccgctgcaaggagtgcggaaaggccttctccaagttttcaatactgactaaacataaggtcatccatacaggggaaaaaagctataagtgtgaagaatgcggcaaggcatttaaccaaagcgctattcttacaaagcataaaattattcacactggcgaaaagcctaataagtgcgaggagtgtgggaaggcattcagcaaagtgagcaccctcacaacgcataaagctattcatgctggcgagaaaccttataagtgtaaagaatgcggcaaagcctttagtaaggtgtccactcttatcacccataaggccatacatgccggggaaaagccttacaaatgtaaggagtgtggcaaggctttctcaaagttttcgattctcaccaagcataaggtcatccacaccggcgaaaaaccttacaaatgcgaagaatgcggtaaagcgtataaatggccttcgactttaagttatcacaagaaaatccataccggtgaaaagccttataagtgcgaagagtgcgggaagggattctcaatgtttagtatcctgactaagcatgaggtgatccacaccggtgaaaagccctacaaatgcgaagaatgcggtaaggccttcaattggtcctccaatttgatggagcataagaaaatccatacgggtgaaaccccctataagtgtgaggagtgcggcaagggatttaaatggtcctctacactgagctatcataagaaaattcacaccgtagagaagccctacaagtgcgaagaatgcgggaaggcctttaaccaaagcgcgattctcatcaaacataagcggattcatactggtgagaaaccctataagtgtgaggagtgtggaaagaccttctcaaaggtcagcacattgaccacacataaagctatacatgccggagaaaagccgtacaagtgtaaagagtgtgggaaaacgttcataaaggtttccaccctaacaactcacaaagccattcatgccggagagaaaccctacaagtgtaaggaatgcggaaaggccttttccaagttcagtatacttactaaacacaaggttattcacacaggggagaaaccatataagtgtgaggaatgtggaaaagcctttaattggtcatccaaccttatggaacataagaggatacacactggagagaagccttacaagtgtgaagagtgtgggaagtccttctcaacattttcggtcttgaccaagcacaaggtcatccataccggggagaagccttataagtgcgaggagtgcggtaaggcgtataagtggtcttccactctgtcttaccataagaagattcacacagtcgagaaaccttacaagtgcgaggaatgcggtaaggcctttaatcggagcgcaattctcattaaacataagcgcatccataccgacgagaaaccctacaagtgcgaggaatgtggcaagacattctcaaaagttagcactctgactacgcacaaagctatccacgcgggagagaagccatacaaatgcaaggagtgtggtaaggctttctctaagttcagcatactgaccaaacataaggttattcacactggagagaagccatataagtgtgaagagtgcgggaaggcgtacaagtggccgtccactctgagttaccataagaagatccatactggcgagaagccatataagtgcgaagagtgtggtaagggcttcagtatgttctccattcttacgaagcatgaggtgatccacaccggcgagaagccttacaagtgcgaggagtgcggcaaggctttcagttggctctccgtcttttcaaagcacaaaaaaactcacgctggggagaaattctacaagtgtgaggcctgtggaaaagcctataatacattttcaattctaaccaaacacaaggttatacacaccggcgagaaaccctacaagtgcgaggaatgtggtaaggctttcaactggtcatctaacctcatggagcacaaaaagatacatactggcgaaacaccatataaatgtgaagagtgtgataaagccttcagctggccatcaagtctaactgagcataaggccacccacgctggggaaaagccttacaaatgcgaggagtgcggaaaagcgttttcatggccttcccggctgactgagcataaggcgacccatgcaggcgaagagccctataaatgcgaggagtgtggcaaggccttcaactggagttccaatctgatggaacataaaaggatacataccggtgaaaaaccttataaatgtgaggagtgtggaaaaagcttcagcacatttagcatcctcactaagcacaaagtgatccatacaggagagaagccatacaaatgcgaagagtgtggcaaagcctacaagtggtcctccaccctctcctaccataaaaagatacacactgtcgagaagccatacaagtgtgaagagtgtggaaagggattcgtcatgttctcgatccttgccaaacacaaggttatccacaccggcgaaaagctgtacaaatgtgaagagtgcggaaaggcctataagtggccctctaccctcaggtatcataagaagatacataccggtgaaaagccctacaagtgcgaagaatgcggaaaggccttttccacctttagcatcctgactaagcacaaggtgatacatacaggagagaaaccatacaagtgcgaagaatgtggaaaggccttttcctggctgtctgtgttttcaaagcacaaaaaaatccatacaggcgtcccaaaccctcccactcataagaagattcacgccggggaaaagttgtataagtag

SEQ ID NO: 141227 - DNA, 1488 bp, synthetic construct
  misc_feature 1..1488: note = Description of Artificial Sequence: Synthetic coding sequence
  source 1..1488: mol_type = other DNA
atggctgaatcggcacccgcacggcatcggagaaaaagaaggtccacacccttaactagttccaccctcccctcccaggccactgagaaatcttcatatttccagactacagagatctcactctggactgttgtggcagctatccaggcagtcgagaaaaagatggagtcacaggccgcccggctccagtctctcgaggggagaacagggaccgcagagaagaaactcgccgactgtgagaaaatggcagttgagttcggaaaccaactcgagggtaaatgggcggttctggggaccttattgcaggaatatggtctgctacagagaagactcgagaacgtcgagaacctgcttcggaacaggaatttctggatattacggctaccccctgggtccaaaggagaggcaccaaaagtttctcggtccctggagaatgacggcgtgtgcttcactgagcaggagtgggagaacttagaggactggcagaaagagctctataggaacgtaatggaaagcaattatgagaccctggtctcactgaaggtgttgggtcagactgagggcgaagctgagctggggacagagatgctgggtgatttagaggaagaaggacctgggggcgcacatcccgccggcggcgtgatgataaaacaagaactgcagtacacccaggaagggcctgctgatctgcctggcgaattcagctgcatcgccgaggagcaggcctttctatcaccagaacagactgaactttggggcggtcaagggtcatctgtgctccttgagacaggacccggtgattccacgctggaagagccagttgggtcacgtgtccccagttccagcagaaccgtggggtgccctaagcaaaaatcacacagacaggtgcaactggaccaggagtgcggacagggcctgaaactgaagaaagatacttctcgcccctacgagtgctccgagtgcgaaattactttccggtacaagcagcagctcgccactcatctgagaagccactctggatgggggtcgtgtactcctgaagagcctgaagagtctttgcgtcctagacccagactgaaacctcagactaaaaaggcaaagctccaccaatgtgatgtctgcctgaggtcctttagttgcaaggttagcctcgtgacccaccagcggtgccacctgcaggagggtccttctgcgggtcagcacgtgcaggaaaggtttagccccaattccctcgtggcactgccaggccatatcccttggagaaagtctcgcagctccctcatttgcgggtattgcggcaaatccttctcgcacccatctgatctcgttcgtcaccagcggattcacactggtgaacggccatacagctgcaccgagtgtgaaaagtctttcgtgcaaaaacaacatcttcttcagcatcagaagatccatcagagggaaaggggcggcttggccctcgagccagggcggccaaacggtttgttgtag

SEQ ID NO: 141228 - DNA, 1380 bp, synthetic construct
  misc_feature 1..1380: note = Description of Artificial Sequence: Synthetic coding sequence
  source 1..1380: mol_type = other DNA
atggctgcacctctcgaagcccaggaccaagctcctggtgaaggcgagggcttactgatcgtgaaggtggaggatagttcctgggagcaggagtccgcacagcacgaggatggtcgggactcagaagcctgtcgacagagatttcggcagttctgttatggagacgtgcatggccctcatgaagcgttttcacagctgtgggagctttgttgtcggtggttgcgccccgagcttagaactaaagagcagatcctggaactgctggttcttgaacaatttctcactgttcttccaggagagatccagggctgggtccgcgagcaacacccaggatcaggggaggaggctgttgccctggtggaggatctgcagaaacagcctgtgaaggcttggcgccaggacgtcccctcagaagaggcagagcctgaggccgccggacgtggctcccaagctactggccccccccctaccgttggagcacgccggcggccctcggtgcctcaggagcagcattcccatagcgcgcagccaccggccctcctaaaagaaggtaggccaggagagacgactgatacatgttttgtgtccggggtccacggacccgtggcccttggtgacattccattctatttctctagagaagagtggggcactttggacccggcccagagggatctcttttgggacataaagagagaaaattccagaaatacgactttggggttcggtctgaagggacagagcgaaaagtcactgttacaggaaatggtgccagtcgttccaggtcagactggtagcgacgtaacagtctcttggtcaccagaagaagccgaggcttgggaatctgagaataggccacgtgccgccctcggccctgtcgtgggagctagaaggggccggccaccgacccggcgaagacagttcagagatctggctgcagagaagccacactcttgcggccaatgcgggaaacgctttaggtggggtagcgatctggctagacatcagcgaacccatacaggcgagaagccgcataaatgtccggaatgtgataaatctttccgaagctcctcggacctggtcagacatcagggtgtacacacaggcgagaagcccttcagctgcagcgagtgcgggaagagtttctccaggtcggcctaccttgctgatcatcagagaatccacacaggggaaaagccttttggttgctctgactgcggaaaatccttctctcttagatcgtatcttcttgaccaccggcgggttcacaccggagaaaggccattcggctgcggcgaatgcgataagtcctttaagcaaagagcccacctgatcgctcatcagtctttacacgccaagatggcccagccagtcggctag

SEQ ID NO: 141229 - DNA, 906 bp, synthetic construct
  misc_feature 1..906: note = Description of Artificial Sequence: Synthetic coding sequence
  source 1..906: mol_type = other DNA
atgtgccctcgtcggcgcaggaacccaagactccaagcaggggaccctagaccacgcgggctcccaaggcggtggggccacggtggtgggcgactgttccccagatcaagcacagcaatcgcaggccctgttgccctgggtgacatcccattttacttttccagggaagaatggggtactctcgacccagctcagcgggaccttttttgggacatcaagagggaaaatagccgcaacaccacattaggatttggacttaaaggccaaagcgagaagtctctactgcaggaaatggttcccgtggtaccgggacaaaccggcagtgacgtgacagtgtcttggtcccctgaagaggctgaggcatgggagtccgaaaatcggccaagagccgcgcttggtcccgtagtcggggcaagacggggtaggccgcccactcgcaggagacagtttcgagatctagctgccgaaaaaccccattcttgtgggcaatgtgggaaacggtttcgctggggatccgaccttgcccgccaccagcggacacacacaggggagaaacctcacaaatgtcccgaatgtgacaagagcttcaggtcaagctccgacctcgtcaggcaccagggcgtgcatacgggcgaaaagcctttttcatgtagcgagtgcggcaaatcatttagccggtccgcatatctagccgaccatcagcggatccacaccggggagaagcctttcggctgttccgactgcggtaaatctttctccttaagatcctacctgcttgatcatcgtcgcgttcataccggggaaagaccatttgggtgcggggaatgtgataagtcgtttaaacagagggcgcatctgattgctcatcagagcctccatgccaagatggcccagcctgtgggctag

SEQ ID NO: 141230 - DNA, 1821 bp, synthetic construct
  misc_feature 1..1821: note = Description of Artificial Sequence: Synthetic coding sequence
  source 1..1821: mol_type = other DNA
atggcagtgacttttgaggacgtaacaatcatttttacgtgggaggaatggaaattcttggattcttcccagaaacggttgtaccgagaagtgatgtgggagaattacacaaacgtaatgtccgtcgaaaattggaacgagagctataaatcccaggaagagaagtttagatacttagaatacgaaaacttcagctattggcaggggtggtggaacgccggggctcagatgtatgagaaccaaaactacggggagaccgtgcaaggaacagatagcaaagaccttactcagcaagaccgatcacaatgccaggagtggctgatcctttctacacaggtgccaggatacggcaactacgagctgacgtttgagtctaaatcgctgcgcaacttgaagtataagaactttatgccttggcaatccctggaaaccaaaactacccaggattacggcagggagatctacatgtccggctctcacgggtttcagggcggacggtaccggttgggcatctccagaaagaatctctctatggaaaaggagcagaaactgatagtacaacactcctacataccagtggaagaggcccttccccaatatgtaggcgtgatctgtcaagaggatctattgagggacagcatggaggaaaagtactgcggatgtaataaatgtaaaggcatctattactggaatagtcgttgcgtattccataaacgcaatcagcctggtgagaacttgtgccagtgttccatctgcaaggcgtgtttttcacaacgctcggacctttataggcacccacggaaccacatcgggaaaaaactgtacggctgtgatgaagtggatggtaatttccaccagtcaagtggggttcacttccaccagcgtgttcacataggcgaagtgccctactcctgcaatgcatgcggcaaatcattttcacagatttcaagtctccataaccaccagagggtacacacagaagagaagttctataagattgaatgcgataaagatctctcacggaactcccttctccacattcatcagagactccacatcggcgaaaagccattcaagtgcaaccagtgtggcaaaagcttcaaccgtagctccgttctgcatgtccatcagagggtgcacactggagagaagccatataaatgtgatgaatgcggcaaaggcttctctcaatcatccaacttgagaatccatcaactggtacacacaggcgaaaaatcatataaatgtgaagactgtgggaagggcttcacgcagaggagcaatttacagatccaccagcgagtccataccggcgaaaaaccgtacaaatgtgacgattgcggcaaggacttcagccattcatctgacctgcgcatacaccagagagtgcacaccggagaaaagccttacacgtgtccggaatgtgggaagggattcagcaagtcaagcaaacttcatacccaccagcgggtccatacaggggagaagccttataagtgcgaagagtgcgggaaaggtttctcccagcgttcgcatctcctgatacaccagcgagtgcacacaggggaaaaaccctataaatgccatgactgcggtaagggcttctcgcactcctcaaacctgcacattcatcagagggtccacacgggcgagaaaccttatcagtgtgctaagtgcggcaagggattcagccacagcagtgctctgcgcattcaccaaagagtgcacgccggcgaaaagccttacaaatgccgagagtattataaggggttcgaccacaatagtcacctacataacaaccacaggcgcggcaatctttag

SEQ ID NO: 141231 - DNA, 1821 bp, synthetic construct
  misc_feature 1..1821: note = Description of Artificial Sequence: Synthetic coding sequence
  source 1..1821: mol_type = other DNA
atggccgtgacttttgaggacgtaacaatcatattcacatgggaagaatggaaatttttggatagttcccagaaacggctgtatcgggaggttatgtgggagaactatactaacgttatgtcagtcgagaattggaacgagtcatacaagtcccaggaggaaaaattcaggtacctggagtacgaaaatttttcttactggcagggatggtggaacgccggagctcagatgtatgaaaaccaaaactacggagagacggtgcaaggcacagacagcaaagaccttactcagcaggacagatcccaatgccaggagtggctcatcctgagtacacaggtgcccgggtacggcaactacgaattgacctttgagtctaaatcgctgcggaacctcaaatacaagaacttcatgccttggcaaagcctggagaccaagactacgcaagattatggtcgtgagatctatatgtccggctcacatggctttcaaggtgggaggtacaggctgggaatttctagaaaaaacctgagcatggagaaagaacagaagctgattgtgcagcattcctacattccagtagaagaggccctgccacagtatgtgggagtgatctgtcaggaggaccttctgcgtgacagtatggaggaaaagtattgcggatgcaacaagtgcaaaggaatttactattggaattctagatgtgtgtttcacaagaggaaccagcccggcgagaacctctgtcagtgcagcatttgcaaggcatgtttcagtcaacggagcgacttgtacagacaccctcggaatcacataggcaaaaaattgtatggttgtgatgaagtggacggaaacttccatcagtcaagcggagtccacttccaccagagggtgcacatcggtgaggtgccgtacagctgcaacgcttgtggaaagtccttttctcagatctcatcccttcacaaccatcagcgagtccatactgaggaaaaattctacaaaatcgagtgcgacaaagatctaagccgcaattcacttctgcacattcaccagaggctacacatcggagagaaaccttttaaatgcaatcagtgcggcaagtcgttcaataggagctctgtgttgcacgtacatcagagggttcacacgggcgagaagccatacaaatgcgatgagtgtggtaaaggattctcccaaagctcaaacctgaggatccatcaactggtccacacaggtgaaaagtcatacaagtgcgaagactgcggcaagggcttcacccagcgatctaacctgcaaatccaccagagggtgcacacaggcgaaaaaccgtataagtgtgacgactgcgggaaagacttctctcactcctcagacctgcggatccaccagcgcgtccacaccggggagaagccgtatacctgtcccgagtgtgggaagggatttagcaagtcaagtaaacttcatacacaccagcgcgtgcataccggcgagaagccctataagtgtgaggagtgtggaaagggattttcacagcgttcacacctgctgatccatcagcgagtccatacgggagagaaaccatacaagtgccatgactgcggcaaagggttctcacatagctcaaatttgcatattcaccagagagtgcacacaggtgaaaagccatatcagtgcgctaaatgtggcaagggcttctctcactctagcgccctgagaatccaccaaagggtgcacgctggagagaaaccatacaaatgccgcgagtattacaagggcttcgaccacaactctcacctccataacaaccaccgccgcggcaatttgtag

SEQ ID NO: 141232 - DNA, 1554 bp, synthetic construct
  misc_feature 1..1554: note = Description of Artificial Sequence: Synthetic coding sequence
  source 1..1554: mol_type = other DNA
atgcagccactaagtaagcttatggccatttcaaagcccaggaacctcagtttgagagagcagcgcgaagtgctgcgcgcagatatgtcctggcagcaggaaacaaacccagttgttgaaacgcacgacagtgaggcctcacgacaaaagttcagacacttccagtatctgaaggtttccggacctcacgaggcgttatcccaactgtgggaactctgcctgcagtggcttcgtccagagatccacaccaagaaacagataatcgagctcctagtgctagaacagtttctggctatccttcccgaagaggtcaggacgtgggtaaatctccagcatcctaacaactctaaggacatggtgaccttgattgaagacgtcatagaaatgctggaggacgaggacatgccctgcaaggatagtgccctccaaatgggcagcataaaagagaaaatgaaagcaggatctagaaccggtaagccccaggagccagtgaccttcaaggacgttgtggtcgagttttctaaggaggagtggggccagttggattctgccgtgaagaacctgtaccggaacgtgatgctggaaaacttccgaaatctgaactcgctgagaaaggcacatttactctccaagcctttcgagagcttgaagctcgagtctaaaaaaaaacgatggattatggaaaaagaaatcccacgaaagactatattcgatatgaaatccatttctggcgaggagtctagtcatggcgtcattatgaccaggctaaccgagtctggccaccctagcagtgatgcttggaaaggcgaaaactggctatatcggaatcagaaaaaatgggacatcaatctacctcaagaagcgtttatacccgagaccatatacacggaggaggaagattttgagtgtagcgaaaacaagaaatcattcgacatcaacagtgtctccagtatatgtgcgatccaagtgggaatccctagccggaaagggtctcccaagtgtgacaaatttaaaacctatttcaagtttaacctggactcggttggtaaacaacactccgaatacgaatatggcaacgacctgtccctatctactgacatcaggcaccagaaaagccatactaccatgaactcctatgagtgttatcaatgcggcaaagcattttgcagatcatcctcactcatccgacaccagataattcacaccggagagaagccatataaatgtagcgagtgcggaagattctttaatcgtagaactaacttaaccaaacaccaaaagctgcacgcagaagctaaagcttgtacctcgaacaaatgcggaaaagcgttctctaaaagcgaggactctaacaaccccacattacacttcggaaataatttttaccagtgtgttaactgcggcaagtcttttaaccggagctccagcctgatccggcatcagatgatccataccggagagaagcccttcaaatgcaaagagtgcagcaaggcctttaaccgcagttcgaatctggttaaacaccagaaattgcacaccagggacaaatcatag

SEQ ID NO: 141233 - DNA, 1554 bp, synthetic construct
  misc_feature 1..1554: note = Description of Artificial Sequence: Synthetic coding sequence
  source 1..1554: mol_type = other DNA
atgcagcctctgagtaagctgatggcgatcagcaaaccacgaaatttgagtctgagagaacaacgtgaggtgctccgggccgacatgtcatggcagcaggagacaaaccccgtggtggagacccacgatagtgaggcctctcgccagaaatttcggcacttccagtacctaaaagtcagcgggccgcacgaggccctgtcacaactgtgggagctgtgtttgcagtggctaaggccggaaatacacacgaaaaagcagataatcgagctgcttgtgctggagcaattcctggccatcctgcctgaagaggtgcgtacatgggtaaacttacaacatccaaacaatagtaaggacatggtcacattaatagaggacgtcatcgaaatgctggaagatgaggatatgccgtgcaaagatagtgccctgcagatgggcagcattaaggagaaaatgaaggccgggagcagaacggggaaacctcaggagcccgtgacttttaaagatgtggtggtcgagttttcaaaggaggagtgggggcagctggacagcgccgtaaaaaacctgtatcgcaacgtgatgcttgagaacttccgtaacctcaactccctgagaaaagcccatctgctgtcgaagccattcgaatctttgaagctcgaaagtaagaaaaagcgctggataatggagaaagaaatccctaggaagaccatatttgacatgaagtctatctctggcgaagaatccagccacggggtgattatgaccagactcacagaatctgggcatcctagctcagacgcatggaaaggggagaattggttatacagaaatcagaaaaagtgggatattaatttgccccaggaggccttcatccccgagacgatttacaccgaagaagaggatttcgagtgctcagaaaataaaaagagctttgacatcaactcggttagcagcatctgtgccatccaggtgggcatccccagccggaagggatcccccaaatgtgacaagttcaagacgtactttaaatttaacctcgattccgtgggaaagcagcactccgaatatgaatacgggaatgatctatctctttccactgacattagacaccagaagagtcacaccacgatgaattcttacgagtgttatcagtgtggcaaggctttctgccgctcttcgagcctgatacggcaccagatcattcacacaggcgagaagccttacaagtgctccgagtgcgggaggttcttcaataggagaacaaacctgaccaaacaccagaaactgcatgcagaagccaaagcatgtacgagtaataaatgcggtaaagcatttagtaagagcgaagatagtaataatcctaccctgcatttcggaaataacttttatcagtgtgtgaactgtggaaagagcttcaaccggagtagcagtctgatacgccaccaaatgattcatacaggggaaaagcccttcaagtgcaaagagtgtagtaaagccttcaacagatccagcaacctggtcaagcaccagaagctccacactagagacaagagttag

SEQ ID NO: 141234 - DNA, 915 bp, synthetic construct
  misc_feature 1..915: note = Description of Artificial Sequence: Synthetic coding sequence
  source 1..915: mol_type = other DNA
atgcagccactctcgaaactcatggccatttctaaacccaggaatctcagtctccgggagcagcgagaggtgctgcgggccgatatgtcatggcagcaggaaactaatccagtggtggaaacacatgactccgaggcctcccggcagaaatttcgccacttccagtacctcaaggtctctggtcctcatgaggccctctctcagctctgggagttatgtttgcagtggctacgtcctgaaattcataccaaaaaacaaattatagaactgctggtgctcgagcagtttctggcaattcttcctgaagaagtacggacctgggtcaatcttcaacatcctaacaattctaaagatatggtgacgctcatagaagatgtcattgagatgctggaggatgaggacatgccttgtaaggactcagcgctgcaaatggggtcaatcaaggagaagatgaaggctggcagtcggaccggtaaacctcaagagcccgtgacctttaaggacgtcgtagtcgagttcagcaaagaagaatgggggcaactggactcagcagttaaaaacctgtatcgaaatgttatgttagaaaatttccggaatcttaacagcctgaggaaagcccacttattaagcaagcccttcgagagcctcaaactggaaagcaaaaaaaaacgctggatcatggagaaggagattccaaggaagacaattttcgacatgaagtccatctccggggaggaaagtagccacggggtgattatgaccagactcactgaatctgggcatccaagttccgacgcctggaaagacggggtttctctcctgctgcctcgcctggagtataacgatgctgtctccgcacattgcaatctgcatctgtgggtgcaggtcattctactgccgcaaccaccggaatag

SEQ ID NO: 141235 - DNA, 3147 bp, synthetic construct
  misc_feature 1..3147: note = Description of Artificial Sequence: Synthetic coding sequence
  source 1..3147: mol_type = other DNA
atgcagtctaaggttacaggcaacatgcccacccagtccctccttatgtatatggacggcccagaagtgattggctcctccctggggtcgcctatggagatggaggacgccctgtccatgaagggtactgcagttgtgccatttagagctacccaggagaaaaacgtgatccaaatcgaggggtatatgcctctagattgcatgttctgttctcaaacattcacacactcagaggatctgaacaagcacgtgctaatgcagcaccggcccactctttgcgaaccagcagttctgagggtggaagcggaatatttatctccgctggataaatcccaggttcggacagaacctcctaaggaaaagaattgtaaggagaacgagttcagttgcgaggtatgcggacagacatttcgggtcgcctttgacgtggagatccacatgagaacccataaagactcctttacatacggctgcaacatgtgcggccgtaggtttaaagagccctggttcctgaaaaatcacatgcgtactcataacggtaagtcaggcgcacggtctaagctgcagcaaggcctcgaatctagccccgccaccattaacgaggtggtgcaggttcacgcggcagagagcatcagcagtccttataaaatatgcatggtgtgcggctttctgttcccaaacaaagaaagtttaatcgaacaccgaaaggtgcacaccaagaaaacagcctttggaacaagtagtgcacagactgactccccgcagggaggaatgccaagcagcagagaggatttcctgcagttatttaacttgcggccgaaatcacaccccgaaaccggcaagaagcccgttagatgcatcccccagctggaccccttcaccacattccaggcctggcagctcgccactaagggcaaagtggccatatgccaggaagtgaaagagtcaggccaggaagggtctaccgataacgacgactcctccagcgagaaggaacttggagaaaccaataaggggagctgcgcggggcttagccaagagaaagaaaaatgtaaacactctcatggggaagctccttccgtagacgcagacccaaaactgccatcgtctaaagaaaaaccaacacattgcagcgagtgtggaaaggcattcaggacttaccaccaactggtcctgcatagccgcgtccacaaaaaagaccgtcgggcaggtgctgagtcgcctactatgtcagtggacggaaggcagcccgggacatgttcacctgaccttgctgcgccacttgacgagaatggcgccgtggaccgaggcgagggcggctcagaggatgggagtgaagacggccttcctgagggcatccatttagataagaacgacgacgggggcaaaatcaaacacctcacctcttcccgcgaatgtagctactgcggcaaattcttcagatccaactactatcttaatatccatctgcgtacacacactggagaaaagccctataaatgcgagttttgcgagtatgcagctgcccaaaagacctctttgcgctaccacttggagcggcaccataaggagaaacagaccgacgtcgccgcagaagtaaagaacgatggaaagaatcaggacacggaagacgccctcttaacagcagactcagcgcagaccaaaaacctgaagaggtttttcgatggggccaaggatgtgactggctctccccctgcaaaacaactaaaggagatgccatctgtgtttcagaacgtactggggtcagcagtgctgtcccccgcccacaaggatacccaggactttcataaaaatgctgcagacgactctgcggataaggtaaataaaaacccaacacccgcctatctcgacctacttaaaaaaagaagcgctgtagaaactcaagcaaacaacctcatatgtcggacaaaagccgacgtgacgcctccccctgatggatcaaccactcacaatttggaggtgagcccaaaggaaaagcaaactgaaactgccgcagactgcaggtaccggccatccgtggactgccatgaaaagcctctgaacctttctgtgggcgctctacacaattgtcctgccatatccctttccaaatccctgattccaagcataacctgtccattttgcactttcaagactttctatccggaagtgctcatgatgcatcagcggcttgaacacaaatataacccggatgtccataagaactgccggaacaagagtctcctccggtctcgtcgcacaggttgcccacctgccttgctgggaaaagacgttccgccactttcaagcttctgcaaacctaaacccaaaagcgctttcccagcacaatcaaaatctctgccatcggccaagggcaagcaatcacctccaggcccaggtaaggcacccctgaccagcgggattgattcctccactcttgcaccctccaatcttaagagtcacagacctcagcagaatgttggtgttcagggcgccgcaaccaggcaacagcaaagtgagatgttccctaaaacctccgtttccccggcacccgacaaaaccaagcgccccgagacaaaactgaagcctttgcccgtcgccccctctcaacctaccctaggaagttcgaatattaacggctcgatagattaccctgctaagaatgacagcccatgggcccctccagggcgcgactacttctgtaacaggtccgccagtaatactgccgctgagttcggggagcccctcccaaaaagactaaagagttcagtcgtcgcactggatgtagaccaaccaggcgcaaactacaggagagggtacgatctcccgaagtaccatatggtgcgcggcattacctctcttctgccccaggattgcgtgtacccttcccaggccctgccccccaaacctcgcttcctatcctctagcgaagtggacagcccaaacgtcctcacagtgcagaaaccatacggcggaagtggcccattgtacacttgcgtgcctgccggctcgcccgccagctcgtcaacattagaaggaaagcgtccagtttcctatcagcacctctctaatagcatggcccaaaaaaggaactatgaaaattttatcggcaacgctcactaccgacccaacgacaaaaagacttag

SEQ ID NO: 141236 - DNA, 3147 bp, synthetic construct
  misc_feature 1..3147: note = Description of Artificial Sequence: Synthetic coding sequence
  source 1..3147: mol_type = other DNA
atgcagagcaaagtgaccggcaacatgccaacacagtctttactcatgtatatggatgggcccgaagtaatcggatccagcctcggttcaccaatggagatggaggacgctctgagtatgaagggcactgccgttgtgcctttcagagccacgcaagaaaagaacgtgattcagatagaaggctatatgcctctggattgtatgttctgctcacaaacttttacccattcggaggatctgaataagcatgtgttgatgcaacacaggcccaccttgtgtgaacctgccgttcttagagtggaagctgaatatctctcccccctagacaaaagccaggttaggactgaacctccaaaggagaaaaactgtaaagagaatgagttttcttgcgaggtgtgtggacagacgttccgcgtcgcttttgatgtggagatccacatgcgaacccataaggacagtttcacttatggttgcaacatgtgcggtagacggtttaaagaaccctggtttctcaaaaatcatatgaggacacacaacggaaaatccggcgctaggtccaaacttcaacaggggctggaaagttctccggccaccatcaacgaagtagtgcaggtgcacgcagccgagtcaatcagcagcccatacaagatctgtatggtatgtggatttctgttcccaaataaggagtcacttattgaacaccgcaaagttcacactaaaaagaccgctttcggcacttccagtgctcagactgactcacctcagggaggaatgccctcttcaagagaggatttcctgcagttgttcaatttgaggcctaagtcccacccggagacgggaaagaaacccgtccgctgcatccctcagttagatcctttcactacattccaagcttggcagctggcaaccaaaggaaaagtggccatatgccaagaggtgaaagaatctggacaagaaggctcaacagataacgacgacagcagtagcgagaaggagctgggagagaccaacaaaggaagctgtgctgggctcagccaggagaaggaaaagtgtaaacactcccacggcgaggccccatcagtagatgctgacccaaaactgcccagctcgaaagagaagcccactcactgtagcgaatgcgggaaagctttcagaacatatcatcagcttgtgctgcattcacgagtacataagaaagatagacgggccggcgctgagagccccacgatgtccgttgacggtagacagcccggcacctgttctcctgatctggcggccccgctggatgaaaatggtgctgttgaccggggtgaagggggcagcgaggatggctcggaggatggcctgccagaggggatacaccttgataaaaacgacgatggcgggaagatcaaacatctcacttctagccgtgaatgctcatattgcggaaaattcttcagatctaattattatctcaacattcaccttaggacccatactggcgaaaaaccctataaatgtgagttttgtgaatatgcagccgctcagaagacatcgctgcgataccatttggagcgccatcataaagaaaaacagactgacgtggccgcagaggtcaaaaacgatggtaaaaaccaagataccgaggacgccctgctcactgctgactcagcgcaaaccaagaaccttaaacggttcttcgatggcgccaaggacgtgactggaagcccacccgcgaagcaacttaaagagatgccatccgtctttcagaatgttctcgggagcgctgttctttccccagcccacaaagatactcaagacttccacaaaaacgctgctgacgactctgctgacaaggttaacaaaaatcccacaccagcctacctggacctgctgaagaagaggagcgcagtggagacccaggcgaacaatctgatctgccgcactaaagctgatgtcacccctcccccagatgggtccacaacacataatctagaagtgagccctaaggaaaaacagaccgaaaccgctgctgattgtagatatagaccttctgtggattgccacgagaagcccctgaacctgtccgtaggagctctgcacaattgcccagctataagcttgtcaaagtccctgattcctagcattacctgtcctttctgtacattcaagaccttctatcccgaggtgctgatgatgcatcagaggctcgaacataaatataatcccgacgtgcataaaaattgcagaaataagtctctactgaggtcccgccggaccggatgcccccctgcgctcctgggtaaggacgtgccccccctgtctagcttttgcaagcctaaaccgaagagcgcttttccagctcagagtaagagcttaccttccgccaagggaaaacagagtcctcctggaccaggcaaagcaccactcacgtcaggtattgattcttcaaccctcgcgcccagcaacttaaaatctcacaggcctcagcagaacgtgggtgtgcagggtgcagccacacgtcagcagcagagcgagatgtttcccaagacttccgtgtcacctgcgcccgacaagacaaagcggcccgagacaaagctgaagcccctgccggtcgccccgagccagcctacccttgggtctagtaatataaacggaagcattgattatcctgcaaaaaatgattcgccatgggctcctcctgggcgcgattacttctgtaaccgttccgctagtaacaccgctgcagaattcggtgagcctctgccaaaacgcctgaagagcagcgtggttgcccttgacgttgaccagccaggggccaactacaggcgcggatacgatctgccgaaatatcatatggtaagagggatcacaagtctcctgccccaggattgcgtgtatccttcccaggcccttccacccaagcctcgctttctttcatcaagcgaggtggatagtcctaatgtgctcacagtccagaaaccatacggtggtagtgggccgctctatacttgtgtaccagcaggttcccctgccagcagctctaccctggaagggaaaagaccagtgtcgtaccagcatctttctaattccatggcccagaagcggaactacgaaaatttcatcggtaacgctcactacaggccaaatgacaaaaagacctag

SEQ ID NO: 141237 - DNA, 666 bp, synthetic construct
  misc_feature 1..666: note = Description of Artificial Sequence: Synthetic coding sequence
  source 1..666: mol_type = other DNA
atgttcccaaagaccagtgtgtcgccagccccagacaagacgaagcggcctgagaccaaacttaagcctctgcctgtcgctccgagccagccgacgctaggatcttccaacataaacgggagcattgattaccctgctaaaaacgatagcccatgggcgccgcccgggagggactatttctgtaatcggtccgcatcgaacaccgccgccgagttcggtgagcctctgccaaagaggctaaaaagctccgtagtcgctctggacgtggatcagcccggcgctaattaccgacgcggctatgatctgccgaagtaccacatggtccgaggaataaccagtctgctccctcaggactgtgtgtatccgagccaggctctcccacccaagccaaggtttctctctagttccgaggttgacagccctaatgtcctgaccgttcaaaaaccctacggtggctctgggccattgtacacctgcgtgcctgccgggtcaccagcatctagtagcacactcgagggcctaggaggatgccagtgtttactgcccatgaaacttaactttaccagctcctttgaaaagaggatggtaaaagccactgagatttcatgcgactgtacagtgcacaagacgtatgaggagtcggctcgcaataccaccgtggtttag

SEQ ID NO: 141238 - DNA, 288 bp, synthetic construct
  misc_feature 1..288: note = Description of Artificial Sequence: Synthetic coding sequence
  source 1..288: mol_type = other DNA
atgcaaagtaaggtgactgggaacatgccaacccagtccttgttgatgtacatggacggacccgaggtgattggcagctcactgggaagtcctatggaaatggaggatgccctttcaatgaagggcaccgctgttgtcccattcagagcgactcaggaaaaaaacgtcatacagattgaggggtatatgcctctggattgtatgttttgcagccagacctttactcacagtgaggacttaaacaaacatgtcctgatgcagcatagacctaccctgtgtgaaccttag

SEQ ID NO: 141239 - DNA, 2169 bp, synthetic construct
  misc_feature 1..2169: note = Description of Artificial Sequence: Synthetic coding sequence
  source 1..2169: mol_type = other DNA
atggagggcagcaggccacgagcaccatctggccacttggcaccttcacctcctgctttcgacggagagctcgatctgcagagatacagtaacggacccgctgtgagcgccggcagccttggcatgggggctgtgtcctggagcgagagtcgggctggagagaggcgcttcccttgccctgtatgtggaaagcgcttccggtttaacagcatcctcgcgctgcacctccgagctcatccgggagcgcaggcctttcaatgcccacactgtgggcaccgcgccgcccagagagcactgctcagatctcacttgcggactcaccaacccgaacgacctagatccccggcggcccggctgctcttggaattggaagagcgagctctgctacgtgaagcgagattagggcgagcccgatcttctggtggcatgcaagctacccctgcaactgaagggctcgcaaggccacaggcaccatccagttctgctttccgctgtccatactgcaaggggaagtttcgaacttccgccgaacgggagcgacacctccatatccttcatcggccctggaagtgtgggttatgcagctttggcagttcccaggaggaagagcttctacatcatagtttgacagcccacggggctccggaacgaccattggctgcaaccagtgcggctccccctccacagccacagccccaacctccaccacaaccggagccccgctcggtcccacaacctgaaccagaacctgaacccgagcgagaagcgacccctaccccggctccagcggctccggaggagcctccagctccaccagagttccggtgtcaagtgtgcggccaatcttttacacagtcttggttcctgaaaggccacatgcgaaagcacaaagcatccttcgaccacgcctgtccagtatgtggccgatgctttaaagagccgtggttcctgaaaaatcacatgaaagtgcacgcctccaaattaggccccctcagggctccgggacccgccagtgggccagcccgcgcgccccagcccccagatctcgggcttctcgcctatgagcctctgggacctgcccttttgttggcgccggcccccactcccgcagaaagacgggagccccctagtctgttgggctacttgagccttcgtgctggcgaggggagacctaatggagaaggggctgaacccggtcctggaaggagctttggcggattcagacccctctccagtgcactgcccgcacgggcgcgtcgtcatagggctgaggagccagaggaagaggaagaagttgttgaagctgaggaagagacatgggccagaggacgtagcttggggagtctcgcaagtttacatcccagacctggcgaagggcccgggcactccgcatcggccgccggagcacaagccaggtcaaccgcaactcaggaggaaaacggcctgctggtcggaggaactaggccggagggcggtcgtggcgccaccggtaaagactgccccttttgcggaaagtccttccgcagcgcccaccatctcaaagtacacctgagagtccatacaggtgagaggccctacaaatgcccacattgcgactacgctgggactcagtcaggttccctgaagtaccatctccagcggcaccatcgtgagcaacgttccggcgcagggcccggaccccccccagagccaccccccccgtcccagcgcggtagtgcccctcaatctggagcaaagccttcaccccagcccgcaacctgggtggaaggggcatccagtccacggccccctagttccggtgcaggccccgggtcccgcaggaagcctgccagtcccggccgcaccctgaggaatggcagggggggcgaagctgagccactagacctgtcattacgggccggccccgggggagaggcagggccaggtggtgctcttcacagatgtctcttttgcccgttcgccaccggcgcgccagaactcatggctcttcacctccaggttcaccatagtcgtcgggctcgagggcggagaccaccgcaagcagatgctagcccaccgtacgccagagtgccatccggagagactccgccctctccctctcaggagggagaagaggggagcgggttgagccggcctggcgaggctgggctaggaggccaagagagatag

SEQ ID NO: 141240 - DNA, 2169 bp, synthetic construct
  misc_feature 1..2169: note = Description of Artificial Sequence: Synthetic coding sequence
  source 1..2169: mol_type = other DNA
atggaaggctctaggccaagggccccctcaggccacttggctccaagccctcccgccttcgacggagaattagatttgcagcgctacagcaacggtcctgccgtgtcagctggttccctcggaatgggagcagtgagctggtccgaaagtcgggctggcgaacgcaggtttccatgtccagtgtgcgggaaaaggtttaggtttaattcgatacttgccctgcacctgagggcccatcctggggcccaagcattccaatgcccgcactgtggtcaccgggctgcccagcgagccctgttgagatcacacctgcgaacgcatcaacccgaacggccaaggagcccagcagcacggcttctactggaacttgaagagagggcactgttgagggaggcaagactaggccgggctcgatcttccggcgggatgcaggctacacccgcaacagaagggctggctcgcccacaggcaccaagcagtagcgcttttcgatgtccctattgcaaaggtaagtttcgcacctcggctgagagggagcgacacctgcatattctgcaccgaccatggaagtgcgggctatgcagctttggcagctctcaggaggaagaacttcttcaccacagtctgactgctcatggggctcccgaaagacccctggcggctacaagcgcagccccaccccctcaaccccaaccccagcctcctcctcagccagagcctcgtagcgtgccacagcccgagccagagccggaacccgaacgagaggcgactccaacacctgccccagcagccccagaggaacctcccgcaccaccagagtttcggtgccaagtctgcggccagtccttcacacagtcctggttcctgaagggtcacatgcgtaagcacaaggcgagcttcgatcatgcttgccccgtgtgcggaagatgctttaaggagccatggtttcttaagaaccatatgaaagtccatgcctcaaagttgggtccccttcgcgcccccggccccgctagtggccccgcgcgagccccgcaaccgccagacctggggttgcttgcctatgagccgcttgggccagcgctcctcctggcacccgcccctaccccagccgaaaggagggagcctccttccctgctagggtatttaagcctaagagctggagaagggcggccgaatggtgagggggccgagccgggtcctggcagatctttcggcggcttccggcctctctccagtgccctgcctgccagagctcggaggcatcgtgcagaggaaccggaggaggaggaggaggtcgtggaggctgaggaagagacatgggcccggggcagatctctagggtccctggcctccctccacccgcggcccggcgagggtcctggacattctgctagtgccgccggagcacaggctaggagtacggcgacacaggaagaaaatggtcttctggtgggtggtaccagacccgaggggggtcgcggcgcaacagggaaggactgtcccttctgtggcaaatcctttcggagcgcccatcatctgaaagtgcatctgagagtgcacaccggggagcgtccctacaaatgcccacattgcgattacgccggaacccaatccggatcattgaagtaccacctccaacgtcaccatcgcgagcaaaggtccggcgctggccccggccccccacctgagccacccccgccttcacagaggggttcagccccccagagtggtgcaaagccctcccctcagcccgcgacatgggttgagggtgccagttcgccccgccctccaagctcaggggctggcccagggtcgagacgaaagcctgcatcccccgggagaactctgcgcaatggtcgggggggggaagccgaacctttggatctgtccttacgagcggggcccggtggggaggcgggaccagggggggccctgcaccgctgcctcttctgtcccttcgctactggggcccctgaactgatggcgctacatttgcaagtacatcattcccggagggcccgggggcgacggcccccacaggcagacgctagccctccatatgcccgcgtgcctagcggcgagacccctcctagcccatctcaggaaggagaggagggcagtggcctgtcgaggccaggggaggctggcctgggggggcaggaacgctag

SEQ ID NO: 141241 - DNA, 2169 bp, synthetic construct
  misc_feature 1..2169: note = Description of Artificial Sequence: Synthetic coding sequence
  source 1..2169: mol_type = other DNA
atggagggctcacggcccagagctccctccggacaccttgcgccgtccccccccgccttcgatggcgaattggacttgcagcgatattctaatgggcccgccgtgtctgctgggagtttgggaatgggagcagtgtcctggagcgaaagccgcgcaggcgagagaaggttcccttgcccagtgtgcggcaagcgattccggtttaattcaattctggccctccatctccgcgcccatcccggcgcccaggcattccaatgtccacactgcggtcacagggcagcacagagggccttgcttcgctctcatctgaggacacatcaaccagaaaggcccagatcaccagcagcgagactgttgctggagcttgaggaacgcgccttactgcgggaggcacgcttaggacgggcacggagtagcggcgggatgcaggcgactccggcgactgaagggttggccaggccacaggccccgtcaagcagtgcttttcgctgcccctattgcaaggggaagttccgcacctctgctgagcgggagaggcacctgcatattctgcatcggccctggaaatgtggcctgtgttcgttcggttcctcgcaggaagaggagctcctgcaccactctttgacagcacatggggctccagaacgtcctctggccgccacaagcgccgctcccccaccccaaccacaaccccagccgcctcctcagcctgagccgcgatccgtaccgcaacccgaacccgagcccgagccagagcgcgaagcgactccaaccccggcgcctgccgctccggaggagccaccggcacctcccgagtttcgctgccaggtgtgcgggcagagtttcacccaatcatggtttctaaaaggccatatgcggaagcacaaggcttcatttgaccatgcttgtccagtctgtggacggtgctttaaagagccttggttcctgaagaatcacatgaaggtgcacgccagtaaactgggaccccttcgcgctcctggtccagccagtggacccgcgcgtgccccccagccaccagacttgggactcctggcctatgagcctctgggtcctgcccttctcctggccccagcacccaccccagcagaacgccgagagccacccagcctgctcggctatctgagtttgagagccggtgaagggagacccaacggggagggggcggagccaggtccaggtaggagcttcggaggcttcagaccactgtcctccgcacttcctgccagagcgagacgtcaccgagccgaggagcccgaggaggaggaggaggtggtggaggctgaggaggagacttgggctagaggtcggtctttgggttctctagccagcctccatcctaggcctggcgagggccctggtcactctgcatcagcagctggggctcaggcgagaagcacagcgacccaggaagagaacgggctcctcgtcggtggcacccgccccgagggtgggcggggtgccacaggaaaagactgcccattctgtggcaaatccttcaggagtgcccaccatctcaaggtgcacctgcgcgtacacaccggcgaaaggccctataagtgtccgcactgcgattacgcaggaacacaaagcggctctctgaagtatcatctgcagaggcatcatcgcgagcagcgttccggcgcaggcccgggccctcctcctgaaccacctccgcctagccagaggggctccgcgccccagagtggggctaagcccagccctcaacccgctacatgggtcgagggggcttctagcccccgcccacccagctcaggagccggtcccggcagcagaagaaaacccgcatcccctggccgtaccttgcgcaatggaaggggcggggaagccgagcccctcgatctctccctcagagccgggccaggtggcgaagcaggacccggaggcgccctgcatcgatgcctgttctgtccctttgcgaccggggccccagagctgatggcgctgcatctgcaggtccatcattccagaagagctagggggagacgccccccacaggccgacgccagcccgccatatgccagggtgcctagcggcgagacccctcccagcccgtcccaggaaggtgaagaggggtcaggactgagtcgccctggagaagctggcctggggggccaggagcgctag

SEQ ID NO: 141242 - DNA, 324 bp, synthetic construct
  misc_feature 1..324: note = Description of Artificial Sequence: Synthetic coding sequence
  source 1..324: mol_type = other DNA
atggagggcagcagaccacgggctcccagtggacatctggcacccagcccgccggccttcgacggagagttagacctgcagcggtattccaacggtcccgctgtgtctgccggcagcctcggaatgggagcggtttcctggtccgagtctcgagccggggaaagacgctttccatgtccagtatgcggtaaacggtttcgattcaactccatcctcgcactccacttgcgagcacatccaggggctcaagccttccagtgtccgcactgtggtcatcgggcagcccagcgtgccttgctgcgaagccacctgcggactcattag

SEQ ID NO: 141243 - DNA, 636 bp, synthetic construct
  misc_feature 1..636: note = Description of Artificial Sequence: Synthetic coding sequence
  source 1..636: mol_type = other DNA
atggagggctctaggcctcgcgcccccagtggtcacttggctcccagtcctcctgcctttgacggggagttggatctgcagaggtattcaaacgggcccgctgtgtccgcaggctcgctcggcatgggagctgtttcttggagcgagtcccgggcaggagaacgaagatttccttgtcccgtgtgcgggaagcgatttcgattcaattcaatcttagccttgcacctgcgcgcccaccccggagctcaggccttccaatgcccacattgcgggcaccgcgccgcccagagggcgctgctccggtcccaccttcgaacacaccagcccgaaagaccccggagccccgccgctaggctgctgctggaactagaagaacgggccctactgcgcgaggctcgcctgggccgagcaagatcctccggcgggatgcaagctacccccgccacagaggggttagctagaccacaggccccatcctctagcgctttcagatgtccatactgcaaaggcaagttccgaaccagtgccgaaagggagcgccatctgcatatcctgcacaggccttggaaatgtggtttgtgtagctttgggtccagccaagaggaagagctgctgcatcactcccttaccgcctag

SEQ ID NO: 141244 - DNA, 96 bp, synthetic construct
  misc_feature 1..96: note = Description of Artificial Sequence: Synthetic coding sequence
  source 1..96: mol_type = other DNA
atggagggaagccgcccgcgggctccttctgggcaccttgcaccatctccacccgcctttgatggcgagctggatctgcagcggtactcaaactag

SEQ ID NO: 141245 - DNA, 336 bp, synthetic construct
  misc_feature 1..336: note = Description of Artificial Sequence: Synthetic coding sequence
  source 1..336: mol_type = other DNA
atggagggctcgaggcccagggctccatccggacatctggctccgtcccctccagcatttgacggggagctcgatctccagcgttacagtaatggtccagctgtgagcgccggatctctgggcatgggtgccgtgagttggtctgagtcacgcgcgggcgagagacggttcccgtgtcccgtttgtggcaagcgcttccggtttaattcaatcctggccctccatctgcgagcacaccctggagcacaggccttccagtgtccccactgtgggcaccgagccgcacagcgtgctttactgcggtctcatctacgaacacaccagccagagaggtag

SEQ ID NO: 141246 - DNA, 675 bp, synthetic construct
  misc_feature 1..675: note = Description of Artificial Sequence: Synthetic coding sequence
  source 1..675: mol_type = other DNA
atgcgcctggccaaacctaaggcaggcatctcgcggagcagctcacaggggaaagcatatgaaaacaaaagaaagacagggcgccagagacagaagtggggcatgacaattaggttcgattcatctttctcaaggctgcgaaggagcttagacgacaagccctataagtgtaccgagtgcgagaagtccttctcacagagttctactctgtttcagcatcagaaaattcatacagggaagaaatctcacaagtgcgccgactgcggaaagtcttttttccagagctctaatctcatccagcatcgccgaatccataccggggagaagccctataaatgcgacgaatgtggggagagctttaagcaaagctccaatctcattcagcatcaacggatccacaccggggaaaagccttaccagtgtgacgagtgcggccgctgtttttcccagtcctcccacctcatacagcaccaaagaacacacacgggagaaaagccgtaccagtgctccgaatgcggcaagtgcttcagccagtcatcccacctcagacagcatatgaaagtgcacaaggaagagaaacctagaaaaacccgaggtaagaacatccgagtcaaaacacatctcccgagctggaaggctggaactggacggaaaagtgtggccggcttgaggtag

SEQ ID NO: 141247 - DNA, 237 bp, synthetic construct
  misc_feature 1..237: note = Description of Artificial Sequence: Synthetic coding sequence
  source 1..237: mol_type = other DNA
atgaccacattcaaggaagcaatgacgtttaaggatgtcgcagttgtctttactgaggaggaattagggctgttagacctggctcaacgaaagctgtaccgcgacgtgatgctagaaaacttcaggaatctgctgtctgtgggtcaccaagcttttcacagagacacattccactttctgagagaggaaaagatctggatgatgaaaaccgcaatacagcgtgaaggcaacagctag

SEQ ID NO: 141248 - DNA, 2124 bp, synthetic construct
  misc_feature 1..2124: note = Description of Artificial Sequence: Synthetic coding sequence
  source 1..2124: mol_type = other DNA
atgacaactttcaaagaggccatgaccttcaaagacgtggccgtggtgtttaccgaagaggaactcggcttgctggatctcgcgcagcggaagctctatcgggacgtcatgctcgaaaacttccgtaatctgctgtcagtcggtcaccaggcctttcacagggacaccttccatttcctaagggaggagaagatctggatgatgaaaaccgcaatccagagagagggtaacagcggcgacaagattcagacagaaatggagacagtttctgaggcaggcacgcaccaggagtggtcctttcagcagatctgggaaaagatcgcatccgacctaaccaggtcccaggaccttatgatcaatagcagtcagttctcaaaagaaggggacttcccttgccagactgaagccggcctgtctgtcatccacacaagacaaaagtcatctcaaggtaacggctataagccctcatttagcgacgtgtctcatttcgactttcaccaacagctgcattcaggggaaaagtctcacacctgtgatgagtgtggaaagaatttctgttatattagcgcattaagaattcatcaaagagtacacatgggcgaaaaatgttataaatgtgacgtttgtgggaaggaattttcccaatcatcccacctgcagacccaccagagagtccatacaggggaaaaaccgtttaaatgtgtggaatgtggtaaaggtttctctcggcggagcgctctgaatgttcatcataaattacacacaggagaaaagccgtataattgcgaggaatgcggcaaagccttcatacatgatagtcagctgcaagagcaccagagaatacacacaggagaaaaaccgtttaagtgcgatatttgcggaaagagcttctgtgggcggtcccgacttaaccgtcacagtatggtgcatacagccgaaaagcctttccggtgcgatacgtgcgataagagttttaggcagcgttctgcattgaatagtcatcggatgatacacaccggcgagaagccttacaaatgtgaggagtgcggcaagggtttcatctgtcggagggacctgtatacacatcatatggtgcataccggagaaaagccttacaattgtaaagagtgcggtaaatcatttcgttgggccagctgcctgttgaagcatcaacgagtacatagcggcgagaagcccttcaagtgcgaggaatgcggtaaaggattttatacaaatagccaatgctatagccatcagcgaagccacagtggagaaaagccgtataaatgcgtggaatgtggaaagggctataaacggaggcttgacctggattttcatcagagagtccacaccggagagaagttgtacaattgcaaagaatgcggcaagagtttctcccgcgccccttgcttactgaagcacgaaagactccactccggggaaaagccctttcagtgtgaggagtgtggtaagaggtttacccagaactcccacctgcattcccaccagagagtgcacacaggggagaagccctacaaatgcgaaaaatgcggtaaaggatataatagcaagttcaacctcgacatgcaccagaaggtgcacactggcgagaggccatacaattgtaaagagtgtgggaaaagcttcggatgggctagctgtttgcttaagcaccagcggttacacagtggggagaagccctttaagtgtgaggaatgtggaaagcgctttacacagaactctcagctgcattctcaccagcgggtgcacacaggcgagaaaccatataaatgtgatgagtgtggaaagggcttttcatggagtagcacgagactgacgcatcaacggaggcactcacgagagactccgctcaagtgcgagcagcatggcaaaaacattgttcagaactcttttagcaaagtgcaggagaaggtgcattctgtagaaaaaccctacaagtgcgaagactgtggcaaagggtacaatcgtcgcctcaacctggatatgcaccaacgcgtccatatgggggagaagacatggaagtgccgagagtgcgatatgtgtttcagccaggcatctagtctgaggttacaccagaacgtccacgtcggtgaaaagccgtag

SEQ ID NO: 141249 - DNA, 1932 bp, synthetic construct
  misc_feature 1..1932: note = Description of Artificial Sequence: Synthetic coding sequence
  source 1..1932: mol_type = other DNA
atgctggagaactacgggaatgtggcctcacttgggtttcctctgttaaagcccgcggtgatatcccaactggagggcggtagcgagctcggaggttcctccccgctggccgccggtacgggccttcagggtttacagaccgacatccaaactgacaatgacctcaccaaagaaatgtatgagggtaaggaaaacgtgagctttgagttacagagagacttctcccaagagactgatttctcagaagctagtctgctggagaagcaacaggaagttcactccgctgggaatattaaaaaagaaaagtctaacacaatagatggcactgtgaaagatgaaacatctcctgtggaagaatgttttttttcacagtctagcaactcgtatcagtgccacaccataacgggggagcaaccgagcggctgtaccggcctaggaaaatccatatccttcgacaccaagctggtgaaacacgaaattataaacagtgaggaacggccctttaaatgcgaggaactggttgagccctttagatgtgacagtcaactcattcaacaccaggagaacaatacagaggagaagccctatcagtgttcagagtgtggcaaggccttcagcattaatgaaaagctgatttggcatcagaggctccactccggggagaaacccttcaagtgtgtggagtgcggcaagtcattttcctactcgagccactacattactcatcagactattcattctggggaaaaaccctaccagtgcaagatgtgcggaaaggcatttagcgtgaatggaagcctgtccaggcaccagcgcatccacacgggcgagaaaccttatcagtgtaaagagtgtggcaacggcttcagctgctctagcgcctacatcactcatcaacgcgtacatacaggcgaaaaaccctatgaatgcaatgattgcggcaaggcatttaacgttaatgctaaactcatccagcaccagaggattcacaccggagaaaaaccttatgagtgcaacgaatgtggcaagggtttcaggtgctcctctcagctacgtcagcaccagagtattcacactggagaaaagccataccagtgtaaggaatgtgggaagggcttcaataacaatacgaaactgatccagcaccagcggatacacactggtgagaaaccttacgagtgcactgaatgtgggaaggcattttcagtgaaggggaagctgatccaacaccaaagaatccacacgggcgagaagccgtacgagtgtaatgaatgcgggaaagcttttcgctgtaatagtcagttccgccagcatttacgcattcacacaggagagaagccttatgagtgcaacgaatgcgggaaggccttcagcgtaaatggaaagcttatgcggcatcagagaatccacacaggagagaaacccttcgagtgcaatgagtgtgggcgctgttttacctctaagagaaatctgctggaccatcaccgtattcatacgggcgagaagccttatcagtgtaaagagtgcggcaaagcattcagcatcaatgcaaagcttacccggcaccagcgtatacatacaggagagaagccgttcaaatgtatggagtgtgaaaaagcattttcctgctcttcgaactacatcgtgcaccaacgtattcataccggggagaaaccctttcagtgcaaagagtgcgggaaggcttttcatgtgaacgctcacctcattagacaccagcgctcccatacaggcgaaaagccctttcgctgcgtcgaatgcgggaagggtttttcctttagcagcgactatattattcaccaaacggtgcatacatggaagaagccctacatgtgttccgtgtgcggcaaagcatttcgattctcgttccagttgtctcagcaccagtctgtgcattcagaaggcaaaagctag

SEQ ID NO: 141250 - DNA, 1248 bp, synthetic construct
  misc_feature 1..1248: note = Description of Artificial Sequence: Synthetic coding sequence
  source 1..1248: mol_type = other DNA
tgcgggaaggctttctctattaacgaaaagcttatttggcaccagcggctacattctggagaaaagccatttaagtgtgtagaatgtggtaaatctttcagctacagttcccattacatcacgcaccagacaatacactctggagagaagccctatcagtgcaaaatgtgcgggaaggccttcagcgttaacgggtcgttaagccgccaccagcggatccacaccggtgaaaaaccctatcagtgtaaagaatgtgggaatggcttttcatgttcttccgcctacattacacatcagcgcgtccacacaggcgaaaagccttatgaatgcaatgattgcggcaaagcctttaacgtaaacgctaaattaattcagcaccagaggatccacactggggaaaagccatatgagtgtaacgagtgtggcaaggggtttcgttgctccagtcagctgaggcagcaccagagcatccatacaggggagaagccatatcagtgcaaagagtgtggaaaagggttcaataacaacacaaaactgatccagcatcagcggattcatactggcgaaaagccttatgaatgtaacgagtgcggcaaagcttttcgctgtaacagccagttcagacagcacttaaggattcatacgggagagaaaccttacgagtgcaatgagtgtgggaaagccttctcggtcaacggtaaacttatgcggcaccagcgcatccacacaggggagaagccctttgaatgtaacgaatgcggtcgctgctttacatcaaaaagaaacctgctggaccaccaccgaatccataccggagagaagccctaccagtgtaaggagtgtgggaaagccttttctatcaacgcaaaactcacacgccaccagcgtatccatactggagagaaaccctttaaatgcatggaatgcgaaaaagcttttagctgttccagcaactatatagtgcaccaacgtattcacaccggcgagaaaccattccagtgtaaggaatgcggaaaagcatttcacgtaaacgcccacctgattcgacatcagaggagtcatactggcgaaaaaccgttccggtgtgtagagtgtggcaaaggcttcagttttagctcagattatataatccaccaaaccgtgcacacttggaaaaagccgtacatgtgctcagtgtgtgggaaagcatttcggttttcttttcagctgagccagcaccaatcggtgcacagtgaggggaagtcttag

SEQ ID NO: 141251 - DNA, 1932 bp, synthetic construct
  misc_feature 1..1932: note = Description of Artificial Sequence: Synthetic coding sequence
  source 1..1932: mol_type = other DNA
atgctagaaaactacggcaatgtcgcctcattgggtttccccctcctcaaacctgcagtcatctcccaactcgaaggagggtctgagctgggtggaagctctcctctagctgcaggaacaggcctgcaaggtctgcagactgacatccagaccgataatgatctaaccaaagagatgtacgaaggtaaagagaacgtatcctttgaattgcagagggacttttctcaagagactgactttagcgaagcttcattgctcgaaaagcagcaagaagttcactctgctggaaacatcaaaaaggagaagtctaacaccatcgacggaaccgtcaaggatgagacaagtcctgtggaggagtgcttcttctctcagtcaagcaattcttatcagtgccataccataaccggggaacagcccagtggatgtactggcctgggcaagtcaatctcttttgatacaaaacttgtgaagcacgaaatcattaactcggaagagaggcccttcaaatgtgaagagctcgttgagcctttccgatgtgattcccaactgatccagcaccaagaaaataatactgaagaaaagccatatcagtgtagtgagtgtggcaaagcattttcgatcaacgaaaaattgatctggcaccagagactccactctggtgagaagcctttcaaatgtgtagagtgtggcaagagcttctcgtacagcagtcactacattacccatcagacaatccacagtggagagaaaccataccagtgtaagatgtgcggcaaagcctttagcgtcaacggctcactgagccggcatcagcgaattcacaccggagagaagccttaccagtgtaaagagtgcgggaatggtttctcctgctcaagtgcttacatcacgcatcagcgcgtgcatacaggcgagaagccctacgagtgcaatgattgcggcaaagctttcaacgtgaacgccaaactgatccagcatcaacgcatccatactggtgaaaaaccatacgagtgtaatgagtgtggaaaggggttcaggtgttcctcccaactgcggcagcatcagtctatccacactggagagaagccctaccagtgtaaagaatgtggcaagggtttcaacaataacacaaagctaatacagcatcagcgaattcataccggagagaaaccctatgagtgtactgaatgtgggaaagccttctccgtgaagggaaagcttattcagcatcagagaattcacacaggggagaaaccctacgaatgcaatgagtgcgggaaggcttttcgttgcaactctcagtttaggcagcaccttcggatccatacaggtgagaagccctatgagtgtaatgaatgcgggaaggcttttagtgtaaacggtaagctgatgaggcaccagagaattcacaccggcgagaagccgtttgagtgcaacgaatgtggtagatgttttacaagcaaacgcaacctcctggatcaccaccggatccatactggggaaaaaccttatcagtgcaaagagtgcggaaaggctttttcaatcaacgctaagctgactcgacaccagcggattcatacaggggaaaagcctttcaaatgtatggagtgtgaaaaggccttctcttgttcatctaactacatagttcatcagaggattcatactggggaaaagccatttcagtgcaaagagtgcggaaaggcgtttcatgtgaacgcccatctgattcgtcaccaaagatcccatacgggagaaaaaccctttcggtgcgtggagtgcgggaagggattctcgttcagctcagactacatcatccatcagaccgtacacacatggaagaaaccttacatgtgtagtgtttgtggtaaggcattccgcttctcttttcagctgagccagcaccagagtgtccacagcgaagggaagtcctag

SEQ ID NO: 141252 - DNA, 1932 bp, synthetic construct
  misc_feature 1..1932: note = Description of Artificial Sequence: Synthetic coding sequence
  source 1..1932: mol_type = other DNA
atgctggagaattacgggaatgtggcatcccttggtttcccattgctgaagccggctgttatttctcaactggaaggcggatccgaattaggcggtagttctcctttggcggcaggcactggcctgcaggggctccagactgacatacagacagataacgatctgacgaaggaaatgtatgagggaaaagagaacgtttcattcgagctgcagcgggatttcagccaggaaacagactttagcgaagcctctttgctagagaagcagcaggaggttcactccgctggaaatatcaagaaggagaagtccaacactattgatggcacagttaaggatgagacctctcctgttgaggaatgtttctttagtcaatcttccaattcttaccagtgccacactatcacgggagaacagccaagcgggtgtacaggtttgggcaaatctatcagcttcgacaccaaactcgtgaagcacgagattatcaattctgaggaaagaccatttaagtgcgaagagttggtggagccatttagatgcgactcacagttgattcaacaccaggagaacaacacagaggagaaaccatatcagtgctccgaatgcggcaaagccttctcaatcaatgagaaattgatctggcatcaaagactccactctggagaaaaaccctttaagtgcgtcgagtgcggaaagtcattctcgtattcctctcactatattacacaccaaacaatccactccggcgagaaaccgtaccagtgcaagatgtgcgggaaggcctttagcgtgaacgggtccctttctcgtcaccaacgtatccacactggcgaaaaaccctaccaatgcaaagagtgcgggaatggatttagttgtagcagcgcttatattacgcatcagagagtccacacaggcgaaaaaccttacgagtgcaatgattgtggcaaagcatttaatgtaaatgctaaactgatccagcaccagagaatacacacaggcgaaaaaccttatgaatgcaacgaatgtgggaaagggtttcgatgcagctcgcagctgcgacagcaccaatccattcacacaggagagaagccatatcagtgtaaggaatgcggaaagggctttaataacaataccaagctaatacaacaccagcggatccacacaggggaaaagccttacgagtgcaccgaatgcggtaaagccttctctgtgaaagggaaactgatccaacaccagcggatccacaccggtgaaaagccttatgaatgcaacgaatgtggcaaagcttttaggtgcaactctcagttccgtcagcatttaaggattcataccggtgaaaaaccatatgaatgcaatgaatgcggtaaggcatttagtgtgaacggtaagctgatgcgacaccagcgaatccatacgggcgaaaaaccgttcgagtgtaacgaatgtggtcgctgcttcacctcaaaacgcaacctgctcgaccaccacaggatccatacaggcgagaaaccctaccaatgtaaggagtgtggaaaagcgtttagcattaatgccaagctgacccgccaccaaaggattcacactggcgaaaaaccattcaagtgtatggagtgcgaaaaggctttctcctgttctagtaattacatcgttcaccaacgtatccacacgggcgagaaaccctttcagtgcaaagagtgtggcaaggcatttcacgtgaacgcacatctgattcgacatcaaagaagccatactggcgagaaaccttttcgctgtgtcgagtgtggtaagggcttctcattctcgtcagactatattattcaccagacggtgcatacatggaagaagccgtacatgtgctcggtgtgtggaaaagcattcaggttcagtttccagctgtcacagcaccagtccgttcactccgaggggaagtcctag

SEQ ID NO: 141253 - DNA, 1758 bp, synthetic construct
  misc_feature 1..1758: note = Description of Artificial Sequence: Synthetic coding sequence
  source 1..1758: mol_type = other DNA
atgtacgagggcaaagaaaacgtgagcttcgaacttcaacgcgattttagtcaagaaacagattttagtgaggcctccctactagagaagcagcaagaagttcacagtgcaggcaacatcaaaaaggaaaagtctaataccatcgacggaacagtgaaggacgagacaagccctgtggaggagtgctttttcagccaatcttctaacagttaccagtgtcacactatcaccggagaacaacccagcggctgcactgggcttggcaaatcaatcagttttgacaccaagctcgtgaaacatgagattatcaacagtgaggagcggccattcaaatgcgaggagctggtggagcctttccgttgcgactcccagctcatccaacatcaggagaacaacaccgaggaaaaaccctaccagtgctccgagtgcggcaaggcgttcagcattaatgaaaagctgatttggcatcagaggttacacagtggggaaaaaccatttaagtgcgtggaatgtggcaagtcgttttcctattccagccactacatcactcatcagaccatccactccggtgagaaaccctaccaatgcaagatgtgcggcaaagcttttagtgtgaacggctctctgagccggcaccagcgaatccacaccggtgagaagccgtaccaatgtaaggaatgtgggaacggattctcttgctcctccgcatacattactcaccaaagagtgcacaccggtgagaagccctacgaatgcaatgattgcggcaaggcctttaacgtgaacgctaaactcattcagcatcaaaggatccacacaggggagaaaccatatgaatgtaatgagtgtggaaaggggttccggtgctcttcgcagctgagacagcatcaaagcattcatacaggtgaaaagccctaccagtgcaaggagtgcggcaagggttttaacaacaacacgaagctaatacaacaccagcgtattcacaccggtgagaagccatacgagtgcacggagtgtggcaaggcgttcagtgtaaagggcaaacttattcaacatcagagaatccataccggcgaaaagccatatgaatgtaatgagtgtgggaaggcattcagatgtaattcacaatttaggcaacatctgagaatccacaccggcgagaagccctacgaatgcaatgaatgcggcaaggctttttcagtaaacggaaagttgatgcgccatcaacgtattcacaccggggagaaaccgttcgagtgcaacgagtgcggccggtgttttaccagcaagcgtaacctgctcgaccaccacaggatccataccggggaaaagccctaccagtgcaaggagtgcgggaaggccttcagtataaatgcaaagctcacccgacatcagcgaatccatacaggagagaagccgtttaaatgtatggagtgtgagaaagcgttctcatgttcatctaactatattgtgcatcagcgtatacacacaggggagaagccctttcagtgcaaggagtgtgggaaggcattccatgtgaatgcccaccttatcagacaccaacgctcacataccggagaaaagccttttcgatgtgtggagtgcggcaaagggttttcattttctagtgattacatcatacatcagaccgttcatacctggaagaagccatatatgtgcagcgtgtgcggaaaggcattcagattttctttccagctctcacaacaccagagcgttcacagcgaagggaagtcctag

SEQ ID NO: 141254 - DNA, 1758 bp, synthetic construct
  misc_feature 1..1758: note = Description of Artificial Sequence: Synthetic coding sequence
  source 1..1758: mol_type = other DNA
atgtatgaaggcaaagagaacgtctcatttgagcttcagagggacttctcgcaagaaactgatttctcggaggcctctctgctggagaaacagcaggaggtgcatagtgccggtaatatcaaaaaagagaagtctaatacgattgatggaacagtgaaggacgagacaagtcccgtagaagagtgttttttttcacaatcctctaattcatatcagtgtcatactattactggagagcagccctcaggatgtacagggctgggaaagtcaatctcctttgatacgaagttggtgaagcatgagatcattaactccgaggagcgacccttcaaatgcgaagaactggttgaaccgttccggtgtgattcacagctcatccagcatcaagagaacaacacagaggagaagccctaccagtgttccgaatgcgggaaagcatttagtattaacgaaaagctgatttggcaccagcggttgcattcaggcgagaagcctttcaaatgcgttgaatgcggaaagagttttagctactcatctcactacatcactcatcagacgattcactctggagaaaaaccttaccagtgcaagatgtgcgggaaggcattttccgtcaacggatctttgtcccggcaccagcgcatccatacaggggagaaaccatatcaatgcaaggagtgcggtaatggtttttcttgttcatccgcctatatcacacatcagcgcgtccacactggcgagaagccatacgagtgtaacgactgtgggaaagcgtttaacgtcaatgctaagctcatccaacatcagcgaattcacaccggcgagaaaccttacgagtgcaatgagtgcggaaaggggtttaggtgttcttcccagctgaggcaacaccagagcatacacactggggagaagccatatcagtgtaaagaatgtggaaaaggatttaacaacaacacaaaactcatacagcaccaaagaatacatacaggcgagaaaccgtacgagtgcactgagtgtgggaaggccttctccgtgaagggaaaactgattcagcaccagcggatccatacaggcgagaagccctatgaatgtaacgagtgtggcaaagcgttccggtgcaactctcaattcagacagcatttgcgcatccacactggtgagaaaccatacgagtgtaatgagtgcggcaaggctttcagcgtgaacgggaaactcatgagacaccagcgtattcacacaggcgaaaaaccatttgagtgcaacgaatgcggaagatgctttacgagcaagagaaacctgctagatcatcaccggattcatacaggggaaaaaccttatcaatgcaaagagtgtggcaaggcgttctcgatcaacgctaagctgacccgtcatcagcgtatccacacaggtgaaaaacccttcaagtgtatggagtgtgagaaagccttctcctgctcttccaactacatcgtgcaccagaggatacacaccggcgagaagccctttcagtgcaaggaatgcggaaaggcctttcacgtgaatgctcacctgattaggcaccagaggtcccacactggcgaaaagccattccggtgtgtggagtgcggaaagggcttcagcttttctagcgactacatcattcaccagacagttcacacatggaagaaaccttacatgtgttctgtgtgcggtaaggctttccgcttcagctttcagctctctcagcaccagtcagttcatagcgagggaaagtcttag

SEQ ID NO: 141255 - DNA, 5538 bp, synthetic construct
  misc_feature 1..5538: note = Description of Artificial Sequence: Synthetic coding sequence
  source 1..5538: mol_type = other DNA
atggggctctgtggattgctggagcgctgctggctgcaccacgatcctgacggagtgctgacactgaacgccgagaatacgaattatgcatatcaggtaccaaattttcacaagtgcgaaatctgtctactgtccttccctaaggaatcacagttccagcggcatatgagagatcacgagcggaacgacaagccacataggtgcgaccagtgtcctcagacatttaatgtggagttcaatctgacacttcataaatgcactcatagtggagaggaccccacatgccctgtctgtaataagaaatttagcagggtggctagcctgaaagctcacatcatgctgcatgagaaagaggagaatcttatttgttctgagtgcggggacgagttcactctacagagccaattggccgtacatatggaggaacaccgccaggaacttgcaggaacaagacagcatgcatgtaaggcctgcaaaaaagagtttgagacttcctcagagctcaaggagcacatgaagactcattacaaaatcagagtgtcttcaacccggagctacaatcgcaacattgatcgatcagggtttacatactcctgcccacattgcggaaagacattccaaaagccctcacagctgaccaggcacataaggattcataccggggagagaccctttaagtgctccgagtgcggcaaagcgtttaatcagaaaggggctctccagacccacatgataaaacacactggggagaagccccatgcctgcgcgttctgccctgccgcattctcccagaaaggtaacctgcagtcacatgtacagagggtgcattctgaagtaaaaaatggacctacatacaactgcactgagtgttcatgcgtgttcaagtctctcggcagccttaatactcatatctctaagatgcacatggggggtcctcagaattcaaccagttcaacggaaacagctcacgtgctgacggctacattattccagacgctgccattacagcaaacagaggcccaggccaccagcgccagcagtcagccatccagccaagccgtgagcgacgtaattcagcagctgttagaattgtccgaaccggcacctgtcgagtctggccagtctccgcagccaggccaacagctttcaattacagtggggattaatcaggatatcctgcagcaggccctcgagaatagtgggctcagttccattcctgccgccgcacaccctaacgatagctgtcatgccaaaactagtgcgccacacgcccagaacccagacgtgtcatctgtgtcaaatgagcaaactgaccctacggatgccgaacaggaaaaggaacaggaaagccccgagaaactggacaaaaaagaaaaaaaaatgattaagaagaagagccccttcctgcctgggtctattcgcgaagagaacggtgtgcggtggcatgtctgcccctactgtgctaaggaattcagaaagccctccgacttagttcgccatatccgaattcatactcatgaaaaaccatttaagtgtccacaatgcttcagggctttcgcagtgaagtccactttgactgctcatatcaagacacacacaggaattaaggccttcaagtgccaatactgcatgaaatcctttagtacctctggctccctaaaagtacatattaggctccacactggtgtcaggccattcgcatgtccgcattgtgataagaagtttagaaccagcgggcatagaaaaacacacatcgccagccactttaaacatactgagctcagaaaaatgcgacaccagcgaaagccagcaaaggttcgcgtcgggaagactaacatacctgtccccgacatcccgttgcaagagcccatacttataacagatcttggcctgattcagcccatccccaagaatcaattcttccagtcatattttaacaacaacttcgtgaatgaagcagatagaccctataagtgcttctactgtcatcgtgcctacaaaaagagctgccaccttaaacagcacatccgctcccatacaggcgaaaagcctttcaaatgcagccagtgtggtcggggatttgtgtcagctggggtgctgaaggcgcatataaggacccacaccgggctaaagtccttcaaatgtcttatttgtaacggagcattcactaccgggggaagcctgcggcgccacatgggcatccataatgatctgcggccatatatgtgcccctattgtcaaaagactttcaaaacatcactgaattgcaaaaagcacatgaagacccaccggtacgagctagcccaacaattgcagcagcaccagcaggccgcatccattgatgactccaccgtggatcagcaaagcatgcaggcttcaacccaaatgcaggtggaaatcgaatccgacgaactgccgcagaccgccgaagtggtggcagcaaaccccgaggccatgctcgatctggaaccacagcatgtagtgggaacggaggaggccggcttgggccagcaactagccgatcaacccttggaggctgatgaggatggtttcgtggccccacaggatcccctgcgaggacatgtggaccagttcgaggagcaaagtcctgcccagcagagtttcgagcccgcaggtctgcctcagggcttcacagtgactgatacatatcaccagcaaccacagttcccccccgtccaacagctgcaggatagtagtacattggagtcacaagcactatccacctcttttcaccagcagtctctactccaggcaccctccagcgatggcatgaatgtcacaacacgcttgatacaggagtcgtcacaggaagagttagatctgcaagcacagggaagccagttcctggaggacaacgaagaccagagtcgtcgctcgtatcgttgtgattactgcaacaaaggctttaagaagtcttcacatttgaagcagcatgtgagatctcatactggcgagaaaccttataagtgcaagctgtgtgggcggggattcgtgtctagtggcgtattgaagtcccacgagaaaactcacactggtgtaaaggcttttagctgcagcgtttgcaatgcttcattcacaactaatggcagtctgacacgacacatggccacccatatgtcgatgaaaccatataaatgtccattctgtgaggaggggttccggactactgtgcattgtaagaagcacatgaagagacatcagaccgttcctagtgcagtgtccgcgacaggcgagaccgagggcggcgatatttgcatggaagaggaagaggagcattccgacaggaacgcctcccggaagtctcgccccgaagtgatcacgttcacagaggaggagacagctcagctggccaaaattcgcccccaggaatctgcaaccgtcagcgaaaaggtgttggtgcagagtgcggccgagaaagaccgtatcagcgaattgagagataaacaggcagagcttcaggatgagcccaagcatgcaaattgctgtacctattgccccaagtcattcaaaaagccctcagacctggtgagacacgtaagaatccacaccggcgagaaaccatacaaatgcgatgaatgtggcaaatctttcactgtgaagtccaccttggactgccacgttaaaacacacacaggccagaagttgttttcctgccacgtctgttccaacgccttctccactaaggggtccctcaaggtccatatgcgtttgcacactggcgccaaaccttttaaatgtccccactgtgagctgaggttcaggacatcgggcaggcgtaaaactcatatgcagtttcattacaagccagaccccaaaaaggcccgcaaaccaatgacaagatcctcttcagaaggcctgcagccggtgaacctgcttaacagctcttcaactgaccctaatgtgtttatcatgaacaactccgtcctgacgggccagttcgatcaaaacctcctccagccaggcctggtgggccaggccatactgcccgcctcagtgagcgccgggggtgatctaacagttagtttaactgatggatcccttgcgaccctggaaggcattcaactgcaattggccgcaaatctcgtgggacctaatgtgcagatcagcggaatagacgccgctagcatcaacaacatcactttgcaaatcgatccctcaattttacagcagactttacagcaaggaaacctgctcgcccaacagctgacaggagagcctggactggcaccccagaatagttcactgcagaccagcgatagtacagtaccggctagcgtcgtcattcaacccattagtggtctatcgctgcagcctactgttacaagcgcgaacctgaccattggtcccctgtcagagcaggatagcgtcctgacgaccaactcgagcggcacccaggatctgactcaagtaatgactagtcaagggctagtctcccccagtggaggaccccacgaaatcacccttacgataaacaatagctccctgtctcaagtgcttgcccaggccgcaggacccacagccacgtcctcctccgggtcaccccaggagatcacactcactattagcgaattgaacactacaagcgggtccctgccttctacaacgccgatgtcgccgtcggccattagtactcaaaatctggttatgtcttcatcaggcgtaggcggcgacgccagcgtgactctgaccttggctgacacacaggggatgttgtcgggagggctggacacggtgacgcttaacatcacttcccaggggcaacagtttccagcccttctaactgatcccagcctcagtggacagggtggagccgggagcccccaggtgattctagtgagccatacaccacagtccgcgtcagccgcttgcgaggagattgcctaccaggttgctggcgtctccgggaaccttgcacctggtaatcagccggaaaaagaaggcagagctcaccagtgcttggagtgcgaccgggcgttctcctccgccgccgtgcttatgcaccattccaaggaggtgcacgggcgtgagcgcatacacggctgtcctgtgtgcagaaaagctttcaaacgggccacccacttgaaagagcacatgcagacgcatcaggccgggcccagcctgagcagtcagaagccacgggtgtttaagtgtgacacgtgcgaaaaggcctttgctaagccatcccagctcgaaaggcacagtagaattcatactggcgaacgccctttccattgtaccctttgcgagaaggcatttaaccagaagagtgccctgcaggtgcatatgaagaaacacacgggcgaaaggccttacaagtgtgcctattgcgttatgggttttacccagaagtctaacatgaaacttcatatgaagagggctcacagctacgctggcgcactgcaagagagcgccgggcacccagagcaggatggggaggagctgagtaggactttgcacctggaggaggtcgttcaggaggcagccggagagtggcaggcactaacccatgttttttag

SEQ ID NO: 141256 - DNA, 4677 bp, synthetic construct
  misc_feature 1..4677: note = Description of Artificial Sequence: Synthetic coding sequence
  source 1..4677: mol_type = other DNA
atggggctctgtggcttgcttgagaggtgctggctgcatcatgatcctgatggcgttctaacgctaaacgcagaaaacactaattacgcttaccaggtgcctaacttccacaaatgcgaaatctgcctgctctccttccctaaagagagccaatttcagaggcatatgcgggaccacgaaagaaacgacaaaccacatcgctgtgatcaatgccctcagactttcaatgtggagttcaacctcactcttcacaagtgcacgcactcaggcgaagatccaacatgcccagtttgcaataagaagttctctcgggtggcatcgcttaaagcgcacataatgcttcatgagaaagaggagaacctgatctgttcagagtgcggcgatgagttcacgctacagagccagctagccgtccatatggaagagcaccgacaggagctggcaggcacgagacagcatgcgtgcaaagcatgtaagaaggagttcgaaacttcttccgagttaaaagagcacatgaaaacccactacaagattcgagtgagctctactcgctcctacaaccgtaatatcgatagatcaggattcacctactcttgtcctcactgcggtaagacgtttcagaagccttcacagttgactaggcatattcgcatccacactggggagcgtcctttcaagtgctcagagtgcgggaaagccttcaaccagaagggcgctctccagacccatatgataaaacataccggagagaagccccatgcctgcgccttttgcccggccgccttcagtcagaaaggcaacctgcagagccatgtccagcgtgtgcactccgaggtgaagaacggacctacatataattgcacagagtgctcctgtgtctttaaatctctgggctctttaaatactcatatctctaagatgcacatggggggccctcagaatagtacatcatcaacggaaaccgcgcatgtgcttaccgcaacattattccagactctgcctctgcagcagactgaagcacaagccaccagcgccagctctcaaccctcctcccaggccgtcagcgacgttatacagcaactcttagaactgagtgagccagccccagtagagagtggccagagccctcagcctggccagcaactgagcatcaccgtgggaatcaatcaggacatcctgcagcaggcgctggaaaacagcgggttatcatctatcccggccgccgcacacccgaacgattcttgccacgcgaaaacctctgcaccacatgctcagaacccagacgtcagctcagtttccaacgaacagactgatcctactgatgcagagcaggaaaaagagcaagagtcccctgagaagctcgacaagaaggagaaaaagatgattaagaagaaaagcccattcctgcccgggtccatccgtgaggagaatggcgtgaggtggcatgtctgcccttactgcgctaaagagtttcgcaagccaagcgacctggtacgacatatccggattcatacacacgaaaaaccatttaaatgccctcagtgttttagagcattcgcagtgaagtccacactaacagctcacatcaagacacatactgggatcaaagcattcaaatgtcaatactgcatgaagagcttcagcacttcgggctccttaaaggtccacatacgactgcacacaggcgttaggcccttcgcctgcccccattgtgacaaaaagtttcgtacaagcgggcatcgtaagacccatatcgcgagccacttcaaacacacggagctgcggaaaatgcgacaccaacgcaagccagccaaggttagggtgggcaagactaatatcccagtccccgatatacccctgcaggagccaatactgatcactgatttgggtctgatacagcccatacctaaaaatcagttcttccaaagctactttaataacaatttcgtgaacgaggctgatagaccatataagtgcttctactgtcaccgggcgtacaaaaagtcttgccacctaaagcagcacatacgtagccacacgggggaaaagccctttaaatgttctcagtgcggccgcggatttgtatccgctggcgttctcaaggctcatatacggacacacaccggcctgaaatcctttaagtgcttaatttgcaatggcgccttcacaacagggggatcgctgcgcagacacatgggaatccacaacgacctaagaccgtatatgtgcccttactgccagaagaccttcaaaacttcccttaactgcaaaaagcatatgaagacccaccgttatgaactggcacaacaattgcagcagcaccagcaagcagcctctattgacgatagtaccgtcgaccagcaatccatgcaggcctctacacagatgcaagttgagattgagagtgatgaacttccacagactgccgaggtggtagctgcgaatccagaggcaatgctggacctggaaccgcaacatgtggtcggtaccgaggaggccggactaggccagcagttggctgatcagccactggaagcggatgaagacgggttcgtggctccccaggaccctctgaggggacatgttgatcagtttgaagagcagagtcctgcccagcaatctttcgaacctgcgggtctgccacagggttttacagtcaccgacacctaccatcagcaaccacagttccctcccgtgcagcagctgcaagactctagtacacttgagtctcaagccctttcaacctctttccatcagcagtctttgctgcaggcacctagtagcgacgggatgaatgtgacaactagactgatacaggaatcttcccaggaggaactggatctccaggcacaggggagtcagttcctggaggacaatgaagaccaatctcgccggagctatcggtgcgactattgcaacaaaggctttaagaaatcgtcacacctgaagcagcacgttagaagtcatacaggcgagaagccatacaaatgcaaactttgtgggcgcggatttgtctcaagcggcgtcctgaagtcgcatgaaaaaacccacaccggggtcaaggccttctcatgtagcgtgtgtaacgcctcatttactacaaatgggtcactcacacggcacatggcaacgcacatgtctatgaagccttataagtgtcccttctgcgaagaagggttccgcacaactgtgcattgtaaaaagcatatgaaaagacatcagaccgtgccatccgctgtttcagcaaccggtgaaaccgagggaggggacatctgcatggaggaggaggaggagcactcggatcgcaatgcaagcaggaaaagtaggcctgaggtgataaccttcacagaggaggagactgcccagctcgccaagatcagaccacaggagtccgccaccgtctccgaaaaggtcctggttcagtcggccgcagaaaaggataggatctctgagctgcgagacaaacaagccgaactccaagacgagccgaagcacgcaaactgttgtacctactgcccaaaatctttcaagaagccctctgatctggtccgtcatgtgagaatccacacgggagagaagccttataagtgtgatgagtgtgggaagagtttcaccgttaagtccaccttggattgccacgtcaaaacgcacaccggtcagaaactcttctcttgccacgtgtgctctaacgctttctccaccaagggatctctgaaggtacacatgcggctgcacaccggcgccaagcccttcaagtgtccacactgtgagctgagatttcgcacgagtggcagacggaagacccacatgcagtttcattacaagcccgatccgaaaaaggccagaaaacccatgacacgctcctcctctgagggactacagcctgtgaatctgcttaatagctcttccaccgaccctaatgttttcattatgaataatagtgtcctcactggccagtttgatcagaacctgctccagccgggtctcgtgggtcaggccatcttacctgcatctgtgagcgccgggggggatctgactgttagcctaaccgacggttcactggcgactctcgaaggaattcagctgcaactggctgcaaacttggtggggcccaatgttcagatcagcggcatcgatgccgccagcattaacaatatcaccctacagatcgacccctccatactccagcagactttacagcaaggaaatctgctggcacagcagctgacaggagaacccgggcttgccccccaaaactcttctctccagacatccgactccacggtacctgcaagcgttgtgatccagcctatatctggactgtccttgcagcctacagttacttccgcgaacctcacaattggccctctgtccgagcaggacagcgtgctcacaacaaactcctccggaacccaagatctgacccaagttatgacatcacaggggctggtctccccctcaggcggccctcacgagataaccctgaccatcaacaattcttccctgagccaagtactggcgcaagcagctggcccaactgccacctcttcatccgggtcccctcaggaaatcactctcaccattagcggatcacgatctgtacagcactctgtgggacctcaggagtgtggtagtgtggaagcactatatctggagaattccagcgataagacttag

SEQ ID NO: 141257 - DNA, 4677 bp, synthetic construct
  misc_feature 1..4677: note = Description of Artificial Sequence: Synthetic coding sequence
  source 1..4677: mol_type = other DNA
atgggcctctgcggactgctggagagatgctggctccaccatgacccagatggggtgctgaccctgaacgcggaaaacactaactacgcctaccaggtgccaaacttccacaagtgtgaaatctgcctgttatcatttcctaaagagtcacagttccaacgccacatgcgggaccacgagcggaacgataagccacatcgttgtgaccagtgcccccagacgttcaatgtggagtttaacctaacgcttcataagtgtactcattcgggagaggacccaacctgccccgtgtgtaacaagaagtttagccgcgtggcttcgttaaaggcacacataatgttgcacgagaaggaggagaatttgatttgttcagaatgcggcgacgagttcactctccaatcgcagctcgcggtccatatggaggaacataggcaagagctggcaggcacccgccagcacgcatgtaaagcatgcaagaaggaatttgagacaagttccgagttaaaagagcacatgaaaacccattacaagattagagtatcttccacccgatcttacaatcggaacatcgatcgtagtggcttcacctactcgtgtccccattgcggcaagacattccagaaacccagccaactgacaagacacataagaatccacaccggcgagagaccctttaaatgcagtgagtgcggcaaagcattcaatcagaaaggagccttacagacgcatatgattaagcacaccggggaaaagcctcacgcctgcgccttctgcccggcagccttttcacagaaggggaacctccagtcacatgtccaacgagtccacagcgaggtcaagaacggcccaacatacaattgtacagaatgttcctgtgtattcaagtcgctggggagtttaaatacgcatatcagcaagatgcatatgggggggccacagaactctacctcctccaccgagacagctcacgtcttgaccgcaacattatttcagactttaccactgcagcagacagaggcccaggcaaccagcgccagcagccaaccgtcttcacaggccgtgtccgacgtgattcagcaactattagaattatctgaaccagcccctgtggagtctgggcagtccccgcagcccggccagcagcttagcatcacggtcggcattaatcaggatatcctgcagcaggcccttgagaattctggtctcagcagcatccctgccgccgcccacccaaatgattcctgccacgccaagacgtccgctccccatgcacaaaatccagatgtgtctagcgtatctaacgaacagacggaccccaccgatgcagagcaggaaaaggaacaggagtcccccgagaaactggataaaaaggagaagaagatgatcaagaagaaaagccccttcctacctggcagcatacgtgaggagaatggcgtgcggtggcatgtgtgcccgtactgtgccaaagagttcagaaaaccctcagacctggtacgacacattcgcatccatacccatgaaaagcccttcaaatgtcctcagtgttttcgcgcctttgcagtgaaaagtacactaaccgcgcatattaaaacccacacagggatcaaagcgtttaaatgtcaatactgcatgaagtcctttagcacttcaggctccttgaaagttcatatcaggctacacaccggggtccgcccatttgcatgcccacactgtgacaaaaaattcagaactagcggacatcgcaaaactcacatagctagtcattttaagcatacagagctcagaaagatgaggcatcagcgaaagcctgcgaaggtgagagtcgggaaaactaacatccccgtgccagatattccgctgcaggagcctatcttaatcacagacttgggacttatacaacccattcctaaaaatcagttttttcaatcttacttcaacaataactttgtcaatgaagcagatcgtccatacaaatgtttctattgccaccgggcttataaaaaaagctgtcacctgaaacagcatatccggtcccatactggagagaagccattcaagtgctctcagtgcggacgggggtttgtcagcgcaggcgtcctgaaggcacatatcaggacgcacacaggccttaagtcattcaaatgtctgatctgcaacggggcattcacgaccgggggctcgttgcgtcgtcacatgggtattcacaacgacctgcggccatacatgtgtccgtactgtcaaaagacatttaagacctccctgaactgcaaaaaacacatgaaaacgcacaggtacgaactggctcagcagctccaacagcatcagcaagctgccagtatagatgactctaccgtggatcagcagtccatgcaagcctccacacagatgcaggtggagatcgagtccgacgaactgcctcagacagccgaagtggtcgctgccaacccagaggccatgctggacttggaaccacagcatgtcgttggtacagaagaagccggcctgggacagcaactggccgaccagccccttgaggcagacgaagatgggtttgtggccccccaggatcccttgagaggccacgttgatcaatttgaagaacaatcccctgcacagcagtccttcgagcctgccgggctgccccagggcttcacggtgactgacacataccatcagcagcctcaattccctccagtgcaacaactccaagactcatctactctcgagagccaagcccttagcacttcttttcatcagcagagcctcttacaggcaccctcaagcgacgggatgaacgtcacgactcgccttatccaggaatcttctcaggaggagctcgatctgcaggctcaaggaagtcagttcctggaggataatgaagaccaaagcagacgcagctacaggtgtgattactgcaataagggcttcaaaaagagttcccatcttaaacagcacgtgcgatcgcacactggcgagaagccgtataagtgcaaattatgtgggcggggatttgtcagtagtggggtgctgaagagccatgaaaagacccatactggcgtgaaggctttctcctgtagtgtttgcaatgctagcttcacaacgaatggtagcctgacacggcatatggctactcatatgtccatgaaaccctataagtgccccttctgtgaagaagggtttcgcactacagtccactgtaagaaacatatgaaacgccatcagactgttccatcagctgtctcagccacaggggagaccgaagggggcgacatttgcatggaggaggaagaagaacactccgaccgaaatgcaagtcggaagagccggccagaggtcattacattcactgaagaggagacagcacagctggctaaaatcaggccacaggagtctgcaaccgtgtcggaaaaagtcctggtccagagtgctgccgagaaggataggattagcgagctgagagataaacaggctgagctacaggatgaacctaaacacgcgaactgctgcacttattgccctaagtcctttaaaaaaccctccgatctggttcgccacgtaaggatccatactggagagaagccctacaagtgtgatgagtgcggtaagtcgtttaccgtcaagtctaccctggactgtcatgtgaagactcacaccggtcaaaaactgtttagctgccacgtgtgctcgaatgccttctctaccaagggttcgcttaaggtgcacatgcgcctgcataccggagcaaaacccttcaagtgcccccactgtgaactaaggttccgtacatcaggaagacgtaagactcacatgcagtttcattacaaacccgatcccaagaaagcaaggaagcccatgacccggagctccagcgagggactgcagcctgttaatctgctgaattcttcgtcaactgatcccaatgtgttcatcatgaataacagcgttctgactggacagtttgaccagaacttgctgcagcctgggctcgtcggtcaggcgatactgcctgcctctgtgagcgccggcggtgacctgacagtgagtctgaccgatggatccctggctacattagaagggattcaacttcaactggcggctaacctagtgggacctaacgtgcagatctccggcatcgatgccgcctctatcaataacatcactctgcagatcgatccctcgattttgcaacagaccctgcagcaaggaaacctcctcgcccagcagttgaccggcgagccaggtctcgcaccacagaactcctccctgcaaacatcagacagcaccgtgcctgcgagtgttgtgattcagcccatctcaggcctttccttacagcctaccgtaacatccgcaaatttaaccattggaccactgagcgagcaggacagcgtacttactaccaactcctcgggaactcaggacttaacccaggtgatgacatcacaggggctggtgtcaccttccggcggccctcatgaaatcacgctcacaataaataactcctcactgtcacaagtattagcccaggccgccggtccaaccgccaccagttcaagcgggagtcctcaagagatcacattgaccattagcggttctcggagtgtgcaacacagcgtgggacctcaggaatgtgggtccgtagaagccctgtatctggagaattcgagcgataaaacttag

SEQ ID NO: 141258 - DNA, 1596 bp, synthetic construct
  misc_feature 1..1596: note = Description of Artificial Sequence: Synthetic coding sequence
  source 1..1596: mol_type = other DNA
atgtgtcccaaggggtacgaggatagtatggaattcccagatcacagcagacacctattgcagtgcctctctgaacagagacaccagggattcctgtgcgactgtacagtgctggtcggagatgcccagtttcgggcacaccgtgccgtgctcgctagctgctccatgtatttccacctgttctacaaagaccagcttgataaaagggacattgtccatctcaacagtgatattgtgaccgccccggcctttgcacttctgcttgaattcatgtacgagggtaagctgcagttcaaggatctgccaatcgaagacgtattggctgcggcatcatacctgcacatgtacgatatcgtaaaggtgtgtaaaaagaaactcaaggaaaaggctacgactgaagccgatagcacgaagaaggaagaggatgccagcagctgctccgacaaagttgaatctctgtctgatgggtcaagccatattgccggcgaccttcctagtgacgaagatgagggcgaggatgagaagttaaacatcctccctagcaagcgcgacttagcagccgaaccggggaatatgtggatgcgacttccatctgattcagctggaattcctcaagcgggaggagaagccgaacctcacgccacggccgccggtaagacagtggcctcaccctgtagttcaaccgagtcccttagtcagagatctgtgacttcggttcgggacagcgccgatgtggactgcgtacttgacctgtccgtcaagtctagccttagcggcgtcgaaaaccttaactcttcgtactttagttcacaggatgtgctcaggagcaatctagtgcaggtcaaggtagagaaagaggcctcatgtgacgaaagcgacgtggggacaaacgactacgacatggagcattcaactgtgaaagaaagcgtttccactaacaacagggttcagtatgagcctgcacacttggcccccctgagagaagatagcgtgctccgggaactggacagagaagataaagcctctgacgacgaaatgatgacccccgaatccgagcgcgtccaggtggagggagggatggaatcttctttgttaccgtatgtgagcaacattctgagtccagcagggcagatcttcatgtgtccgctttgcaataaagtgttccctagccctcatatcctccaaatacacttaagcacacatttcagagagcaggatggtataagatctaagcctgccgctgacgtgaatgtccctacctgcagcctgtgcgggaagacgttcagctgtatgtatactttaaagagacacgagcgaactcactcaggcgaaaagccctacacctgtactcagtgcgggaaatcgttccaatactcccataacctttcgagacatgcggtggtgcacacacgggagaagcctcacgcgtgcaaatggtgtgagagaagattcacacagtcaggggatctatatcggcatattcgcaagtttcattgcgagctggtgaactccctaagtgtcaagtcagaggccctttctctgccaaccgtgcgggattggacgcttgaagattcatcacaggaactctggaagtag

SEQ ID NO: 141259 - DNA, 1464 bp, synthetic construct
  misc_feature 1..1464: note = Description of Artificial Sequence: Synthetic coding sequence
  source 1..1464: mol_type = other DNA
atgtgcccaaaaggttacgaggattctatggaattccctgaccactcacgtcacctgctgcagtgtcttagcgaacaacggcaccaggggttcctgtgtgactgcactgtgctcgttggcgacgcacaatttagggctcacagagccgtcttagccagctgctcaatgtatttccatttgttttataaagatcaattagataaaagggacatcgtgcacctgaattctgacatagtaactgctcctgctttcgcattactcctggaattcatgtacgagggtaagctccagtttaaagatctgcctatcgaggatgtcctggctgccgcttcctacctgcacatgtacgacatcgtgaaggtgtgtaaaaaaaaattaaaggaaaaggctaccaccgaagccgattctacaaaaaaggaggaagacgcttcttcttgctcagacaaggtcgaatccctttcagatgggtcttcccacatcgccggagatctccccagcgatgaggacgagggcgaggacgagaagctcaacatactgccctctaagagggatctggcagcggaacctgggaacatgtggatgcggctccccagcgatagcgccggtatcccacaggccggtggagaggcggagccgcacgcaaccgccgccgggaaaacagtggcctcaccctgctctagtacagaatcgctatctcagcgctctgttacatctgtcagggattctgctgatgtagattgtgtgttggatttatctgtgaagtcatctctcagcggggtggagaatttgaacagcagttacttctcttcgcaagacgttctgaggagtaatcttgtgcaggttaaggttgagaaagaagcctcttgtgacgaatctgatgtcggaactaacgactatgacatggagcactcaacagtgaaagaatcggttagcaccaacaaccgcgtccagtacgaacccgcccacttagcccctctgagagaagactccgtactgagggagctcgaccgggaggataaagcctctgatgacgagatgatgacacccgaaagcgagcgcgtgcaggtggaaggcggcatggagagctccctgttgccgtacgtgagtaacatcctgtcaccagcgggccagatctttatgtgccccctgtgtaacaaggttttcccatccccacacatactgcaaattcatctgtcgacccacttcagggagcaagatggaattagaagtaagcccgccgccgacgtgaacgtgccaacctgttccctttgtggaaaaactttctcttgcatgtatacgctcaaacgacacgagcgcacccattccggggagaaaccttacacttgtactcaatgtgggaaatcctttcagtacagccataacctatcccgtctccaggtggtcagggctcaagtgcacgctgttcgtgggccagtccaaacgcactcccaggtgcccctttag

SEQ ID NO: 141260 - DNA, 1377 bp, synthetic construct
  misc_feature 1..1377: note = Description of Artificial Sequence: Synthetic coding sequence
  source 1..1377: mol_type = other DNA
atggctagcacgatcacgggaagccaggactgtatcgtcaatcataggggggaggttgatggagagccagagcttgacatctcaccatgtcagcagtggggcgaggcctcctctccaatttcccgaaaccgagacagtgttatgacactgcagagcggatgtttcgagaatatcgaaagcgagacctacctccctcttaaggtatcatcacagatcgatacacaggattcctccgtgaaattctgtaaaaacgaacctcaggaccaccaggagtctcgccgtctgtttgtgatggaggagtctacagagcgtaaagttatcaagggggagtcgtgtagcgagaacctgcaggtgaaactcgtcagtgatggtcaggagctggcatcgccactgctcaacggcgaagccacatgtcagaatggacagctgaaggaatccctggaccccatagactgtaattgcaaggacatacacggatggaagagtcaggtagtgtcttgctctcaacagcgcgctcatactgaagagaaaccttgcgatcacaacaactgtggcaagatccttaacactagcccggatggacacccgtatgaaaaaattcataccgccgaaaaacagtacgagtgcagccagtgtgggaagaattttagtcagtcctctgagctcctgctgcaccagcgggatcataccgaggaaaaaccctacaagtgcgaacagtgtggaaagggcttcacaagatcgtcaagtctcttaatacatcaggccgtgcacaccgatgagaaaccatacaaatgtgataaatgtgggaagggatttacacggtcctccagcctacttattcaccacgctgttcatactggggagaagccatacaagtgcgataaatgtggcaaaggcttctcccagtcctccaagttgcatatccatcaacgggtgcatactggagagaagccttatgaatgcgaggaatgtgggatgtctttcagccagcgatctaaccttcacattcaccagagagtgcacaccggggagaggccatacaagtgtggggagtgcggcaaagggttctcccaaagttctaacttgcatatacataggtgtattcacaccggcgagaaaccatatcaatgctatgaatgtggcaaaggatttagtcagtcttctgacttgcgcatccacctgagagtacacaccggtgagaagccttaccattgtggtaagtgcgggaaggggttttcccagtcctcgaaactactgattcaccagcgcgtgcatacaggagagaaaccatacgaatgttccaagtgcggcaagggtttttcccaatccagcaatctgcacatccaccagagagtgcataagaaagacccccgctag

SEQ ID NO: 141261 - DNA, 1377 bp, synthetic construct
  misc_feature 1..1377: note = Description of Artificial Sequence: Synthetic coding sequence
  source 1..1377: mol_type = other DNA
atggcctccacaatcaccgggtctcaagactgcattgtcaatcaccggggcgaagtggacggcgagcccgaattggacatttcgccgtgccaacagtggggtgaggcaagttctcccatctccaggaaccgcgacagcgtgatgactctacaatctggatgctttgagaacatcgaatcagaaacctacctgcccttaaaggtttcgtcccagattgacacccaagactcatcggtcaagttctgcaagaatgaaccccaggaccatcaggaaagtagacggctgttcgtgatggaagagtctacagagcggaaggtgattaaaggcgaatcatgttctgaaaatctgcaggtgaaattagtgtctgatggacaggagctggcttctcctctcctgaacggggaagcaacatgccagaatggacagctcaaggagagtctggacccgatcgactgtaactgtaaggacatccacgggtggaagtcccaagtggtgtcttgctcccagcaacgggcacacactgaggaaaaaccatgtgatcacaataattgcggtaagatcttaaacacttcccccgatggtcatccatatgagaaaatccatactgccgagaagcaatatgagtgttctcagtgtggaaaaaatttcagtcagagctctgaactgcttcttcaccaacgagatcacacagaggagaagccatataaatgcgagcagtgtggtaaaggatttacacggtcttcctcactcctgatccatcaggccgtgcatacggatgaaaagccctacaaatgtgataaatgcggcaagggcttcacccgctcatcatctctgctcatccatcatgccgtacacaccggggaaaaaccatacaagtgtgataagtgcgggaagggattcagtcagtcctctaagctgcatattcaccaacgagtgcataccggggagaagccctatgagtgcgaagaatgtggcatgtctttttcacagagatcaaacctacatatccaccagcgcgtccatacaggcgagagaccatataagtgcggggaatgcggaaagggcttttctcagtcctcgaacctgcacatccaccgctgcatccatacaggagagaagccataccaatgttacgagtgtggaaaagggtttagccaaagtagcgatttgagaattcatttacgcgtgcacactggggagaagccatatcattgcgggaaatgcgggaagggattctctcaaagctccaagcttctcatccatcagcgtgtgcacacaggggaaaagccgtacgagtgctcaaagtgcggcaaaggttttagtcagtcctccaacctccacatccatcagcgagtccacaagaaagatccccggtag

SEQ ID NO: 141262 - DNA, 1377 bp, synthetic construct
  misc_feature 1..1377: note = Description of Artificial Sequence: Synthetic coding sequence
  source 1..1377: mol_type = other DNA
atggcctcaacgattacaggttcacaagactgcattgtaaatcaccgcggcgaggttgacggagagcccgagctggatataagtccatgtcagcagtggggcgaggcctcgagccccatctctcgaaacagggacagtgtcatgacactccaatcgggctgttttgaaaacatcgagtccgagacttacttgcccctgaaggtgagtagccagatcgacacccaggacagcagcgtgaagttctgtaaaaacgaaccacaggatcatcaggagtccagacggctgttcgttatggaggaaagtacagagagaaaggttataaagggagagtcctgctcagagaatttgcaggtcaagcttgtgtcggacggacaggagctggcctctcctcttttgaacggcgaagcgacatgccagaacggtcagcttaaggagtccctcgatcctatcgactgcaactgcaaagatatccacggatggaagagccaagtggtgtcctgttctcagcaacgggcgcatacagaggagaagccctgtgatcataataactgcgggaagattctgaatacatctcctgatgggcacccatacgagaaaattcacacagccgaaaaacaatatgagtgttcacaatgtgggaaaaacttttctcaatcctcggaactgctgttacaccagcgggaccatacagaggagaaaccttataagtgtgaacagtgcggcaaaggctttacaagatcctctagtctgctgattcatcaagccgtccataccgacgagaaaccctacaagtgtgataagtgcgggaagggcttcactcgatcatcttctctgctgatccaccacgcagtgcataccggggaaaagccctataagtgtgataaatgcgggaaaggtttttctcaatcgtccaagctgcacatacatcagcgcgtgcacacaggagagaaaccatatgagtgcgaggagtgtggcatgtctttttctcagagatctaacttgcatatacatcagagagtacataccggggaaaggccgtataagtgcggcgaatgcggcaagggcttctcacagtcctcaaacctgcacattcatcgctgcattcacacaggcgagaaaccgtatcagtgctatgagtgcgggaagggcttcagccagagctcagacttgcggatccatttgcgagtgcatacaggtgagaaaccttaccattgcgggaagtgtggaaagggatttagccagtcctccaaactactcatccaccagagagtccacacgggcgagaaaccgtacgaatgctctaaatgcggaaagggattcagccaatcatctaacctgcatattcatcagcgtgtccataagaaagatcccagatag

SEQ ID NO: 141263 - DNA, 1377 bp, synthetic construct
  misc_feature 1..1377: note = Description of Artificial Sequence: Synthetic coding sequence
  source 1..1377: mol_type = other DNA
atggcaagcacaatcactggtagtcaggactgcattgtgaaccaccgcggagaagtggacggagagcctgaactcgacatatctccctgccagcagtggggagaggcctcttctcccataagtcggaaccgggactctgtgatgacccttcaaagcggatgctttgagaacatagaatccgagacatatctgcctttgaaggtcagttctcagatcgatacacaggatagttccgtgaaattctgtaaaaatgaacctcaggaccatcaagagtcaaggcgcttatttgtgatggaggagtcaacagaaagaaaggtgatcaaaggtgagagctgctccgagaacctgcaagtgaagctggtgagtgacggacaggaactcgctagtcctcttctgaacggcgaagcaacctgccaaaatggccagctcaaagaaagtctagaccctatcgactgtaactgcaaggacatccacggatggaaaagccaggtggtgagttgctctcagcagagggcccatacagaggagaagccttgcgatcataataattgcggaaaaatattaaatactagccctgacggacacccatatgagaaaattcatacagccgaaaagcaatatgaatgtagccaatgtggcaaaaacttcagccagagctctgagttgctgctccaccagcgcgaccacaccgaggaaaaaccctacaagtgcgaacagtgtggtaaaggttttacacgatcgagctccctcctcatccatcaggcggtccatacagacgagaagccctacaaatgcgataaatgtggaaagggttttacccgcagttccagccttttaattcaccacgctgtccacaccggagaaaaaccctataagtgcgataagtgtggcaagggtttttcacagagttctaagctccacatacaccagagagtgcacaccggagagaaaccatatgaatgcgaggagtgcgggatgagtttttcacaacggtctaacctgcacatccaccagagggtacacactggagagagaccctacaagtgcggggagtgtgggaaaggattttcacaatcaagtaatctccatatacacagatgcatccacaccggagagaaaccgtaccagtgctacgagtgcggcaaggggttctcacagtcaagcgacttacgtattcacctgcgggtgcataccggagagaagccttaccactgtggcaagtgtggtaagggattttcccagtcaagcaaactgttaatccatcagcgagtacacaccggagaaaaaccttacgagtgcagcaaatgcggaaaaggcttcagccagtcatccaatctacatatccatcagcgcgtgcacaagaaggacccaagatag

SEQ ID NO: 141264 - DNA, 1377 bp, synthetic construct
  misc_feature 1..1377: note = Description of Artificial Sequence: Synthetic coding sequence
  source 1..1377: mol_type = other DNA
atggcttcgactatcaccgggtctcaggactgcatcgtgaatcataggggcgaagtcgatggagagccagaattggatataagcccttgccaacagtggggggaggccagcagtcccatctcccgaaatagggacagtgttatgaccttgcagtcggggtgtttcgagaacattgaaagcgaaacctatctccccctcaaggtcagcagccagattgatacccaggactcaagtgtgaaattctgcaaaaacgagcctcaagaccaccaggaatcccgacgactgttcgttatggaagaatcgaccgagagaaaggtgatcaagggagaatcctgcagcgaaaacctccaggtcaagctggtatcggacggacaagagctcgcctcccctcttctgaacggggaggctacatgtcaaaacggccagctgaaggagtcactggacccaatcgactgtaactgcaaggacattcacggctggaaatcccaagtcgtgagctgctctcagcaaagagcccacactgaggaaaagccgtgcgatcacaataactgcggtaagattctcaacacatcacccgacggccatccttacgaaaagatccacaccgctgagaagcagtacgaatgttcacagtgtggtaaaaatttcagccagtccagcgagttattactccatcagcgcgatcatactgaagagaaaccttataagtgtgaacagtgtggcaaggggttcacaagatcttcttcacttctcatccatcaggccgtgcatacagacgagaagccctacaagtgtgacaagtgcggcaaaggcttcacgcggagctccagcttgctgatccaccacgctgtgcataccggcgaaaagccatacaaatgtgacaagtgcggaaagggctttagccagtccagcaagctgcatatccaccaaagagtgcacaccggcgagaagccttatgagtgtgaggaatgcggcatgagcttctctcaacgcagtaatctgcacattcaccaaagggtgcacactggggagcgtccctataagtgcggcgagtgcggcaagggtttcagccaaagctccaaccttcatatccatcggtgtattcacactggcgaaaagccctaccaatgctatgagtgcgggaaaggattctctcagtcaagtgatctccgcatccatctcagagtccacactggggagaaaccttatcactgcgggaaatgcggcaaaggcttctcccagtctagcaaattgcttatacaccaaagggtccacaccggagagaagccgtacgagtgtagtaaatgcggtaagggatttagccaatccagcaacctgcacatccatcaaagagtccataagaaggatcccagatag

SEQ ID NO: 141265 - DNA, 1107 bp, synthetic construct
  misc_feature 1..1107: note = Description of Artificial Sequence: Synthetic coding sequence
  source 1..1107: mol_type = other DNA
atgtctgcccaaagcgttgaggaagacagcatcttaatcatccctacccctgatgaagaagagaaaattctaagggttaagttagaagaggatccggacggcgaggaaggatcctccatcccctggaaccacctgcctgaccccgaaattttcagacaacgattcaggcagtttgggtaccaagactcccctggccccagagaagctgtatcacagctgcgcgagctgtgtagactttggcttagaccagagactcacactaaggagcagattctcgagctggtagtgctagaacagtttgtggccatcctgccaaaggagctgcagacctgggtgcgggatcatcatcccgagaatggagaagaggccgtaaccgtgctggaagatctggaatccgagctggacgacccgggccagcctgttagcctcagacgaagaaagagggaggtgctcgtggaagatatggtgagccaagaggaggctcagggtcttccatcttctgagctagacgctgttgaaaaccagttgaaatgggcctcctgggaactgcatagcctgagacactgcgacgatgacgggcgcaccgagaatggcgccctcgctcctaagcaggaactaccaagcgccctggaaagccatgaggtaccggggactctgaacatgggtgttccccaaatatttaagtacggagaaacatgctttcctaaaggtcgctttgagcggaaacgcaacccctcaagaaagaaacagcacatatgcgacgagtgtggtaaacacttctcccagggctccgctctcattctgcatcagaggattcacagcggtgaaaaaccttatggctgcgtggaatgtggtaaggcattctccagatcgagtatcttggttcagcaccagcgagtacacacaggcgaaaagccttacaagtgcctagagtgtggaaaggcattctcccagaactctgggctgattaatcaccagcggatccatacaggggaaaaaccgtacgagtgcgtgcagtgtgggaaatcctattctcaatcttccaatctgttccgccatcaaagacggcacaatgccgagaaactgctcaacgtggtaaaggtttag

SEQ ID NO: 141266 - DNA, 1107 bp, synthetic construct
  misc_feature 1..1107: note = Description of Artificial Sequence: Synthetic coding sequence
  source 1..1107: mol_type = other DNA
atgtccgcgcagagcgtggaggaggatagcattctgatcataccaactcctgacgaagaggagaaaatcctgcgcgttaaactggaggaggaccccgacggtgaggagggatcctccatcccgtggaaccacctacccgaccccgagatctttcgccaacgtttcaggcagtttggttaccaggacagccccgggcctagagaggctgtgtctcagctgagggaactgtgtagactgtggctgcggccagagacccatactaaagaacagatcctggagctcgtggtactggaacagtttgttgccatcctcccgaaagagctgcagacatgggttagggaccaccaccctgaaaacggagaggaggcagtgacagtgttagaggacctggagagtgagcttgacgatcccggacagcccgtaagccttcggcggcgaaagcgcgaagtcttggttgaggacatggtgtcacaggaggaggcccaaggactgccaagctcagagctcgatgccgttgagaaccagctgaaatgggcttcttgggagctgcattcattacggcactgtgacgatgacggacgaaccgaaaatggtgctcttgcccctaaacaggagctcccgagcgcactggaaagccatgaggtgccaggcactctcaatatgggggtgccacagatattcaagtacggggagacctgctttcctaaaggcagattcgagcgcaaaagaaacccttctagaaagaagcaacacatctgcgacgagtgcggcaaacattttagccagggtagcgccttgatcctacatcagagaatacactccggggagaaaccatacggttgcgttgaatgtgggaaagccttctctcgcagcagcattttggtacagcatcagagggttcacactggagagaaaccttacaagtgtctggagtgtggcaaagccttttcacagaattcaggcctgatcaaccaccagagaatccacaccggggagaaaccctacgaatgtgtccagtgtggcaaaagttacagtcagtccagtaacctttttagacatcaacgtcgccacaatgccgaaaaactgctgaatgttgtgaaggtgtag

SEQ ID NO: 141267 - DNA, 1371 bp, synthetic construct
  misc_feature 1..1371: note = Description of Artificial Sequence: Synthetic coding sequence
  source 1..1371: mol_type = other DNA
atgaataagtttcaaggtcccgttacacttaaggacgtcattgtggaatttacaaaagaagagtggaagctgttgacccccgcccagcggacactctacaaggatgtgatgctggaaaactattctcatcttgtttccgttggatatcatgtgaataagcctaacgcggtgttcaagctgaaacagggcaaggaaccgtggatcttagaggtggaattcccacatcgaggttttcctgaggatctttggagcattcacgacctagaggctagatatcaggaatctcaggccggaaattcacgcaacggggaactaaccaagcaccagaaaacacacacaaccgaaaaggcctgtgaatgcaaggaatgcggaaagtttttctgccagaagagtgcattaatagtgcaccagcatacccatagtaagggcaaatcctatgattgcgataaatgcgggaagtccttttcaaaaaacgaggatctgatccgtcaccagaagatccacaccagagacaaaacatatgaatgcaaagagtgtaaaaagattttctaccatctgagtagtttgtcacgacatttacggactcatgccggcgagaagccgtacgagtgcaaccagtgtgagaaaagcttctatcagaagccccatctgacggaacaccaaaagacgcataccggagaaaaaccttttgagtgcaccgaatgtggaaaattcttttacgtcaaggcctatctgatggtgcaccagaaaacccacaccggggagaaaccttacgagtgtaaggagtgcggcaaagctttttctcagaaatcacacctgaccgtccaccagcgcatgcatactggcgagaagccttataaatgcaaagaatgtggcaaattcttcagtaggaactcccatctgaagacccatcagcgatcgcatacaggcgaaaaaccctatgagtgcaaagaatgccgaaagtgcttctaccagaaatctgctcttacggtccaccaaagaacccatacaggcgagaagcctttcgaatgtaataaatgcggaaaaaccttttactacaagagcgacctgaccaaacaccaaaggaaacacacaggggagaagccctacgagtgtaccgagtgcggcaaaagctttgcggttaacagcgtgctacgcctccaccagagaactcacaccggcgaaaaaccatatgcctgcaaagagtgcgggaaatcgttcagccagaagtcgcacttcataatccaccagcgaaagcataccggggagaagccatacgagtgccaggaatgcggcgagacatttatccagaaatcccagcttacagctcaccagaaaacccacaccaaaaaaaggaacgccgagaagtag

SEQ ID NO: 141268 - DNA, 1263 bp, synthetic construct
  misc_feature 1..1263: note = Description of Artificial Sequence: Synthetic coding sequence
  source 1..1263: mol_type = other DNA
atgctggagaattatagccatttagtttccgtgggctatcatgttaataagccaaacgcagtgttcaagctcaaacagggaaaggagccatggatcctggaagtcgagttccctcaccgaggatttcccgaagatctgtggtccatccatgacttggaggcacgctaccaggaatcacaggctgggaatagccgcaacggtgaactgacaaaacaccagaaaacacacaccaccgaaaaggcctgcgaatgtaaggagtgcggcaaattcttttgtcaaaaatcagctttaatagtgcaccagcacacgcattctaagggcaaaagttatgactgtgacaagtgcggaaaaagctttagtaagaatgaagatctaattaggcaccagaagatccacacccgggacaagacttacgagtgcaaagagtgtaagaaaatattttaccatctgagcagcctttcgcgtcatttgcggactcatgcgggggagaaaccgtatgagtgtaaccagtgtgagaagagtttttatcagaagccacacctcacagaacaccagaaaacgcatacgggggaaaaacccttcgaatgtacagagtgtggcaagtttttttatgtcaaggcctatctaatggtgcatcagaagactcacacaggcgaaaaaccatatgaatgcaaggagtgcggtaaggctttctcacagaagtcccatctgacagttcaccagagaatgcacaccggcgagaagccctacaagtgcaaggagtgcggtaagttcttctctcgcaatagtcacctaaagacacaccagagatctcacaccggggagaaaccatatgagtgcaaggagtgtaggaaatgtttctaccagaagtctgccttgactgtgcaccaaagaacccatacgggagagaaacccttcgaatgtaacaaatgtggaaaaacattctattataaaagcgatctgactaagcaccagcgcaaacacacaggtgagaagccttatgaatgtactgaatgcggcaagtcattcgccgttaattcagtgcttcggctgcaccaacggacacacacaggcgaaaaaccctatgcatgcaaggaatgcgggaaatcattcagccaaaagagtcactttatcatccaccagagaaagcacaccggcgaaaaaccatacgaatgtcaggagtgcggagaaacctttattcaaaagtctcaactgacagcccaccaaaagacccataccaaaaagcgtaacgcagagaaatag

SEQ ID NO: 141269 - DNA, 1500 bp, synthetic construct
  misc_feature 1..1500: note = Description of Artificial Sequence: Synthetic coding sequence
  source 1..1500: mol_type = other DNA
atggggcctcttcaattcagagacgtcgctattgaattctcactggaagagtggcattgtctggacactgcacagcgcaacctgtaccgcgacgtgatgctggagaactatagaaacctggtcttccttggaatcgttgtaagcaaacccgatctggtgacatgtttggagcaggggaagaaacccctcaccatggagcgtcacgagatgatcgccaagccaccggtcatgtccagccacttcgcccaagatttgtggccggaaaacatacagaacagctttcagattggcatgctgcggcggtatgaggagtgccgccatgataaccttcagctgaagaagggctgtaagtctgtaggagagcacaaagtgcacaagggaggttacaatggtcttaaccaatgcttgactaccacccagaaagagatcttccaatgcgacaagtacggcaaggtgtttcacaagtttagcaattcaaacacctataagacaaggcatacaggtattaacttgtttaaatgcatcatatgtggaaaggcgttcaagagaagttccaccttgactacccataaaaagatccacaccggcgagaagccctacaggtgcgaggaatgtggaaaagccttcaaccagtccgctaatctgactactcacaagcgaattcacactggagaaaagccgtatagatgtgaggagtgtgggaaggccttcaaacaaagttctaacctgactacgcacaagaagatccacactggagagaaaccctacaaatgtgaggaatgtggaaaagctttcaatagatcaaccgacctcacaacacataaaatagtgcacaccggcgaaaaaccttataagtgtgaggagtgcggcaaggctttcaagcatccaagtcacgtgaccacccacaaaaaaatccacacaagggggaagccttacaattgtgaagaatgcggtaaatccttcaaacactgctcaaaccttaccatccataaacgaatccacacgggagaaaaaccttacaagtgcgaggaatgcgggaaagccttccatctgtcctcacatctgaccactcataaaatcctccacacaggggaaaaaccctatcgctgcagggaatgtgggaaggccttcaatcatagcaccactctgttctcccacgaaaaaatccacacaggcgagaagccgtataagtgcgacgagtgtggcaagacttttacatggccaagtattctgagcaagcataaaagaactcatacaggcgaaaaaccctacaagtgtgaagagtgcggaaagtcttttaccgccagtagcacactaacgacacacaagcgcatacacactggagagaagccttataaatgtgaagagtgcggaaaagcattcaattggtcctcagacctaaataaacataaaaagattcacatcgagcggaagccttacattgtaaaaaacgttacagacctactgaatgtcccaccactgcttatctcaatccgctag

SEQ ID NO: 141270 - DNA, 1500 bp, synthetic construct
  misc_feature 1..1500: note = Description of Artificial Sequence: Synthetic coding sequence
  source 1..1500: mol_type = other DNA
atgggtccgttgcagttccgggacgtagccatagagttttctctggaagaatggcattgtctggacacggctcagaggaacctgtacagagacgtgatgctggaaaattaccgaaatctcgtcttcctcggaatcgtggtcagcaagcctgatttagttacttgcctagaacaaggcaagaagcctctaaccatggagaggcacgagatgattgccaaaccacctgttatgtcaagccacttcgcacaggatctctggcctgaaaacattcagaacagcttccagatcgggatgttgagacggtacgaggagtgtcgtcacgacaacctgcagctcaagaagggatgtaagtccgtcggtgagcacaaggtgcacaagggcgggtacaatggcctcaatcagtgtctgaccaccacccagaaggaaattttccagtgtgacaagtacggcaaggtgtttcacaaattctcaaatagtaatacctataagacaagacacacagggataaacctgttcaagtgcattatatgtggtaaggcctttaaaagatcaagtaccctgacaacgcacaaaaagattcatacaggagagaaaccctaccggtgtgaggaatgtggcaaagccttcaaccagtccgccaacctcacaacccacaaaaggattcatactggagagaagccatataggtgtgaggagtgcggcaaggccttcaaacagagctccaacctgactacccacaagaagattcatactggtgagaaaccgtacaaatgcgaggaatgcggtaaggccttcaacaggtccactgacctgacaacccacaagatcgtgcacacgggggagaagccatacaaatgcgaagaatgtggcaaggccttcaagcatccttcccatgttactacccacaaaaaaatccatactagggggaagccctataactgcgaggagtgcgggaagagctttaaacattgtagcaacctcactatccataaacggatccataccggcgagaagccatacaagtgcgaggagtgcgggaaggcctttcatctctcgtctcatctgaccactcataagatattgcataccggggagaagccttatagatgtcgggaatgcggtaaggccttcaaccattcgaccaccctgttttctcacgagaagatacacacgggagaaaagccatataagtgcgatgagtgcggtaagacctttacgtggccaagtatcctgtccaaacacaagaggacacacacaggcgagaaaccgtataagtgtgaggagtgtggaaaatccttcactgctagctctaccctcaccacacacaagcgaatccacactggagagaagccttataagtgtgaagaatgtgggaaggcctttaattggtcctccgacttaaataagcataaaaaaatccacattgaacgcaaaccatacattgtgaagaacgtcacagatctactgaatgtgcctcctctactgatctcaattcgctag

SEQ ID NO: 141271 - DNA, 276 bp, synthetic construct
  misc_feature 1..276: note = Description of Artificial Sequence: Synthetic coding sequence
  source 1..276: mol_type = other DNA
atgccaggaccccctcgctccctcgagatggggctgctcacctttcgagatgttgcgatcgaatttagtttggaagagtggcagcacctcgacattgcccaacagaatctttatagaaacgtcatgctggaaaactatagaaatttagctttccttggcatcgccgtgtccaagccggatctgattacctgtttggaacagggtaaggagccttggaatatgaaaagacacgaaatggtggatgaacccccagggctggacttttcattgctgtag

SEQ ID NO: 141272 - DNA, 1725 bp, synthetic construct
  misc_feature 1..1725: note = Description of Artificial Sequence: Synthetic coding sequence
  source 1..1725: mol_type = other DNA
atgtgccctcatttcgcccaggacctgtggcccgagcagggcatggaagacagctttcagaaagccatcttacgtaggtacggtaaatacggtcacgagaacctacagctgcgcaagggatgtaaatcagtggacgaatataaggtcaataaggaaggctataacggactcaaccaatgcttcaccacagctcagtcaaaggtgttccagtgtgacaagtaccttaaagttttttacaagttcctgaacagcaaccggccaaaaatccggcacactgagaagaagagcttcaagtgcaaaaaaagggtgaagctgttttgtatgctaagtcataagacacagcacaagtctatctaccacagagaaaaatcttacaaatgtaaggaatgtggcaagacattcaactggtcatccaccttgacaaatcaccgtaaaatttacaccgaggagaagccatataagtgcgaggaatacaataaatctccaaaacaattgagcaccctgaccacccatgaaatcattcacgctggcgagaagctatacaaatgcgaggaatgcggggaagcgttcaacaggtccagtaacctgacgactcacaagatcatccacactggtgagaaaccctataagtgtgaggagtgcggtaaggcattcatctggtcctctaccttaactgaacacaagaagattcacacacgcaagaaaccatacaagtgtgaagagtgtggaaaggcatttatttggtcatccaccctaacgaggcacaaaaggatgcatactggtgagaagccttacaagtgtgaggagtgtggtaaggccttttctcagagctcgactttgacgacccacaagattattcatacgggcgagaaaaggtataagtgtctcgagtgtgggaaagcttttaaacagctcagtacacttactactcataaaatcattcacgtgggggagaagctgtataagtgcgaggaatgcgggaaagggttcaaccgcagtagcaatctcacaacccataaaatcattcatactggagagaaaccttacaagtgcgaggaatgcggcaaggcattcatctggtcctccacacttaccaaacacaagaggattcacacaagggagaagccttacaaatgtgaagaatgcgggaaggcttttatctggagctctacgctgactcgtcacaagcgcatgcacactggtgagaagccctacaaatgtgaagaatgtggcaagtcatttagccaaagcagcacattgaccacccataagataatccacacaggcgagaaaccttacaaatgcgaagagtgcggcaaagctttcaattggagcagcaccctgactaagcacaagattattcacactgaagagaagccctataagtgcgaaaagtgcgggaaggccttcaagcagagctccatcctgacgaaccacaagcgcatccataccggggagaaaccgtataaatgcgaggagtgtggcaaaagttttaatcggtcctctacctttactaagcacaaagtcatccacactggcgtgaaaccatataagtgcgaggaatgtggcaaagccttcttttggagtagtacccttaccaaacacaaacgtatccataccggtgagcaaccatataaatgggaaaagtttgggaaggcgtttaatagatctagccatcttacaacggataaaatcacccactggcgtgaaattttgcaggtgtag

SEQ ID NO: 141273 - DNA, 1980 bp, synthetic construct
  misc_feature 1..1980: note = Description of Artificial Sequence: Synthetic coding sequence
  source 1..1980: mol_type = other DNA
atgccaggtcctcctagatccctggagatgggcctgttaacatttcgggacgtggcgatcgaattctctctggaggagtggcagcatctcgatatcgcacagcagaatttatacagaaatgtcatgctcgaaaattatagaaatctggcttttttgggtatagctgtctccaaacccgacttgatcacatgccttgaacaaggcaaggagccctggaacatgaagcggcatgagatggtagacgaacctcccggaatgtgtccacacttcgcacaggacctgtggcctgagcaggggatggaggattccttccagaaagcaatcttgcgccggtacggcaagtacggacacgagaaccttcagttacgtaagggatgtaagagcgtggacgaatacaaggtgaataaggagggctacaacggcttaaatcagtgctttacaactgcccaatctaaagtgtttcaatgtgataagtatcttaaagtgttctacaagtttcttaattccaaccgtccaaagatccggcataccgagaaaaagagtttcaagtgcaaaaaacgggtgaagcttttctgcatgctgagccacaagacacaacacaaatctatctatcacagagaaaaaagttataaatgcaaggaatgcgggaaaacctttaactggagctctaccctgaccaatcacagaaagatctacactgaggaaaaaccttataaatgtgaggaatacaataagtctcccaaacagctctcgacgcttacaacacatgaaatcattcacgccggtgaaaagctctataaatgcgaagagtgtggcgaggccttcaatagatcgtcgaacctgacaacccacaagataattcatactggcgaaaagccctacaagtgcgaggagtgcgggaaagccttcatctggtcctccaccctgactgaacataagaagatccataccagaaaaaagccctacaaatgtgaggagtgcggcaaggctttcatctggtcatcgactctgacccggcataaacgcatgcataccggggagaagccttataaatgcgaggaatgtggtaaggccttcagccagtcttccaccttgacaacacacaagatcattcacacaggtgagaagcgttacaaatgtctggagtgcggcaaagctttcaaacaactgagcactctgacaactcacaagatcatacacgtcggcgaaaagctgtataagtgcgaagagtgtggaaaagggttcaacagatcctctaatctaacaactcataagatcattcacactggagagaagccgtataagtgtgaagaatgtggaaaagctttcatctggtctagtaccctgacaaaacataaacgaattcatacacgagagaagccatataagtgcgaagaatgcggcaaggcctttatttggtcatctaccctaactcggcataaacgcatgcacacgggcgaaaaaccctacaagtgtgaggagtgtggaaagagtttcagccagagcagcaccctcactactcacaagattatccacacaggcgaaaagccctataagtgtgaagagtgtggcaaggcttttaactggagctctacactgacaaaacataagattatccataccgaggagaagccttataaatgcgagaaatgtggtaaggccttcaagcaatcttcaattctgactaaccacaaacgaattcacacaggggaaaagccgtataagtgcgaggaatgtggtaagtcattcaaccggtcatccaccttcactaagcacaaggtgatccatacaggcgtgaagccctataaatgtgaagagtgcggaaaagccttcttctggtcgtccaccctcactaaacataagagaatccacacgggtgagcagccatataaatgggaaaagttcggaaaggctttcaatcggtccagccacctaacgacagataaaatcacacactggcgtgagattctgcaggtgtag

SEQ ID NO: 141274 - DNA, 1056 bp, synthetic construct
  misc_feature 1..1056: note = Description of Artificial Sequence: Synthetic coding sequence
  source 1..1056: mol_type = other DNA
atgcccgggccaccgcggtctctcgaaatggggctgttaacgtttagagatgtcgccatagaattcagcctcgaagagtggcagcacctggatattgctcaacaaaatctctatcgtaacgtcatgctggagaactataggaacttggccttcctcggcattgccgtgagtaagcccgacttaattacctgccttgagcagggaaaggaaccctggaatatgaagcggcatgaaatggtggacgagccacccgggatgtgtccacatttcgcacaagacctctggcctgaacaggggatggaggattcatttcagaaggccattttaagaagatatggcaagtatgggcatgagaatctgcagttaaggaaaggttgcaaaagcgtggacgagtacaaagtgaacaaggaggggtataacggactcaatcagtgttttactaccgcgcagagtaaggtatttcaatgtgacaagtatctaaaggtgttctataaattcctgaatagcaatagaccaaagatacggcacaccgagaagaagtcttttaagtgcaagaagcgcgtcaagttgttttgcatgctgtcacacaaaacccaacataagagcatctaccatcgtgaaaagtcttataaatgcaaggagtgcggtaaaacatttaattggtcctctactctgaccaaccacagaaaaatctacaccgaggagaaaccatataaatgtgaagagtacaataaaagtcccaaacagctgtccacactcacaacccacgaaataatccacgccggtgagaaactctacaaatgtgaggagtgcggtgaagccttcaataggtcctctaccttcactaagcacaaggtgatccacactggcgtcaagccatacaaatgcgaagaatgcggcaaggcttttttttggagttcaactctcaccaaacataagaggatccacactggagaacagccctataagtgggagaagtttggcaaggccttcaatagatcatcacacctgacaacggataagattacacattggcgagaaatcttgcaggtttag

SEQ ID NO: 141275 - DNA, 1884 bp, synthetic construct
  misc_feature 1..1884: note = Description of Artificial Sequence: Synthetic coding sequence
  source 1..1884: mol_type = other DNA
atggccgccgccgagctaaccgcacccgcccagggtatcgtgactttcgaggatgtcgctgtttatttctcctggaaagagtggggcttgctggatgaggcccagaagtgcctgtaccacgatgtgatgctggaaaacctgacgctgactacttccctcggtggctctggtgccggcgatgaggaggccccctaccaacagtctacaagccctcaaagagtgtcacaggtacggatccctaaagccttgccaagcccgcagaaaacgaatccttgtgaaatctgtggccccgtgttgagacagatccttcaccttgtggagcaccaaggcacgcatcacgggcaaaaattatacaccgatggcgcttgtaggaagcagctgcagtttaccgcatacctccaccagcaccaaaaacagcatgttggacagaaacactttagatctaacggggggagggatatgttcctcagctcttgtacattcgaggttagcggtaagccattcacatgtaaggaggtaggtaaggatttccttgtgaggtcacgctttctgcagcagcaagcagcacacaccaggaaaaagtcaaataggacgaagtcggctgtggccttccactccgttaagaaccactataactggggtgaatgtgtgaaagcgttttcatataagcatgtgcgggtgcagcatcagggggacctcatcagggagaggtcttacatgtgctccgagtgcggaaaatctttttcaacctcgtgctctctgagcgaccatctgagggtgcacacatctgaaaagccctacacatgtggggagtgtggaaagtcttatagacagagcagctcgctgattacacatcgcaggattcacaccggggtaagacctcatcagtgtgacgagtgtggaaagctgtttaacaggaaatatgacctgctaatccatcagcgcgtccatacaggggagcgtccctataaatgtagcgaatgcgggaaaagctttagccactcttctagccttattactcaccagagaatacataccggcatgagaccttatgaatgctcggagtgcggtaaaagctttattcactcgtcttccttgattacacaccagcgggtccatactggcacccgtccatatatgtgttctgagtgtggtaagtcattctcgcagtcttgccatctgattaagcaccgcagactccacataggtgagggaccttatgagtgtagcgaatgtggcaagctatttacgtatagatcacgattctttcaacatcaacgggtccatacaggcgtcaggagtcacgagtgtcatgaatgcggaaaactgttctctagaaagttcgatttaatcgtccatgaaagagtccacaccggggagcggccgtacgaatgttctgaatgtggcaaatcgtttacctgcaagtcatatctcatctcccactggaaagtacacaccggggcccgtccctacgagtgtggcgagtgtggcaagtccttcactcactcttccacgctcttacaacaccagcgggtccacactggcgaacggccatacgagtgtaacgagtgtggaaagtttttttcccaatccagtagcctgatccggcatcgacgcagccataccggagagaggccgtatgaatgtagtgagtgttggaagtccttcagcaatcactctagcctggtgaaacacaggagagtccacaccggtgaacggccatacgaatgtagcgagtgcggcaaatcctttagccagtcaagtaatctgactaatcaccagcggatccacagcggtgagcgcccttacgaatgtagcgattgcggtaagtttttcacattcaatagcaacctcctgaagcaccagaatgtgcacaagggctag

SEQ ID NO: 141276 - DNA, 1608 bp, synthetic construct
  misc_feature 1..1608: note = Description of Artificial Sequence: Synthetic coding sequence
  source 1..1608: mol_type = other DNA
atgggccccctcaccattcgcgatgtcactgtggagttttctttagaagagtggcattgtctggatactgcgcaacagaatttatacagagatgtgatgttagagaactaccgaaatttggtgtttctcgggatcgccgtatccaaacctgatttaattacctgcttggagcaggggaaagaaccctgtaatatgaaacgtcacgagatggtggccaagcctccagtgatgtgttcacacatcgcagaagatttgtgtcctgagcgggacattaaatacttttttcagaaagtcatcctgcggcgctatgataaatgcgagcatgaaaacttgcagctgagaaagggctgtaagtccgtggacgaatgcaaagtctgcaagggaggatataatgggctgaatcagtgccttattacaacacagtccaaaatgtaccagtgcgataaatacgttaaagtcttctacaaattcagcaacagtgacaggcataaaataagacataccgaaaaaaagacctgcaagtgcaaggagtgcggaaaggctttcaaccagtctagcgcgctgactcgccacaagatgacgcatacgggcgagaaaccttataaatgcgaagaatgtgggaaagcattcaataggtcatcccacctaactcagcacaaggtgatccacacacgagaaaagccctataagtgtgaggagtgcgggaaagccttcaaccgcagttcacatataactcagcacaagagaatacacaatcgggagaaacccttcaagtatgatgagtgctgcaaagcattcaaatggtccagtgctcttactacactgactcaacataagcggattcacacgggagaaaagccatataaatgtgaggaatgcggcaaggctttcaaccaaagcagcgcccttaccaggcataagatgattcacacaggagagaaaccattccagtgtgaagagtgtgggaaggcctttaatagatcatctcatttaacccagcacaagatcatacacactaaggagaagccgtacaaatgcgaagagtgtggaaaagcctttaacaggtcctcccacctaactaagcacaaacggatccacacacgtgagaaggcatacaagtgtgacgagtattgcaaagcatttaattggagtagcgccctgaccaccctgacccaacacaagataatccatacgggggaaaaaccctacaaatgtgaagaatgtggtaaagccttcaaccgtagctcctaccttattaggcacaaaattatccatacaggggagaagccgtataaatgcgaagaatgcgggaaggcctttaaccagtcctctcatttgacgcagcacaaaataattcacacaggcgagaagccttacaaatgcgaggagtgcgggaaggcgtttaacaggagcagccatctcagccagcacaagattatccacaccggcgaaaaaccttataagtgtgaagagtgtggaaagccattcaaccggttctcttatctcactgtacacaagcgcattcacgcaggcgaaaaccccaataaatatgaggagtgtggaaaggcatgtaatcactcatctaacctgacgaaacacaattcatag

SEQ ID NO: 141277 - DNA, 1692 bp, synthetic construct
  misc_feature 1..1692: note = Description of Artificial Sequence: Synthetic coding sequence
  source 1..1692: mol_type = other DNA
atgggtccactcactatcagggatgttacagttgaattctctctcgaggaatggcactgcctagataccgctcagcagaacctgtatcgggatgtcatgctggagaattaccgcaacctcgtctttctcgggattgccgttagcaaacctgacctgatcacatgtttagaacagggcaaggagccttgcaatatgaaaaggcatgagatggtggctaaaccccctgttatgtgttcccatattgcagaggacttgtgccccgaacgcgacattaagtactttttccaaaaggtgattttgaggagatacgacaaatgtgagcacgagaacctgcagttaagaaaggggtgtaagtcggtggacgaatgcaaagtgtgtaaggggggctacaatggtctgaaccagtgccttatcactacgcagtctaagatgtaccagtgcgataaatatgtgaaggtgttctacaaattcagcaatagtgatcgccacaaaatacggcacaccgaaaagaagacttgcaaatgcaaggagtgcggcaaatcattctgtatgttgagtcagcttacacgccataagaggatccatatcagggagaacagtcacaagtgtgaggagtgtggcaaggcctttaaccaaagttctgccctcacgcggcacaaaatgacccacaccggagaaaaaccatacaagtgtgaagaatgtggaaaggccttcaaccggtcttcgcacctgacccagcacaaggtcatccatacaagggaaaaaccttacaaatgtgaagagtgtggaaaggcctttaaccgttcaagccatataacgcaacacaaacggatccacaacagagagaaaccctttaaatacgatgaatgctgcaaagcctttaagtggtcctcagccctcaccaccctgacccagcataagagaattcatacaggagagaagccttacaaatgtgaagagtgcggaaaggcgtttaatcaatcctctgccttgaccaggcataaaatgatccataccggtgagaaaccattccagtgtgaggagtgtgggaaagccttcaacaggagcagtcatctcacgcagcataagattatccatactaaggaaaagccttacaagtgtgaagagtgtggcaaggcctttaataggtcttctcacctgactaaacataagaggatccacacaagggaaaaagcttataaatgtgacgagtactgcaaggcttttaattggtctagcgccctaacaacgttaactcaacacaagataatccacacaggggagaagccctataagtgcgaggaatgcggcaaggctttcaataggagttcctacttaatccgtcacaaaattattcacacaggtgagaagccttataagtgtgaggagtgtggtaaagcttttaatcaaagctcccatttaacccagcacaaaattatccacacaggggagaagccttacaaatgtgaggagtgtggcaaagcattcaatcggtcctcccacctgagccagcacaagattatccatactggagagaagccttacaaatgtgaggagtgtggaaagccttttaaccgattttcttacctgaccgttcacaagcgcatacacgcgggagaaaaccctaataaatatgaagagtgcggcaaagcatgcaatcacagcagtaacctcactaaacacaacagctag

SEQ ID NO: 141278 - DNA, 1692 bp, synthetic construct
  misc_feature 1..1692: note = Description of Artificial Sequence: Synthetic coding sequence
  source 1..1692: mol_type = other DNA
atggggcctttgactattcgagatgtcactgtggagtttagtttggaggagtggcattgcttggataccgcccagcaaaacctgtacagagacgtcatgcttgaaaactatagaaacctggtgttcctgggcattgccgtgagcaagcccgacctgatcacttgcctggaacagggcaaggagccctgcaatatgaagaggcatgaaatggtggcaaaacctcccgtgatgtgcagccacatcgcagaagacctctgccccgagagggatatcaaatacttcttccagaaagtaatactgcgacggtacgacaagtgtgagcatgagaatctacagctcagaaaaggatgtaaatccgtggatgaatgtaaagtgtgcaagggcggttacaatggcttgaatcagtgtcttataacgactcaaagcaagatgtatcagtgcgacaaatacgttaaagtgttctacaagttctccaattcggacaggcacaagatccgtcacaccgagaagaagacctgcaaatgcaaggaatgcggaaaatccttctgtatgctgtcccagttaacccgccataagcgtattcacatcagagagaattctcacaagtgcgaggagtgcgggaaggcctttaatcagagctccgcgctgacccggcacaaaatgacccatactggtgagaagccttacaagtgtgaggagtgcgggaaggcattcaatcgctctagccatttgacgcagcacaaggtaattcatacacgtgagaaaccctacaaatgcgaagaatgcgggaaagctttcaaccgcagctcgcatattactcagcacaagaggatccacaaccgggagaagccgtttaaatatgacgaatgctgtaaagcttttaaatggagctctgccctcactaccttaacgcagcacaaacggatccatactggcgaaaagccttataagtgcgaggaatgcggtaaggcctttaatcaaagttctgcactgacccgccataaaatgatccataccggcgaaaagcccttccagtgcgaggagtgtggtaaggctttcaatcgctccagtcatttgacccagcacaagattattcacacaaaggagaagccttataagtgtgaagagtgcgggaaggctttcaataggtcatcccatctcacaaaacacaagcgaatccataccagagagaaagcctataagtgcgacgagtattgtaaagccttcaactggagctccgctttgaccacactgactcagcacaaaattattcacaccggagaaaaaccttataagtgcgaagaatgtggcaaggcttttaatagaagctcatatctcattaggcacaagatcatccataccggagagaagccttacaagtgtgaggagtgcggcaaagctttcaaccaatccagtcatctcacacagcataagattatacataccggggaaaaaccatacaagtgtgaggagtgcgggaaagcatttaatcgcagcagccatcttagccagcacaagatcattcataccggcgaaaagccttacaaatgtgaggaatgtggtaaaccattcaataggttctcttacctgactgttcacaagcgcatacatgcaggcgaaaaccctaacaaatacgaggaatgtgggaaagcatgcaatcacagctcaaatctcacaaagcacaacagttag

SEQ ID NO: 141279 - DNA, 1602 bp, synthetic construct
  misc_feature 1..1602: note = Description of Artificial Sequence: Synthetic coding sequence
  source 1..1602: mol_type = other DNA
atggcgacatcctttcgcacagcaagctgctggggccttctgagttttaaagacatttcaatggaatttacatgggacgagtggcagctcctggactctacccagaaatatctgtacagagatgtgatactggaaaattatcataacctaataagcgtgggctaccacgggacgaagcctgacctgatctttaaactggagcagggagaagatccttggataatcaacgcaaagatcagtaggcagagctgtcctgatggatgggaggagtggtaccagaacaaccaggacgaactagaatcaattgagcggtcttatgcctgctccgtacttgggcgactaaaccttagcaaaactcatgatagcagccggcaacggctctataatacacgcgggaagtcactgacacagaattcggccccaagccgatcgtatctcaggaagaatcccgataaatttcacggttacgaagagccttacttcctgaaacatcaaagggcccacagtatcgagaaaaattgcgtgtgctcagaatgtggcaaagcttttaggtgcaaaagccagctcatcgttcacctaaggattcacacgggtgaacgcccatatgagtgctctaaatgcgagcgtgctttttcggcaaaaagcaacttgaacgcccaccagcgggtacacactggcgagaagccttattcatgttccgaatgcgagaaggtcttttcttttagatcgcagctcatcgttcaccaggagatacacacaggtggtaaaccatatggttgttcagagtgcggcaaggcttatagttggaagtctcagttattattacaccaacgcagtcatactggagtcaaaccctacgagtgcagcgagtgtggcaaagctttctcacttaagagcccattcgtcgtgcatcagcggacccataccggagttaagccccacaaatgcagtgagtgtggaaaggccttccggtcgaagtcttatttgcttgttcacataaggatgcacactggggagaaaccctaccagtgttcggactgtggtaaggcattcaatatgaaaacacagctgatcgtgcaccagggtgttcacaccggaaataacccttatcagtgcggagagtgtggcaaggcgttcggccgcaaagagcagctgactgcacacctacgggcccacgcgggcgaaaagccatacggttgtagtgagtgcgggaaagcttttagtagcaagtcttacctcgtcatccaccggcggacccacacgggagaaaggccatatgaatgttctttatgtgagcgagccttctgcggcaagagtcagcttatcatccatcagcggacacattcgactgagaaaccttatgagtgtaatgagtgcgaaaaagcataccctcggaaagcatctctccagattcaccagaaaacccactcaggagaaaagccattcaagtgttccgagtgcggcaaggcattcacacagaagagctctttatcggaacaccagcgtgtccacacaggcgagaagccctggaagtgttccgagtgcggaaaatcgttctgctggaactccgggttgaggattcatcgcaaaacacacaagtag

SEQ ID NO: 141280 - DNA, 1542 bp, synthetic construct
  misc_feature 1..1542: note = Description of Artificial Sequence: Synthetic coding sequence
  source 1..1542: mol_type = other DNA
atggagtttacctgggatgaatggcaactgcttgatagtacccagaaatatttgtacagggacgtgattctggaaaactaccataatctcatatctgttgggtaccacggaaccaagccagatctcatattcaaattagaacagggcgaagatccctggattattaatgccaagatatcacgtcagtcatgtccagatgggtgggaagaatggtaccaaaataaccaggacgagctggagtccatcgaacgctcatatgcatgtagcgtattaggaagactgaacctgagcaagactcacgatagctcgagacaaaggctgtacaatacccgggggaagagtcttactcagaattccgcaccgagtcggagctacctacgaaaaaatcccgataaattccatggttacgaggaaccgtacttcctgaaacaccaacgtgcccactccattgagaaaaattgtgtgtgctctgaatgtggcaaagcctttcggtgtaagtctcaattgatagtccatctgagaatacacaccggcgagcgaccctacgaatgctccaagtgtgaaagagcattttctgctaaaagcaatctcaatgcccatcagcgtgtgcacacaggtgaaaagccctactcctgttccgagtgtgagaaagtgttctcattccgatcgcagttgattgttcatcaagaaatccatacaggaggtaaaccctacgggtgctctgagtgtggcaaggcttacagctggaagtcccaattgttactccaccagcgctcccacactggagtgaaaccatacgaatgcagcgagtgtggcaaggcgttttctctaaaaagtcctttcgttgtccaccaaagaacacatactggcgtaaagccgcataaatgtagcgaatgcggcaaggccttccgcagcaagtcttatttgctcgtacatattcggatgcatacaggcgagaagccctatcagtgctccgattgcggaaaggcgttcaatatgaagactcagctgatagttcatcagggagtgcacactggcaacaacccttaccagtgtggcgagtgtggcaaggcgttcggtcgcaaagaacagttgacagctcatctgcgagctcatgctggtgagaaaccctacggatgcagcgaatgtggaaaggcttttagttccaagagctatctagtcattcatagacgcacacacactggagagagaccctacgagtgttctctttgtgaaagagccttttgcgggaaatcccagctgattatccaccagaggacccatagcaccgagaaaccctacgaatgcaatgaatgcgaaaaagcctatcctagaaaagcttctcttcaaatccatcagaagacacacagtggagaaaagcccttcaaatgcagtgagtgtggaaaggctttcacacaaaaaagctcattaagtgaacaccagagggtgcacacaggagaaaagccctggaagtgcagcgaatgcggcaagagcttctgctggaactccgggttaaggatacatcgaaagacgcacaaatag

SEQ ID NO: 141281 - DNA, 1239 bp, synthetic construct
  misc_feature 1..1239: note = Description of Artificial Sequence: Synthetic coding sequence
  source 1..1239: mol_type = other DNA
atgatcgggatgctggagtccctgcagcatgaatcagatctcctccagcatgatcagatccacactggcgagaagccttacgaatgtaatgagtgccgcaaaactttttccctgaaacaaaatctagtcgaacacaaaaaaatgcacacaggtgaaaagagccatgaatgtactgaatgcggcaaggtgtgtagtcgtgttagctccttgaccttacatctgcgttcccatactgggaaaaaggcttataaatgtaataaatgcggtaaagcattctcgcagaaggagaattttcttagccaccagaagcaccacactggtgagaaaccatacgagtgtgagaaggtatcgatccagatgcccacaatcatcagacaccaaaaaaatcacactggcacaaagccctatgcctgtaaggaatgtggaaaagcctttaatgggaaggcttacttaaccgagcatgagaaaattcataccggcgagaaaccgtttgagtgcaaccagtgcgggcgggctttttcccagaagcaatatctgattaagcaccagaacatccacaccggaaaaaaaccttttaagtgctcagagtgtggtaaagcctttagccagaaagaaaacctcatcatacaccaacggatccacacgggcgaaaagccctacgaatgtaagggctgtggtaaggctttcatccagaaatcctctttgattcggcaccagagaagccacacaggtgaaaaaccttacacctgcaaagagtgcggcaaagcattttccgggaagagtaatctcacagagcacgagaagatccacattggggagaaaccttacaaatgcaacgagtgtgggacaatcttccggcagaaacagtacttaattaagcatcacaacattcacacaggggagaagccttatgaatgtaataagtgcggcaaagctttttctcgaattaccagcctcattgtgcacgtccgcattcacacaggggataaaccctacgaatgtaaagtgtgcgggaaggctttttgtcagtctagctccttgaccgtccatatgcgatcccacacaggagaaaagccctacgggtgcaatgagtgcgggaaagcatttagccagttcagtactcttgcgctccatatgcgcatccacacaggtgagaagccctaccagtgttctgaatgcggtaaagcgttttcacagaagagccaccacatccggcaccagcggatccatacacactag

SEQ ID NO: 141282 - DNA, 1239 bp, synthetic construct
  misc_feature 1..1239: note = Description of Artificial Sequence: Synthetic coding sequence
  source 1..1239: mol_type = other DNA
atgataggcatgctggagagcctgcagcatgagtccgatctgcttcaacacgaccagattcacaccggtgaaaagccctatgagtgcaacgaatgtcggaagacatttagtttgaagcagaacttagtggagcataagaagatgcatactggagaaaagagtcatgaatgcaccgagtgtggaaaggtttgttcgagagtgagcagcctgaccctgcacttacgatcacacactggcaaaaaagcgtataagtgtaacaagtgtggcaaggcgtttagtcaaaaagagaacttcctgtcccaccagaaacatcacacaggggaaaagccatacgagtgtgagaaggtctctatccagatgccaaccattatccgccatcagaaaaatcacaccgggaccaagccctacgcttgcaaagagtgtggcaaggcttttaatgggaaggcctacttgacagaacatgaaaagatccataccggcgaaaagccctttgagtgcaaccagtgcggcagagctttctcccagaaacaatacctcattaaacaccagaacattcacacgggcaaaaaaccctttaagtgctctgagtgcggcaaggccttcagccagaaggagaacttaattatacatcagcgtatccatacgggggagaagccctatgagtgtaaggggtgcggaaaggccttcatacagaaaagcagcttgattagacatcagagaagccatacaggcgagaagccctacacttgcaaggaatgcggaaaggccttcagtgggaaatcaaacctgacagagcatgagaagatccatataggtgagaagccttataagtgcaacgagtgcggtaccatattcaggcagaagcagtaccttattaagcaccataacatccacactggcgaaaaaccttacgagtgtaacaagtgcgggaaagccttctctcgcattacatcgttaattgtgcatgtgcggattcataccggggacaagccttatgaatgcaaagtatgtggcaaagccttctgccaatcctcttccctgacggtgcacatgcggtctcataccggtgaaaaaccttatgggtgtaatgagtgcggtaaggctttctctcagttttcaacgctggcactgcatatgagaatccacactggagaaaaaccttaccaatgcagcgaatgtggtaaggcctttagccaaaagtcgcaccacattcggcaccagcgcatccatacacactag

SEQ ID NO: 141283 - DNA, 1884 bp, synthetic construct
  misc_feature 1..1884: note = Description of Artificial Sequence: Synthetic coding sequence
  source 1..1884: mol_type = other DNA
atggctgccgcagtgttgacagatcgcgctcaagtctcagtgacatttgatgatgtggccgtcacattcaccaaagaagagtggggccaattggatctcgcccagcggaccttgtaccaggaggtgatgctggaaaattgcggtttgctggtgagtctcggctgcccagtgccaaaggcagagttgatctgtcacctagaacacgggcaggaaccatggacaagaaaggaggacctgtctcaggatacatgcccaggagacaaaggtaaaccaaaaacgactgagccaaccacatgcgagccagccctgagtgagggaattagtctgcagggccaggtgacacagggcaactccgtggacagtcagttgggtcaggccgaagaccaggatgggctgtcagagatgcaggaaggacacttcagacctggcattgaccctcaggaaaagtctccgggaaagatgagtccggagtgtgatggcttagggaccgcggacggcgtttgttcccgcatcggacaggagcaggtgtctcccggcgaccgggttcggtcccataattcatgcgaatccggaaaggaccccatgattcaggaagaggagaacaactttaagtgctccgaatgcggtaaagtgtttaataagaagcacctgcttgctggccacgagaaaatccactctggtgttaaaccttatgagtgtacagaatgcggcaagaccttcattaaatctacccacctgttacagcaccacatgattcacactggtgaaaggccgtacgagtgcatggaatgcggtaaagcattcaatcgtaaaagctatctgacacagcaccagaggatccatagcggcgagaagccatacaagtgcaacgagtgtggcaaggccttcactcatcgatccaatttcgtacttcacaatcgtcggcacacaggcgagaaatcctttgtgtgcacggagtgtggccaggttttcaggcaccggccaggctttttgagacattatgtggtacactccggcgagaacccgtacgagtgcctggagtgcggaaaggtttttaaacacagatcttacctgatgtggcaccaacagactcacactggtgaaaagccctatgagtgtagcgagtgcgggaaggttttcctagagtctgcggctctgattcaccactatgttatccatacaggggagaaaccctttgaatgcttagaatgcggcaaggcctttaatcatcggtcttatctgaaacgccaccagcgcatccataccggagagaagcctttcgtctgctctgagtgtggtaaggcctttactcactgcagcacattcattctgcataagagagcccacactggcgagaaaccattcgagtgtaaagagtgcggcaaggctttcagcaacagaaaggacctgatccggcatttttccatccacactggggagaagccatatgagtgcgtggagtgtggtaaagcctttacccgaatgtccggtctaacacgccataaacgcatacacagcggtgagaaaccctatgaatgtgtggagtgtgggaagagcttctgttggagtacaaacttgatacggcatgctataatccatacgggcgaaaagccttataagtgttctgagtgcgggaaagcattctcccggtcttccagcctcacacaacaccagcggatgcacacaggcaaaaatccaatcagcgttaccgacgtcggccgcccctttaccagcgggcagaccagcgtgaccctcagggagctgctgctcggcaaagattttctcaatgtgactaccgaggccaatatactgcccgaggaaacttccagcagtgcgtcagatcagccatatcagcgggaaacaccccaggtctccagtctgtag

SEQ ID NO: 141284 - DNA, 1884 bp, synthetic construct
  misc_feature 1..1884: note = Description of Artificial Sequence: Synthetic coding sequence
  source 1..1884: mol_type = other DNA
atggctgctgccgtgctgactgatagagcccaggtctccgtgacattcgacgatgtggctgttacctttacaaaggaagaatggggacagctggacttggcccagcggacgttgtatcaggaagtgatgctcgagaactgtggccttctagttagcctcggctgccctgttccaaaagcagagctcatatgccatctggagcatgggcaggagccttggacccgcaaggaagacctgagccaagacacatgcccaggcgataaagggaagccaaagacaacagagcccactacttgtgagccggctttatcagaaggtatctcactccagggacaagtaactcaagggaattccgtcgacagccaactcggccaggctgaggatcaagatggactgtcagagatgcaggaaggacactttcgccctggcattgatccccaagaaaagagtcccggaaagatgtccccagagtgcgacggccttggaacagcagacggtgtctgctcacggattgggcaagaacaggtcagtccgggagatcgggtgcgatcgcataacagctgcgagagcggtaaggatcccatgattcaagaagaggagaataactttaagtgttcggagtgcgggaaggtcttcaacaagaaacacctcctcgccggacacgagaagatccattcaggggtgaagccgtacgagtgtaccgaatgcggcaagacttttattaaatcaacccatttgcttcagcatcatatgatccacaccggcgaacgcccttacgagtgtatggaatgcgggaaggcctttaatcgcaagtcatatctgacccagcaccaacgcatacacagcggagaaaagccctataagtgtaacgaatgtgggaaagcatttacccataggagtaatttcgtgctccataaccgccgccacacaggagaaaagtctttcgtttgcacggaatgcggccaggtgttccggcacaggccgggctttctacgacactatgtggtacattccggcgaaaacccttatgagtgtctggagtgtggaaaagtcttcaagcataggagttacctgatgtggcaccagcagacccacactggcgaaaagccatacgagtgcagcgagtgcggtaaggtatttctcgagagcgctgcactaatccaccactatgtgattcacaccggggagaagcccttcgaatgtctggagtgtggaaaggcatttaatcaccgtagctacctgaagcggcatcagcggatccatacaggcgaaaagcccttcgtctgtagcgaatgtggcaaggcgtttacccattgcagcacattcatcctgcacaagcgggcccatacaggcgagaagccctttgaatgtaaagaatgtgggaaggccttttccaaccgaaaggatttgattagacatttttccattcacaccggagagaaaccctacgaatgtgtagagtgcgggaaggctttcacacggatgtccgggttaacccgccacaagagaatccattctggagaaaaaccatacgaatgtgtggagtgcggaaaatctttctgctggtctacaaacctgatcaggcatgctattattcatacaggagaaaaaccatacaaatgcagcgaatgcggtaaagcctttagccgcagcagttcactgacgcagcatcagcgcatgcacactggtaagaaccctataagcgtgacagacgttggccgcccttttacttccgggcagacatctgtgaccctacgtgagctgctcctgggtaaggacttcctgaatgtgacgactgaagccaacattctgcctgaagagacttcttccagcgcatcagaccagccatatcaacgcgaaacgccacaggtcagctcactgtag

SEQ ID NO: 141285 - DNA, 1650 bp, synthetic construct
  misc_feature 1..1650: note = Description of Artificial Sequence: Synthetic coding sequence
  source 1..1650: mol_type = other DNA
atgctggagaattacaaaaatctggccacagtaggctatcaactctttaagccatccctaatctcttggctggagcaggaggaatccaggactgttcaaaggggtgactttcaagcctcggaatggaaagttcaacttaagaccaaagagctcgctcttcaacaagatgttctgggcgagccaacgtctagtgggatccaaatgatcggttcccacaatggtggcgaagtgagcgatgtcaaacaatgcggcgacgtttctagtgagcactcctgtctgaaaacccatgtgcgaacacaaaacagcgaaaatacattcgaatgctacctatacggcgtagattttctgaccctacataaaaagacttccacaggtgaacagcgctctgtattcagccaatgtggcaaagcattttctcttaatccggacgtggtgtgccagagaacttgcaccggagaaaaggccttcgactgctctgattccggaaagtcttttatcaatcacagccatttgcagggacatttgagaacccataacggcgagagcctgcacgaatggaaggagtgcgggcggggcttcatacactctacagatctggccgtgaggatacaaactcataggagcgagaagccatataaatgcaaagagtgtggcaagggatttaggtattcagcttacctgaacatacatatgggaacccacactggggacaatccttatgagtgtaaggagtgcggcaaagcttttaccagaagttgtcagctcacacagcatcggaagacacataccggtgagaagccatataaatgtaaggactgcggccgagcatttaccgtctcatcttgcctttcgcagcacatgaaaattcatgtgggagaaaagccctatgagtgcaaggaatgtgggatagcgttcacacggagcagtcagctgacagagcatcttaaaacccacactgccaaagaccctttcgagtgcaaaatatgtggtaagtcattcaggaacagttcctgtttgtcagaccattttcgtattcacaccggcataaaaccgtataagtgcaaggactgtgggaaagcattcacacagaactctgatttgaccaagcatgctagaactcattcaggcgagcggccttatgagtgtaaagagtgcggaaaagcgtttgcgagaagctcgcgcctttcggagcacacccgcacacatacaggggagaaaccctttgagtgcgtcaagtgtggcaaggcatttgccatcagctcgaatttatcaggccatcttagaatacataccggggagaagccctttgagtgtctggagtgcgggaaggccttcactcacagctccagtttgaacaatcatatgaggactcattctgcgaaaaagccgtttacatgtatggagtgcggaaaagccttcaagtttcctacatgtgtgaacctgcacatgcggattcatactggggagaagccctataaatgtaagcagtgcgggaagagcttctcatacagcaattccttccaacttcacgaacgcacacacacgggggagaagccttacgagtgtaaggagtgtggcaaggcctttagctcgagtagttctttcagaaatcatgagagaaggcacgcagatgagagattaagcgcttag

SEQ ID NO: 141286 - DNA, 1650 bp, synthetic construct
  misc_feature 1..1650: note = Description of Artificial Sequence: Synthetic coding sequence
  source 1..1650: mol_type = other DNA
atgctagagaattacaaaaatttggccaccgtgggatatcagctcttcaaaccttctctgatttcatggttagagcaggaggaatcacgcaccgttcaaaggggcgacttccaagcaagcgaatggaaggtgcaactgaaaactaaggagctagcccttcaacaggacgttctgggagagcctaccagttcaggcatacagatgataggatctcacaatggaggagaagtgagcgatgtgaaacagtgcggtgatgtgagcagcgagcatagctgcctgaagacccacgtgcggactcagaattcagagaatacttttgagtgctatctttacggcgtggattttctgaccttgcacaaaaagacctcaacaggggagcaaaggagtgtcttttcacagtgcggcaaagcattcagtttgaacccagacgtggtgtgccaacgaacttgcacaggggagaaggcatttgactgctcggactcgggtaagagctttattaatcactcacatctgcaaggacatttgagaacgcataatggcgagtcactccacgagtggaaagaatgcggaagaggctttattcactcaacagatctcgcggtgaggattcagacgcacaggtcagaaaaaccgtataagtgcaaggaatgcggtaaaggatttcgctattcagcttaccttaatattcacatgggtactcataccggggataacccttacgaatgtaaagagtgcggaaaggcttttacgcggagttgccagctgacgcagcatcgaaagacccatactggcgagaagccatacaagtgtaaggattgcggacgcgctttcaccgtgtctagctgtttaagccagcatatgaaaatacatgtaggcgaaaaaccttatgagtgtaaggagtgtggtatcgcgtttaccagaagctcacagttgaccgagcacctgaaaacccacacagccaaagacccgtttgaatgtaagatttgcggaaagtcctttcgtaatagttcttgcctgagcgatcactttcgaattcataccggcatcaaaccatacaagtgcaaagactgcggtaaagctttcacccaaaattccgacctgacaaagcacgctaggacacactcaggtgaacggccttacgaatgcaaggagtgtggtaaggcgttcgcccgcagtagcagactctctgagcatactcggacacacactggagagaagccattcgaatgtgtgaaatgcggaaaggcttttgccatttcttctaatctctcggggcatttgcgcattcacaccggagaaaaacctttcgaatgtttggaatgcggtaaggcttttactcactccagctcactgaataatcacatgcgcactcacagcgccaaaaagccatttacgtgcatggaatgcgggaaagcttttaagtttcccacttgcgttaatttacacatgagaatccatacgggtgaaaaaccttacaagtgtaaacagtgtggcaagagcttttcctattctaatagtttccagctgcatgagagaacacacaccggcgaaaaaccctacgagtgcaaagagtgcggtaaggccttcagttcttcatcatcttttagaaatcatgagcgcagacatgctgatgaacgcttaagtgcttag

SEQ ID NO: 141287 - DNA, 1650 bp, synthetic construct
  misc_feature 1..1650: note = Description of Artificial Sequence: Synthetic coding sequence
  source 1..1650: mol_type = other DNA
atgttggaaaactataaaaatcttgctaccgtgggataccagctttttaagccttctcttatctcttggctggaacaggaggagtctaggacagtccagcgcggcgattttcaggcctctgagtggaaagtgcaattaaagactaaggaactagcgctacagcaggacgtactgggcgagcccacgagctccggaattcaaatgattgggagccataacgggggagaggtgagcgatgtgaagcagtgtggggatgtctcatccgagcacagttgcttaaaaacacatgtgcgaacccaaaacagtgaaaacacctttgaatgttacctctacggtgtcgattttctcacgttgcataagaaaacgagcactggagaacagcggtccgttttttcgcagtgcggcaaagctttttcccttaatcctgacgtagtctgtcagaggacgtgcacgggagaaaaagccttcgactgcagcgactcggggaaatccttcatcaaccatagtcatctccaggggcacctgaggactcacaacggcgaatcccttcacgaatggaaagagtgtggccggggctttatacacagcacagacttggccgtcagaattcaaacacaccggagcgaaaaaccgtataagtgcaaagagtgcggaaagggttttcggtattccgcttaccttaacatccatatgggcactcatacaggggacaacccctatgaatgcaaggagtgcggcaaagcctttacaaggtcctgccaactgactcaacatagaaaaacccatacaggagagaaaccttataaatgcaaagactgtgggcgagcgtttactgtttccagctgtctaagtcagcacatgaagatccatgtaggggaaaaaccctatgagtgtaaagagtgcggcattgccttcaccagatcttcccagttaaccgagcacttgaagacccacaccgccaaagatcccttcgaatgcaagatttgcggtaagtcatttaggaatagcagttgcctctctgaccatttcagaatacatacaggcattaaaccgtataaatgtaaggactgtggcaaagcttttacccagaactccgatctgacaaaacacgcaagaacgcactctggcgagcgaccatacgagtgcaaggagtgtggcaaagccttcgctaggagctctagactgagtgaacatacccgtacgcataccggcgagaagccattcgaatgcgtgaaatgcgggaaggcctttgccatcagcagtaatctgagtggccacctcagaatccacaccggagagaaacccttcgagtgccttgaatgtggaaaggcctttactcacagttcctctcttaacaaccatatgcggacacacagcgccaagaagccattcacatgcatggagtgtgggaaggcatttaagtttccaacttgtgttaatcttcacatgaggatacacaccggcgagaaaccctataaatgtaagcagtgtggaaagtcattttcctacagcaactcttttcaactccatgaacgcacacataccggcgaaaagccctacgaatgtaaggaatgcggaaaagctttctcaagctccagttccttccgcaaccatgagcgcagacacgcagacgagaggctgagtgcatag

SEQ ID NO: 141288 - DNA, 2232 bp, synthetic construct
  misc_feature 1..2232: note = Description of Artificial Sequence: Synthetic coding sequence
  source 1..2232: mol_type = other DNA
atgggccttctgacctttagagatgtcgctgtggagttctcactggaggaatgggaacatttggaacctgcccagaagaatttgtatcaggatgtgatgctcgagaactacagaaacttggtgagcctaggtttggtggtgagtaaacccgacctcatcacttttctcgaacagagaaaggaaccatggaatgtaaagtccgaggagactgtggctatccagccggacgtcttttcgcattacaacaaggaccttctgacggagcactgtacggaagcatcttttcagaaagtgatttcaaggagacacggttcctgcgaccttgaaaacctgcaccttaggaagcgatggaaaagagaagagtgtgagggacacaatgggtgctacgatgagaagacattcaaatacgaccagttcgatgagagcagcgtggagtccctctttcaccaacaaattctgtcctcttgtgccaaatcatacaatttcgatcaatatcgcaaggtattcacccactcatcattgttaaatcagcaagaggagatagacatctggggaaaacaccacatatatgataagacttccgtgctgtttaggcaggtgtcaacactgaatagctataggaatgtctttatcggcgaaaagaactatcattgcaacaactccgagaagacattgaatcagtcctctagccccaagaaccaccaggagaactattttttggaaaaacagtacaaatgtaaagagttcgaggaggtgttcctgcagagtatgcacggacaagagaagcaggagcagagttacaaatgtaacaagtgcgtggaggtgtgtacgcaaagcctaaagcacatccagcatcagactatacatattcgtgagaattcttactcttataataagtatgacaaggacctgtcccagtcttctaatctgcggaagcaaataatccataatgaagagaagccttacaagtgcgaaaaatgtggcgacagccttaatcattccctgcatttgacgcaacatcagattattccaactgaggaaaaaccctgtaagtggaaggagtgtggcaaggtgtttaatttgaactgcagcctctatctaaccaagcagcagcagatcgatacaggagaaaacctgtataaatgcaaggcctgctccaagtcatttacacgatcctctaatctcattgttcatcaacggatccacaccggagagaaaccctataaatgtaaggaatgcggaaaggcctttaggtgctcttcttacttaaccaaacacaaaaggattcacactggagagaagccctacaaatgcaaggagtgtggtaaagcattcaatcgctcatcttgtctcacccagcaccaaacaacacacaccggggagaagctatataagtgtaaagtgtgctcgaagtcttacgctagaagcagcaacctgatcatgcatcagcgggttcacaccggcgagaaaccttacaagtgcaaggagtgcggaaaagtgtttagcaggagctcctgtctgactcaacaccggaagattcacactggggaaaatttgtataagtgtaaggtgtgtgccaaaccattcacctgctttagcaacctgattgtccatgaaagaatccacaccggcgagaagccctataaatgcaaagaatgcggcaaagctttcccatactctagccatctgatccgtcaccacaggattcataccggcgagaaaccttataagtgcaaagcctgctcaaagagtttcagcgattcctcagggctcacagtccatcgcaggacacataccggcgagaaaccatacacgtgtaaagaatgtgggaaagcattttcctatagttcagacgtgattcagcaccggcgcatccacaccgggcaaagaccatataagtgtgaagagtgtggcaaggccttcaactataggagctacctgaccacacatcaacgctcacacaccggggagaggccctataaatgcgaagaatgcggtaaggctttcaattctcgaagttacctgaccactcatcggcggcgacataccggggaaaggccgtacaaatgcgacgagtgcggtaaagccttctcttaccggtcttacctgaccacccatcggcgctcgcactcaggtgagcgaccgtataagtgcgaggaatgtggcaaggccttcaactccaggagttatttaattgctcaccagaggtcccatactagggaaaaattgtag

SEQ ID NO: 141289 - DNA, 840 bp, synthetic construct
  misc_feature 1..840: note = Description of Artificial Sequence: Synthetic coding sequence
  source 1..840: mol_type = other DNA
atgggcctgctcacgttccgtgacgtggcagtcgaattcagcctggaggaatgggagcacctcgagccagcgcagaagaacctgtaccaagacgtcatgttggagaattatcggaacctggtgagcctgggtctcgtggtaagtaagcctgatctcctaaccgaacactgcaccgaagctagcttccagaaggtgattagtcgaaggcacggctcctgtgacttagaaaacttacacctgaggaagcggtggaaacgcgaggaatgtgaaggacacaacggttgttatgacgagaagaccttcaagtatgaccaatttgacgaatcctcagttgaaagtctgttccaccagcagatcttatctagctgtgccaaatcttataatttcgaccagtatcgaaaagtattcacacatagttccttactcaaccaacaagaggagattgatatttggggcaagcatcatatatatgataaaaccagcgtactgttcagacaggtgtccacgttaaattcataccgtaatgtctttattggagagaagaattaccactgtaacaatagcgagaagacgctcaatcagtccagctctcccaagaatcatcaggagaactattttctggagaagcaatacaagtgcaaggaatttgaggaggtcttcttacaatctatgcacggacaggagaagcaggagcagtcttacaaatgtaacaaatgtgtcgaagtctgtacacaaagcttgaaacacatacaacaccagacaatccacataagggaaaacagctactcctataataagtatgacaaagacttaagccagagcagcaacttgagaaaatag

SEQ ID NO: 141290 - DNA, 2892 bp, synthetic construct
  misc_feature 1..2892: note = Description of Artificial Sequence: Synthetic coding sequence
  source 1..2892: mol_type = other DNA
atggcaaccgctgccgagactagtgcttctgagcccgaagctgagtctaaagccggacccaaagccgacggcgaggaggacgaggtgaaggcggcaagaacaaggcggaaagtgctttctcgggcggtcgccgcagccacttataagaccatggggccagcctgggaccagcaggaggaaggcgtgtctgaatccgatggtgatgagtacgctatggcctcctcagccgaatccagtcccggggaatatgaatgggaatatgacgaggaagaggagaaaaaccagctggaaatcgagcgcctcgaagaacagttatccatcaatgtatacgattataactgccatgttgacctcatccggctcttgcgtctggaaggggagttaactaaggtgcggatggctcggcaaaagatgtctgaaatcttccctctgaccgaggaattgtggctggagtggctgcacgacgagatcagtatggcgcaggacgggctcgatcgagagcacgtgtatgatctgttcgagaaggctgtgaaagactatatttgccccaacatctggcttgagtacggacagtactccgttggtggcattggccagaaggggggcctcgagaaggtccgctccgtcttcgagcgtgcactgtcttcagtgggattgcatatgaccaaggggctggcgctttgggaagcctaccgagaatttgaaagtgctatcgtagaggctgcacgccttgagaaggtccatagtctgtttagacgccaactggccatacccctgtatgacatggaagctacttttgccgaatatgaggagtggagtgaggaccccattcctgagtcagttatccagaattacaacaaagctctgcagcagctggagaaatataaaccttacgaggaagccctgctgcaggccgaagctcctagactggcagagtatcaggcttacatcgattttgagatgaaaatcggggaccctgccagaatccagctgatttttgagcgtgctctggtggagaactgcctggtgcccgacttatggatcaggtactcccagtatctcgatcgccagctgaaagttaaggacctagtactcagcgtgcacaatcgcgcaattagaaattgtccatggacagtggcgttgtggtcccggtatctcctggcgatggaaagacacggagttgatcaccaggtcatatctgtcacattcgagaaagcactgaatgccgggttcatccaggccacggattacgttgaaatttggcaggcttacctcgactacctgaggcgtcgggttgactttaagcaggatagttctaaggagctggaggagctgcgcgccgctttcaccagggccctggaatacctcaaacaggaggttgaggaacgattcaacgagtcaggggacccctcttgcgtcatcatgcagaattgggctaggatcgaggcacggctgtgcaacaatatgcagaaggcacgagaactctgggactccatcatgacccggggcaatgcaaaatacgcaaacatgtggctagaatattacaatctagagcgggcccatggcgatacccagcactgccggaaggctctgcatcgtgccgtacagtgtacttctgactatccagaacacgtgtgtgaggttctgctgacgatggagcgaaccgagggatcactcgaggattgggacatcgccgtgcagaaaactgagacgcgcttagccagggttaacgaacaacggatgaaagcggcagaaaaggaggccgcactggttcagcaagaggaagaaaaggccgagcagcgcaagcgggcaagggcagagaagaaggccctcaaaaaaaaaaagaagataagaggtcctgaaaagcgtggtgccgacgaagacgacgaaaaggaatggggtgacgatgaagaggagcaacctagcaagaggagaagagtggaaaattccataccggccgctggggagacacagaatgtggaagtagccgctggaccagccggcaaatgtgccgctgtggacgttgagccaccctccaagcagaaggagaaggctgctagcctgaaacgtgatatgccaaaagtcctccacgattcaagcaaggattccataacagtttttgtgagcaacctcccatatagcatgcaagaacccgatacaaaactgagaccactgttcgaggcgtgtggtgaggttgtgcagatccgcccaatcttctccaatcgcggtgatttccggggttattgctatgtggagtttaaagaggagaagtcagcactgcaggccctggagatggataggaagtccgtcgagggtcgccccatgtttgtttccccttgcgttgacaagtcaaaaaacccagactttaaggtttttcggtattcaaccagcctggagaaacataagctgttcatctctgggctgcctttttcatgtactaaggaagagcttgaagagatttgtaaagctcatggcactgtgaaagacctgagactcgttacaaacagggccgggaagccaaagggcctggcatacgttgaatatgagaatgaaagccaggctagccaagccgttatgaaaatggacggaatgactattaaggagaatatcataaaagtggctatctccaatcctccacagagaaaggttcctgaaaagcccgagacacgcaaggcaccaggaggtcccatgctgctgcctcagacatatggtgcccgtggtaaaggccggactcagcttagtcttctgcctcgggcccttcagcggcctagcgcagcggctcctcaggcagagaacggacccgccgcagctccagccgtagccgcccccgcagccaccgaggctcccaaaatgagtaatgccgatttcgctaaactgtttctgaggaagtag

SEQ ID NO: 141291 - DNA, 1077 bp, synthetic construct
  misc_feature 1..1077: note = Description of Artificial Sequence: Synthetic coding sequence
  source 1..1077: mol_type = other DNA
atggacgcaaagagcttgactgcttggtctaggaccctggttacgttcaaggacgtattcgtggacttcacccgcgaagagtggaagttgctcgatactgctcagcaaattgtgtatagaaacgtgatgctggaaaactacaagaacctggtatctctcgggtaccagctgaccaagcctgacgtgattcttagactggagaaaggggaggaaccctggctggtagagcgagagattcatcaggagacacatccagacagtgagaccgcattcgaaattaaaagttcagttagctcccgatcgatcttcaaagacaagcagagttgtgatatcaagatggaggggatggcgcgcaacgatttgtggtatctttctcttgaagaggtctggaagtgtcgggaccaactcgataagtatcaagagaatcctgaacgccacctgagcattccgcgggtactttcccttccagccagacatacgaaactaaccgtgggcatggccacaagagtgaggaccgcaagtatttgggtgcctccactccaagagaggaacagcagttgggaccgtattcggaaattgcagggtcaggaatcaatcctcgggcaggggacacctggcctccagcccttacccgggacgccacgtcaaaaacagaaaagtaggaggatagaaaaggtgctggaatggctctttataagccaagagcagccaaaaattactaagtcctggggaccgctctcgttcatggatgtattcgtggacttcacctgggaggagtggcagctgctggacccagcacaaaaatgcctgtatcggtcagtaatgctagagaattattccaatctcgtctccttaggttaccagcacaccaagcccgatattattttcaagttggagcagggggaggagctgtgcatggtacaggcacaggtgccaaatcagacgtgcccaatactcaaagccggtaagtctaaggccaaggttttagctggcttagtcagtggggaaggcctgctttgcgcttcaaagatgactccgtgctgttgtattctctggcgccattccttggagaattag

SEQ ID NO: 141292 - DNA, 504 bp, synthetic construct
  misc_feature 1..504: note = Description of Artificial Sequence: Synthetic coding sequence
  source 1..504: mol_type = other DNA
atggctacccgagtccggactgcgagtatatgggtgccaccattacaggaacgcaattcctcctgggaccgcatccggaagctgcagggacaggagtccatcttaggacaaggcacccccggcttgcagcctctgcccgggacgcctcggcaaaagcagaagtctagaagaattgagaaagtcctggagtggttgttcatctctcaggagcagccaaagatcacaaagtcctgggggacaaatactccgaacctgatatcgtcctcaagctggaacaaagaaaagtcatgcgtatggtgcaggccaaagtttcaaatcagaccagtccaaacccaaagcggcaaactaatgatactctggatcggcatccgcaagataaagaccagttgggaggttcgccaaaaagcgctgaacgccctccatttagaaaattacgtttttctggtgcagagcatcttccaagacaaaaacttgatcaatgtggccaggatggaacgggtgtag

SEQ ID NO: 141293 - DNA, 2361 bp, synthetic construct
  misc_feature 1..2361: note = Description of Artificial Sequence: Synthetic coding sequence
  source 1..2361: mol_type = other DNA
atggactggcaccaggaaaataaggacaaactgggatccacagctaagagcttcgagtgtacaactttcggtaaactgtgtctgctaagcacaaagtatttgagtcggcaaaagccccataaatgtgggactcacggcaaatcccttaaatatatcgactttactagcgattatgctagaaacaatccaaatggatttcaggttcatggaaaaagtttctttcattccaaacatgagcagaccgtaataggtatcaaatactgcgagtccatcgaatccggtaagaccgtcaataagaaatcacagctgatgtgccagcaaatgtatatgggggaaaaacccttcggttgctcctgctgtgagaaagcattctctagtaaatcttacctgctggtccatcagcagacacacgccgaggagaagccgtacgggtgtaatgaatgcggaaaagacttctcatccaaaagctacctaatcgtccatcagcgaattcatacgggggagaagctacatgagtgtagtgaatgcagaaaaaccttctctttccattcccagctcgtcattcaccaaaggatccataccggtgagaatccctacgaatgttgcgaatgtgggaaagtgttttcgaggaaggaccagctcgttagccatcagaaaacgcattcaggccagaaaccctatgtctgcaacgaatgcgggaaggccttcggcttgaaaagtcagctgataatacacgaacgaatccacacaggagagaagccttacgaatgtaacgagtgccaaaaggcattcaacactaagtcaaacctgatggtgcaccaaagaacccatacaggagaaaaaccttacgtctgttctgactgtggtaaagcttttaccttcaaatcgcaactgatcgtacaccagggaattcacactggcgtgaagccctatggctgcatacaatgcggaaagggattctctcttaagagccagctcatagtccatcagcgctcccatacaggcatgaaaccgtacgtctgtaacgagtgtgggaaagcattcaggtctaaatcatatttaataattcacaccagaacccacacaggtgaaaagctgcacgaatgcaataactgcgggaaggcctttagctttaagagccaactgattattcatcagcgcatacacactggcgagaacccttatgagtgtcacgagtgtggtaaggctttcagccgaaaataccagctgattagtcatcagaggacccatgccggggagaaaccctatgagtgtactgattgcgggaaggcgttcgggctgaagagccagcttattatacaccagagaactcataccggtgaaaagcctttcgaatgctcagaatgccagaaggcttttaatacgaaaagcaatttgatcgtgcaccaacggactcacacaggcgaaaagccttactcttgcaatgaatgcgggaaggccttcacctttaagtcgcagttgatcgtacacaagggtgtccatacaggggtgaagccttacggctgcagccagtgcgctaaaacattcagcctgaaatcacagctcatcgttcaccagcggtcccacaccggcgtgaagccctacgggtgctctgaatgcggaaaggccttcaggagcaaatcttatctcatcatccatatgaggactcacacaggagagaaaccacatgaatgccgggagtgtggaaaatcattttcctttaatagccagctgatagtgcaccagagaattcataccggggaaaatccctacgagtgcagcgagtgcgggaaggctttcaacagaaaggaccagctcatctcgcatcaacgtactcacgctggggagaaaccatacggatgttcggagtgcggtaaagctttctccagcaagagttatttaatcatccacatgcgcacccactctggcgagaagccctacgagtgcaatgagtgtggaaaagcatttatttggaaaagcttactcatcgtgcatgaaagaacccatgctggagtgaatccctataaatgtagccagtgtgagaaaagttttagcgggaaactgcggctgctagtgcatcaacggatgcacaccagggagaagccttacgaatgtagcgagtgtgggaaggctttcatacgcaacagccagttaattgtacatcagcggacccacagtggagagaaaccatacggttgcaacgaatgtgggaagaccttctcgcagaagtccatacttagcgcacaccaaaggacacataccggagaaaaaccatgtaagtgtacagagtgcggcaaggccttctgttggaagtcacagctgatcatgcatcagcggactcacgtggacgacaagcactag

SEQ ID NO: 141294 - DNA, 2844 bp, synthetic construct
  misc_feature 1..2844: note = Description of Artificial Sequence: Synthetic coding sequence
  source 1..2844: mol_type = other DNA
atggctacaagagtgcgtactgcatcaatctgggtgcctcctttacaggagcgaaactccagttgggatcgcatcaggaaattgcaggggcaggagagtattctgggacagggtactccaggactgcagcccctgcctgggaccccccggcagaaacagaagtcccgtaggatcgaaaaagtgcttgaatggctgtttattagccaggagcaaccgaagatcaccaaatcgtggggaccactgtcgtttatggacgtcttcgtggattttacatgggaagagtggcagctcctggatcctgcccaaaagtgtctgtaccgaagcgtcatgctagaaaactactccaacctggtctctctcggataccagcatacgaagcccgatattatttttaagctcgagcagggcgaggaactctgtatggtccaagcccaagtccctaatcagacctgtccaaacaccgtatggaagatcgacgacttgatggactggcaccaggagaataaagataaactgggcagcaccgccaaaagctttgagtgtaccacttttggtaagctgtgcctgttatcgactaagtatctgtctcggcagaagccacacaagtgcggtactcacggaaagagtttgaaatatattgacttcacctctgattatgcccggaacaatccaaatgggttccaagtccatggtaaatcgttttttcacagtaaacatgagcaaaccgtgatcgggatcaaatactgtgagagcatcgaatccggcaaaaccgtgaataaaaagagccagctcatgtgtcagcagatgtacatgggtgaaaaaccttttgggtgctcttgttgtgagaaagcgtttagtagtaagtcttaccttctcgtgcatcagcagacacacgctgaagaaaagccatacggatgtaacgagtgcggtaaggactttagcagcaaaagctacctcattgtgcaccagcgtattcatactggcgaaaaactgcacgagtgctccgagtgtaggaagacattttccttccactctcagctggtgattcatcaaagaatacataccggtgaaaatccttacgaatgttgcgaatgtggaaaggtgtttagtcgaaaggatcagctggtttcccatcagaaaactcattccgggcaaaagccatacgtgtgcaatgaatgtggcaaggcctttgggctgaagtctcagctaatcatacacgaacgcatacatacaggagaaaagccatatgaatgtaatgagtgccagaaggcttttaacaccaaaagcaatctgatggtgcatcagaggacacacaccggtgagaagccttatgtgtgcagcgactgcggcaaggctttcacgttcaagtcccagctgattgtccatcagggaatacacactggagtgaaaccctatggatgcatccagtgtggtaaaggcttcagcctgaaatcccagctgatcgtacatcagaggagccacaccggaatgaagccgtacgtctgcaatgaatgcggcaaagccttcagatctaagagctaccttatcatacatacacggacccacacaggtgagaagctccatgaatgcaacaactgtggcaaggctttcagcttcaagtctcaacttattatccaccagcggattcacacaggcgagaatccgtatgaatgccacgaatgtggcaaagcattctcccgcaaatatcagttgatctcacatcaacgaacccatgctggagagaaaccctacgagtgtacagattgcggtaaggcctttgggcttaaatctcagctcatcatacaccagaggacccatacgggtgaaaagcccttcgagtgttcagaatgccagaaggcttttaacactaagtccaatttgattgtccatcaaaggacacatactggtgagaaaccctactcttgcaacgagtgcggaaaagcctttacattcaagtcgcagttaattgtccataagggcgtgcatacaggcgtaaaaccgtacggatgcagtcagtgcgccaagacgttcagcttaaagtcccaactgatcgttcatcagcgcagccacacaggcgtgaagccctacggctgcagcgagtgtggtaaggcattcaggagcaaaagctacctcattatccatatgcgcacccacaccggggagaaaccccatgaatgccgcgaatgcggaaaaagtttctcattcaatagccagttaatcgtccaccagcgcattcacaccggcgaaaatccttacgagtgtagtgagtgcggcaaggcttttaatagaaaggatcaactgatctcccatcagaggacccacgctggcgaaaaaccctatggatgttcggaatgtgggaaggctttctcttcaaaatcttacttgataatacatatgcggacccacagtggggagaaaccttatgaatgtaacgagtgtggcaaggccttcatctggaaatctctcctgatcgttcatgaacgtacccacgcaggcgtgaacccttacaaatgctctcaatgtgagaagagtttctctggaaagcttcgcctgctcgtgcaccagcggatgcacacacgcgaaaagccttacgaatgctctgaatgcggaaaggcgttcatccgtaattctcagttgatagtgcaccaacgcacccattccggggagaaaccctacggatgcaacgagtgtggaaaaaccttctcacagaaatctatcctgtccgcccatcagcggactcatactggcgagaagccttgtaagtgcaccgaatgtggtaaagccttctgctggaaatcacaactgatcatgcaccagcgcacccacgttgatgataagcactag

SEQ ID NO: 141295 - DNA, 2193 bp, synthetic construct
  misc_feature 1..2193: note = Description of Artificial Sequence: Synthetic coding sequence
  source 1..2193: mol_type = other DNA
atggattggcatcaggaaaacaaagacaagctgggcagtaccgccaaaagcttcgagtgcaccaccttcgggaagctgtgtctgctgtctaccaagtacctatcccggcagaaacctcacaagtgcgggacacacggcaagtccctcaagtatattgacttcacttctgattatgccagaaacaatccaaacggatttcaagtgcacggtaagtccttttttcactcaaagcacgaacagacggtcatcggcataaaatactgcgagtccatcgaaagtgggaagacagtcaataagaagtcccaactcatgtgccagcagatgtacatgggcgagaagccttttggctgcagttgctgcgagaaggccttttcttctaaatcctatctgctggtccatcagcagacccacgccgaggaaaagccatacggttgcaacgagtgtggcaaggatttcagctccaagtcatatttaattgtgcaccaacgcattcacaccggggagaagctccatgaatgctcagagtgtcgaaagacgttcagctttcattcgcaattagtcatccatcagcgtatacacacaggggagaacccttatgagtgctgtgagtgcggcaaggtgttttctcgcaaggatcagcttgtgtcccatcagaaaacccactctgggcagaaaccttatgtttgtaatgaatgtggcaaggcctttggtctaaaatcacagcttatcattcatgagaggattcacaccggagaaaagccgtacgaatgcaacgagtgtcagaaggcctttaacacaaaatcaaacctcatggtacaccagagaactcacacgggagagaagccttacgtctgctcagactgtggcaaggcctttacattcaagagccagttaattgtccaccaggggattcatacgggtgtgaaaccctacggttgcatccagtgtgggaaggggttctcgctgaagtctcagctgattgttcaccagcgatcacacacaggtatgaagccgtacgtatgtaatgagtgtggtaaagcttttagaagcaagagttacttaataattcacactcgcactcacacaggggagaagctgcatgagtgcaacaactgtggaaaagctttctctttcaaatcccaacttattatccaccagaggattcacacaggagagaatccttatgagtgccacgagtgcgggaaggctttttctaggaagtaccagctgatctcccaccagcgaacacacgccggcgaaaagccatatgagtgcacagattgcggcaaggctttcgggctgaagtctcagctgatcattcaccaaaggacccataccggcgagaaacccttcgagtgcagtgagtgtcagaaagcttttaacaccaagtccaacctcattgtccatcagagaacacacactggagagaagccatactcatgcaacgagtgcgggaaggctttcaccttcaagagccagctaatcgtccataagggggtgcacactggcgttaaaccctacggatgtagccagtgcgcaaaaacattttctctgaagagccaactgatagtgcaccaacgttcccatacaggggtaaagccatacggctgttccgaatgtgggaaggcctttcgttcaaagtcatatctcatcatccatatgcggacacacacgggcgagaagccacacgagtgcagagagtgcggtaagagcttctctttcaactcacagcttattgtgcaccaacggattcataccggtgagaacccatatgaatgcagtgaatgtggcaaggccttcaacaggaaagaccagctgatttcgcatcagagaacacatgcaggtgagaaaccatatggctgcagcgagtgtggcaaggccttctcatccaaatcatacttgataattcatatgagaacacacagcggtgagaagccttacgagtgcaacgaatgtggcaaagcgttcatctggaagagtcttctgatcgttcacgagcggacgcatgcaggagtcaatccctacaaatgttcacaatgcgaaaaatctttttctggtaagctgagactcctcgtacatcagagaatgcatacaagagagaagccgtacgaatgtacagaatgtggaaaagctttctgctggaaatcccagctgattatgcaccagagaacacacgtcgacgataaacattag

SEQ ID NO: 141296 - DNA, 303 bp, synthetic construct
  misc_feature 1..303: note = Description of Artificial Sequence: Synthetic coding sequence
  source 1..303: mol_type = other DNA
atggcaacccgagttcggactgcttccatctggggtacgaatacaccaaacttaatttctagctcctcttggaataaagaaaagtcatgtgtgtggtgtcggccaaagtttcagattaggccagtgcaaactcagagtggaaaactgatgatcctgtggattggaatccgcaaaatcaagacctcatgggaggtgcgccaaaaagctctgaatgctcttcacctcgagaactatgttttcctggtacagtctatattccaggacaaaaatctgatcaacgtggcaaggatggagagggtttag

SEQ ID NO: 141297 - DNA, 381 bp, synthetic construct
  misc_feature 1..381: note = Description of Artificial Sequence: Synthetic coding sequence
  source 1..381: mol_type = other DNA
atggccaccagagtgcgcacagcctccatctgggggcccctgagcttcatggacgtgttcgtcgatttcacatgggaagagtggcagctgcttgaccctgcccaaaaatgcctgtataggagcgtgatgcttgaaaactactcaaacctcgtcagcctgggatatcagcatacgaagcctgacattattttcaagctagagcaaggggaggagctttgtatggtgcaggcccaagttcctaatcagacctgccccattttgaaagcaggcaaatctaaagccaaagtgctcgcagggctggtcagcggggagggccttctgtgtgcctcaaaaatgactccatgctgctgcatcttatggaggcattcccttgaaaactag

SEQ ID NO: 141298 - DNA, 207 bp, synthetic construct
  misc_feature 1..207: note = Description of Artificial Sequence: Synthetic coding sequence
  source 1..207: mol_type = other DNA
atggccaccagggtcagaaccgcaagcatatggactcagagtggcaaactgatgattttatggattgggatccgcaagatcaagacaagttgggaggtgcgccagaaggccttgaacgccctgcacctggagaactacgtcttcctcgtgcagagcattttccaggacaagaatctaattaatgtggcccggatggaacgcgtgtag

SEQ ID NO: 141299 - DNA, 504 bp, synthetic construct
  misc_feature 1..504: note = Description of Artificial Sequence: Synthetic coding sequence
  source 1..504: mol_type = other DNA
atggctacgagggtgcggacggcctcaatctgggtccctcccctgcaggagaggaactcatcgtgggaccggatccggaaactccagggccaggaaagcatactgggacagggaaccccgggcctccagccattgccaggtacccctcgtcagaagcagaagtcaaggaggattgagaaagtcttagagtggctcttcattagccaggagcaacccaaaatcacaaagtcttgggggactaatactccaaacttgatttccagctcttcttggaataaggagaagtcatgcgtatggtgccgacctaaatttcaaatacggccagtgcagacccagagtggcaagttaatgattctctggattggcatccggaagatcaagacatcctgggaggttcgtcaaaaggcactgaatgcgctgcatcttgagaactatgtcttccttgtgcagtcgatctttcaggacaagaatctgatcaatgtcgcccggatggagagagtgtag

SEQ ID NO: 141300 - DNA, 381 bp, synthetic construct
  misc_feature 1..381: note = Description of Artificial Sequence: Synthetic coding sequence
  source 1..381: mol_type = other DNA
atggccacacgcgtgaggaccgcttcaatatggggaccccttagtttcatggatgtgtttgtggactttacctgggaagaatggcaactgttggatcccgcccagaagtgcttataccgctctgtgatgctggagaattatagcaatcttgtgagcctagggtaccagcatacaaagcccgacatcatcttcaagctcgagcagggtgaggagctttgtatggttcaggcacaggtacctaatcagacctgcccaattctcaaagctggtaaaagtaaggccaaagtcttggccggtctggtgagcggggaagggctcctttgtgcgtctaagatgaccccctgctgctgcattctgtggcggcattccctggagaactag

SEQ ID NO: 141301 - DNA, 1959 bp, synthetic construct
  misc_feature 1..1959: note = Description of Artificial Sequence: Synthetic coding sequence
  source 1..1959: mol_type = other DNA
atggcgtcacgcctgccaactgcttggtcctgtgagcccgtgaccttcgaggatgtgacgctcggattcactcctgaagaatggggtctattagacctcaagcaaaaatccctgtatcgggaggtgatgcttgagaactatagaaatctcgtgtccgtggagcaccagctgtccaagcctgatgtcgtatcccaactggaggaggctgaggatttctggccggtcgaacgcggcattccccaggacactattcctgagtatcctgaattacaattggatcctaaactggaccctctgcccgcagaatcccctttaatgaacatcgaagtggtggaggtgctgaccctgaatcaggaggtagccggacctcgcaacgcccaaatacaggccctctacgcggaagatgggtcactgagcgcagacgctccgtctgaacaggtccagcaacagggaaagcacccaggggacccagaggctgcccgacaacggtttcgacaattcagatataaagacatgaccgggccacgggagttggatcaacttcgcgagctctgtcaccagtggttgcagcccaaagccagatctaaagagcagatcttggagctcctggtactggaacaattcctgggcgcgctcccagtgaaattgagaacttgggtagaatctcagcaccctgagaattgtcaggaggtggtggctctcgtggaaggtgtcacctggatgtcagaggaagaggtgctgcccgcaggccaacccgctgaaggaacaacctgttgccttgaggtgactgctcagcaagaggagaagcaggaagacgccgctatctgccctgttacggtgctacccgaggagcccgtgactttccaagacgtcgcagtcgacttttctagggaagaatggggactgttaggccccacacaaaggaccgagtatagggacgtcatgctggagacgttcggccacttggtgtccgtgggctgggagacaaccctggagaataaggagcttgcccccaactccgacattcctgaagaggaaccagcgccgagcctgaaggtgcaagagtcgtcccgcgattgcgccctgagcagtactctggaggacacactgcagggaggtgtccaagaagtccaggacacagtgctgaaacagatggagagcgctcaggaaaaggacctgccccagaagaaacatttcgataatcgggagagccaggctaatagcggcgctctggacactaaccaggtatctctgcaaaaaattgacaatcctgaatctcaagccaatagtggtgcacttgatacaaatcaggtgttacttcataagattcccccccgcaaaaggttgcgaaagagggattctcaggtaaaatcaatgaagcataactctcgcgtgaagattcaccagaaaagctgcgaaaggcagaaggcaaaggaagggaatgggtgtaggaagaccttttccaggtccactaagcagatcacttttattaggattcacaagggttctcaggtgtgtaggtgttccgagtgtgggaaaatatttcggaatccaaggtatttttcggtccacaagaaaatccatactggggaaaggccatatgtgtgccaagactgtggcaaaggttttgtgcagtccagcagtcttactcagcaccaaagggtacacagtggcgagagaccgttcgaatgccaggaatgcggtaggacttttaatgacagaagtgccatcagccagcatctgcgcacacacaccggtgcaaagccttacaaatgccaagactgcggcaaagcgttcagacaatctagccatctgatacgccaccagaggacccatacaggggaacggccttatgcttgcaataagtgcggcaaggcgtttacgcagtccagccacctgatcggccaccaaagaactcataatcggaccaaaaggaagaagaagcagccgaccagctag

SEQ ID NO: 141302 - DNA, 1863 bp, synthetic construct
  misc_feature 1..1863: note = Description of Artificial Sequence: Synthetic coding sequence
  source 1..1863: mol_type = other DNA
atggccagtcggctacccacagcctggtcttgtgagccggttacattcgaggatgtgacacttggctttacccctgaagagtggggcctgctggatctcaaacagaagtctctgtatagggaggtaatgttggagaattaccggaacctggtgtctgtcgaatatccagaactgcagttagatccaaaactcgacccgctgcctgctgagtccccactgatgaatattgaggttgtggaggtcctaacactgaatcaagaggtggctggtccaaggaacgcacagatccaagcattatatgccgaagatggttccttaagtgcagatgctcccagtgagcaggtgcaacagcagggaaaacaccccggagacccagaggcagcccgacagagattcaggcagtttaggtacaaagacatgacagggcctcgtgagctggaccaactacgcgaactttgtcaccagtggttacagccgaaagcgagaagtaaagagcaaattttggaacttcttgttctggaacagtttctgggagcgttgcccgttaaactgagaacatgggttgagtctcaacacccagagaattgtcaagaagtggtagccctcgtggagggggtcacgtggatgtccgaagaggaggtgctgcccgccggacagccagccgaagggacgacatgctgtttagaagtcactgcccagcaggaagagaagcaggaggatgctgctatttgcccagtaacggtattaccggaggagccagtcacatttcaggacgtggccgtggacttcagccgtgaggagtggggtctcctgggtccaacacagcgtactgagtatcgcgacgttatgctggagacattcggtcatcttgtgtcagttggctgggagactacgctggagaataaggagctggctcccaatagcgacatcccagaggaagagcctgctccttcacttaaggtgcaggagagctcaagagattgcgccctttctagcaccttggaggatacgctgcaggggggcgtgcaagaagtgcaagacaccgtgctcaagcaaatggagagtgcacaggaaaaagacttaccccagaagaagcactttgataacagagagagtcaagctaattctggtgccctagataccaaccaggtgtcactccagaagatagataatcctgaaagtcaggccaacagcggtgcactggatacaaatcaggtactgctacacaagataccaccccgcaagcgactccgtaaacgggattcgcaggtgaagagcatgaagcacaacagcagagtcaaaattcaccagaagtcgtgtgagcggcagaaggcaaaggagggcaacgggtgtcgaaagacgttctcccgcagcaccaaacaaatcactttcattcgcattcacaaagggtcacaggtctgcaggtgcagcgaatgcggtaaaatcttccgcaatccgaggtacttctctgttcataaaaaaatacacacaggtgaacgtccctatgtttgtcaggactgtggcaagggatttgtgcagagttcttcactcacacagcaccagagggtgcactctggtgagcgcccattcgaatgtcaagagtgcggccggacgttcaacgaccgcagtgctatatcacaacatttgcggactcatacaggagcaaaaccatataagtgccaagactgtgggaaagcctttcggcagtctagccacctaataaggcatcagcgcacccacaccggagagcgcccatatgcttgcaataaatgcggcaaggctttcacccaaagcagccacttaataggccaccagcgcacacacaacagaacaaaacgaaagaagaagcagcctacatcttag

SEQ ID NO: 141303 - DNA, 1644 bp, synthetic construct
  misc_feature 1..1644: note = Description of Artificial Sequence: Synthetic coding sequence
  source 1..1644: mol_type = other DNA
atgaacattgaagtcgtggaggtgttaactctgaatcaggaagtggctggacctcggaatgcccagattcaggccttgtacgccgaggatggaagtctctctgctgatgcgcctagcgaacaggtgcagcaacagggaaaacatcccggagatccagaggctgctagacagaggttcaggcagtttagatacaaagacatgactggccccagggagctcgatcagctcagagagctgtgtcaccagtggttacagcccaaggccagatctaaggaacagatcctcgagttattggtactggagcagttcctgggcgcattaccggtcaaactccgcacatgggtggagagccagcacccagagaattgccaagaagtcgtggcactcgttgagggggtgacatggatgagcgaagaggaggtcctccctgcaggccagcctgcagagggaacaacctgctgccttgaggtcactgcccagcaggaggagaagcaggaggacgcagccatctgccctgtgacagtgctgcccgaggaaccagtaacatttcaggatgtggcggtcgatttctctagggaggagtggggcctgctggggcccacacagcgcaccgaatatcgtgatgtcatgctggaaacgttcgggcacttagtgtctgtgggttgggaaaccacattagagaacaaagaactggcacccaactccgacattccagaggaggagcctgcaccgagcctaaaagtccaggaaagtagcagagattgtgccctctctagcacgttggaagatacacttcagggtggcgtgcaggaggtccaggatacggtgttaaaacagatggagagtgcgcaggagaaagacctaccccaaaaaaaacactttgataacagggaaagtcaggccaatagtggggcactggataccaaccaagtgagtcttcaaaagatcgacaaccccgaatctcaggctaacagcggcgcactcgataccaatcaggtcttactgcataagattcctcccagaaagcggttaagaaagagagattcccaggtcaaatcaatgaagcataatagtagggtcaagatacatcaaaagtcttgtgaacgacaaaaagcaaaggagggcaacggatgccgcaagactttctcaagatctactaagcagatcacttttatcagaatacacaaagggtctcaggtgtgcaggtgttccgagtgcggaaaaattttccggaatccacggtatttctccgttcataagaagatccacaccggtgagcgaccttatgtgtgccaagattgcgggaaaggtttcgtccaaagctcttcactgactcagcaccagcgcgtgcactcaggagagaggccatttgaatgccaagaatgcgggaggaccttcaatgatcgcagcgccatttcacagcacttacgcactcacacgggggccaagccctacaaatgccaggattgtgggaaggcattccggcaatcttcacacctcatccgccaccagagaactcatacaggggagcgcccgtatgcttgtaataaatgcggaaaggcttttacacagagtagccatctgatcggccaccaacggacccataaccggaccaagcgaaaaaagaagcagcccacctcatag

SEQ ID NO: 141304 - DNA, 1353 bp, synthetic construct
  misc_feature 1..1353: note = Description of Artificial Sequence: Synthetic coding sequence
  source 1..1353: mol_type = other DNA
atggcggcttctaaaactcagggagctgtggctcggatgcaagaagaccgggacggcagttgtagcaccgtgggaggcgtgggctatggggactcaaaggactgcatactcgagcctttgtcactccctgagagcccaggaggcacaaccacgctcgaagggtctccgtcggtgccgtgcatcttctgtgaggagcactttcccgtcgctgaacaagataagctcctgaagcacatgatcattgaacacaagattgtgattgcagacgttaagctggttgccgacttccaaaggtacattttatattggcgcaaacgctttactgagcagccaatcactgacttttgttctgtcattcgcataaatagcacggcaccatttgaagaacaagagaactacttcctcctgtgcgacgtcctgccagaggatagaatcctgcgggaggaactgcagaaacaaagactccgggaaatcctggagcaacagcagcaggaaaggaacgacactaacttccatggtgtctgcatgttctgcaatgaggagttcttgggcaaccggtctgttatactgaatcacatggccagggagcatgccttcaatatcgggcttcccgacaacatcgtcaattgcaatgaatttctgtgtactttgcagaagaaacttgataacctgcagtgtctttattgcgaaaagacatttcgggacaaaaacaccctgaaggatcacatgcgcaaaaaacagcacaggaaaataaatccaaaaaatcgagagtatgacaggttctacgtgataaactatcttgagctcggaaagtcctgggaagaggtgcaattagaggacgatagagagctgctggaccatcaggaggatgattggtcggattgggaagagcatcccgcctccgccgtgtgcctgttttgtgagaaacaggctgaaacgattgaaaaactatacgtgcacatggaggacgctcatgaatttgatctcctcaaaattaaaagtgaactgggcttgaatttctaccagcaggttaagcttgtgaacttcattcggcgtcaggtgcatcagtgcaggtgctacgggtgccacgtgaaatttaaaagcaaagcagacctgaggacccatatggaggagacaaaacacacctctttgctgcctgatagaaagacatgggaccagctggagtactactttcctacctatgaaaatgataccttgctctgcaccctgtccgactctgaatccgatctgaccgcccaggaacagaacgaaaacgtgcctattattagcgaagacacctctaagctgtatgcgctgaaacagtcatccatacttaatcagcttctcctttag

SEQ ID NO: 141305 - DNA, 873 bp, synthetic construct
  misc_feature 1..873: note = Description of Artificial Sequence: Synthetic coding sequence
  source 1..873: mol_type = other DNA
atggcggcctcaaaaacgcaaggggccgtagctcggatgcaagaagatagggacggatcctgctctactgttggaggtgtgggctacggcgactccaaagattgcatcttagaacctctgtccctgccggaaagccctggaggtacaaccacgctggaaggaagccccagtgtgccttgcattttttgcgaagagcatttcccagtcgcagaacaagacaagttgctgaaacatatgattattgagcacaaaatagtgatcgccgatgtgaagctcgttgcggatttccagcgatacatcctctattggagaaaacgatttaccgagcaacctatcactgacttctgttctgtgataagaatcaactctaccgccccttttgaggagcaggaaaactacttcctgctatgcgatgtgttaccggaggacagaatcctaagagaggagctccagaagcagcgcctgagagagattttagagcaacagcagcaagaaagaaacgacaccaatttccacggggtctgtatgttttgcaacgaggagttcctagggaacaggagtgtgatcttgaaccacatggccagggagcacgctttcaatataggcttaccagataatattgtgaactgcaatgaatttctgtgcaccttacagaaaaaattggacaaccttcagtgcctctactgtgagaagaccttcagggacaagaataccctgaaggatcacatgcgtaagaaacagcatagaaagattaatcccaagaacagggagtatgatcgattttatgtgattaactacctggtcaggttatcctttcataatctcaaatttgattgttctacagctaataagatctttctgcgtaccaattag

SEQ ID NO: 141306 - DNA, 1428 bp, synthetic construct
  misc_feature 1..1428: note = Description of Artificial Sequence: Synthetic coding sequence
  source 1..1428: mol_type = other DNA
atgagccggcgcaaagccggctcagcacccagaagagtagaaccagctccagccgccaacccggacgacgagatggaaatgcaagatcttgtcattgagctaaagccagagcccgatgcccaaccccagcaagcgccacgcctgggaccattctctccgaaagaggtgtctagtgccggacgcttcggtggagaaccccatcattccccggggcccatgcccgcgggagccgcactcctggcactgggcccaaggaatccgtggacactgtggacacctctgactccaaactatcccgatcgacagccttggaccgataagcatcctgatctgctgacgtgcgggaggtgtctccagacctttcctctagaagctatcaccgctttcatggaccacaaaaaacttggctgccagttgtttagaggtccatcccgcggacaagggagtgagagagaggaacttaaagcgctgtcctgcctgcggtgcggtaagcagttcaccgtggcatggaagctcttacgtcacgcacagtgggatcacggcctcagtatctaccaaacagagagtgaagcaccagaggcgcccctgctagggctcgctgaggtagctgccgccgtgtcagctgttgtgggacccgctgccgaggcaaagagtccaagagcttcagggtcgggtctgaccaggcgcagcccaacatgcccagtgtgtaagaaaactctgagctccttcagtaacctgaaagtgcacatgcgcagccataccggcgagcgcccttacgcctgcgaccagtgcccctatgcctgtgcccagtccagtaagctgaatcgccataagaagactcaccggcaggtgcctccccaaagtcccctgatggcggacaccagtcaggaacaagcatccgcagccccaccagagccagctgtgcacgccgctgcacctacaagtaccctgccgtgcagtgggggggagggagcgggcgctgcagccactgctggtgtccaggaacctggtgcacctggctctggcgctcaggcagggccggggggagacacttggggcgccatcactacagagcagcgcactgacccagccaactcacaaaaggcctctccaaagaagatgcctaaaagcggggggaaaagtagaggccccggtggctcatgtgaattctgtggcaagcattttacaaactcgtctaatttgaccgtccaccgaagatcacacaccggcgaacgaccatatacttgcgagttttgtaactatgcttgcgcccagtcctcaaagctcaatcgacaccgtaggatgcatgggatgactcccggcagcactcgtttcgaatgtccacattgccacgtcccattcggcttacgggcgacactggacaagcatttaaggcaaaagcaccccgaagctgccggagaggcttag

SEQ ID NO: 141307 - DNA, 1356 bp, synthetic construct
  misc_feature 1..1356: note = Description of Artificial Sequence: Synthetic coding sequence
  source 1..1356: mol_type = other DNA
atggaaatgcaagacctggtgatcgagctcaagcctgagcccgacgcccagccgcagcaggccccgcggcttggccccttctcccctaaggaggtctctagtgctggcagatttggcggagagccacatcatagtccagggcccatgcccgccggggccgccctgctcgctctgggaccccggaatccatggacactgtggactccacttactcctaattacccagacagacagccttggaccgacaaacatcctgatctcctcacctgcggccgatgcctgcagacattcccactggaagccattacggcctttatggaccacaagaagcttggttgtcaactgttccgcggcccctcacgaggacaggggtcggaaagggaggaactcaaagctctgagctgtttgagatgcgggaaacagtttacagttgcttggaagctgctgaggcacgcacagtgggatcacggcctgtctatatatcaaaccgaatctgaagctcccgaagctcctctgctgggcctcgccgaggttgccgccgctgtctctgcagtggtgggacctgcggcagaagcaaagagcccaagggcgagcggttccggtcttactaggaggtctcccacgtgtccagtgtgcaaaaagaccctgtcttcattttccaaccttaaagtgcatatgagatcccacactggtgaaaggccctacgcatgcgaccagtgcccctatgcctgcgctcagagcagcaagctgaaccggcacaagaaaactcaccgccaggtgccccctcaatctcccctcatggcagatacttcccaagagcaagcctcagcagccccgcccgagcccgcggtacacgcggccgcgcctacctcgactttgccatgtagtggtggagaaggagccggggctgccgcgaccgctggtgttcaggaacctggggctccagggtccggagcccaggccggcccaggcggagatacttggggcgccatcactacagagcagaggacggacccggcaaactcccagaaagctagccccaagaaaatgcccaagagcggcggaaaatccaggggaccgggcgggagctgcgaattttgtggcaaacacttcacaaactcctccaacctcaccgttcacagacggtcacacaccggggaaaggccgtacacctgtgaattctgtaattatgcctgtgcccaatccagcaaactgaatcggcacaggcgtatgcatggcatgacccccggttccaccaggttcgaatgtccccactgtcacgtgccatttggactgcgcgcaaccttggacaaacacctgagacagaagcatccggaagccgcaggcgaggcatag

SEQ ID NO: 141308 - DNA, 1341 bp, synthetic construct
  misc_feature 1..1341: note = Description of Artificial Sequence: Synthetic coding sequence
  source 1..1341: mol_type = other DNA
atggagacacaggctgacctcgtgtcccaggagccacaggctctccttgacagcgctctgccctcaaaagttccagcattcagcgataaagatagccttggcgacgaaatgctggctgctgctctactgaaggcaaaaagccaagaattggtaacattcgaggatgtggccgtctatttcatccgcaaagagtggaaacgtctcgaacccgcgcaacgggacctgtatcgggacgtgatgttggagaattacggaaacgttttctcactagatcgcgagactcggacggagaacgatcaagaaatatctgaagataccaggtcccatggggtgcttttgggcaggttccagaaagatatatcgcagggcctgaaatttaaagaggcctatgagcgcgaggtgagcctaaagcggcccctgggcaacagccctggcgaacggctcaacaggaaaatgcctgattttggtcaggtgaccgttgaggagaaactgaccccacggggagaaagatccgaaaagtacaacgacttcggtaacagctttactgttaacagcaatctgatttcccaccaacgcttgcctgtgggtgatagaccacacaaatgtgacgaatgttcaaagagcttcaaccggaccagcgacctcattcagcatcagcgcattcatacgggcgaaaagccctacgaatgcaacgaatgtgggaaagccttctcgcagtcatcccacctaatccagcaccaacggattcatacaggggagaagccctacgagtgttcagactgcggtaaaactttttcatgcagtagcgccctgatcttgcaccggaggatccataccggtgaaaagccttatgaatgtaacgagtgcggtaaaaccttctcttggtcatccacgttgacccaccaccagcgcattcatacaggagagaaaccttacgcgtgtaacgaatgtgggaaagcgttttctagatctagtacattgattcaccaccaacgcatccatactggagagaagccctatgaatgtaatgaatgcggcaaggcttttagccagtcaagtcacttatatcaacaccagaggatacatacaggtgaaaaaccgtacgaatgtatggaatgtggaggtaagtttacatacagttccggtctgattcaacaccaacgcatacatacgggagaaaacccttacgaatgcagtgagtgtggtaaagcctttaggtacagttccgcgctggtgagacaccagcgtatacatacaggcgagaagcccctcaacggcatcggaatgagtaagtcgagcctgcgcgttaccactgagctgaacatcagggaaagcacttag

SEQ ID NO: 141309 - DNA, 1341 bp, synthetic construct
  misc_feature 1..1341: note = Description of Artificial Sequence: Synthetic coding sequence
  source 1..1341: mol_type = other DNA
atggagactcaggccgacctagtgtcccaggaacctcaagcactgctggattcagctttacccagcaaggtgccagccttctctgataaggacagtctgggagatgagatgctggctgctgcattgttaaaggctaaatcgcaggagttagtcacatttgaagatgtcgccgtgtacttcatacggaaagagtggaagcggcttgaacccgcccagcgcgacctttaccgcgatgtaatgttagaaaactatggcaatgtgttttccttggacagggagacccggaccgaaaatgaccaagagatcagtgaggacactaggtcgcatggcgtactcctgggtaggtttcagaaagacatctctcaggggcttaaatttaaggaggcgtacgagagagaggtgagcctcaagcggccactggggaactcccctggggagcgcctcaacagaaagatgcctgatttcggtcaggtgactgttgaggaaaagctaacaccacgtggcgagcgatccgaaaaatataatgattttggcaactcttttacagtgaattccaacttgatcagccatcagcgcttgccggtgggcgacaggcctcacaagtgtgacgaatgcagtaagagctttaaccggacttccgatttgatacagcaccaaagaattcacacgggcgagaagccctatgaatgtaacgaatgtggaaaagcgttttcccagtcatcacatcttatccaacaccagagaatccataccggtgaaaagccctacgaatgttctgactgcggcaaaacattcagctgttcttctgccttgatacttcatcggagaatccacaccggagagaagccatacgagtgtaacgagtgcggcaagacattctcttggagctctacgctgacccaccaccagagaatccacacaggagagaagccatatgcctgtaacgagtgcggcaaagcctttagccgttctagtaccctcatccatcaccagcgaattcatactggcgaaaaaccatacgagtgcaacgagtgcggcaaagccttcagccaaagttcacatctgtatcagcatcagcgcatccacacgggcgagaaaccgtacgagtgcatggagtgtggcgggaaattcacctattcatctgggttgatacagcaccaacggatacatactggggagaatccgtacgaatgctctgagtgcggaaaagccttcagatacagctctgctcttgtcaggcatcagcgtattcacacgggtgagaaacctctaaatgggataggaatgagcaagtccagtctcagggttactaccgaactcaacattagagagagcacttag

SEQ ID NO: 141310 - DNA, 396 bp, synthetic construct
  misc_feature 1..396: note = Description of Artificial Sequence: Synthetic coding sequence
  source 1..396: mol_type = other DNA
atggagacacaggcagatctggtgagccaagaaccacaggccttgctggacagcgcattaccatccaaggtccctgcctttagcgataaagactctctgggggatgaaatgctcgctgcagctctgctaaaggcaaagagtcaggagctggtgacgttcgaagatgtggccgtctacttcatacggaaggagtggaagcggcttgagcctgctcagagagacctatatagagacgtcatgctcgagaactatgggaacgtcttctctctggattggatccacgtatgtttgacgacacagaaggttatgctggcatggctcacaggcaccctgtccgtggctaagggcctgtgttcaagtgaactggcaagcgttgaaccccctgacactttttag

SEQ ID NO: 141311 - DNA, 315 bp, synthetic construct
  misc_feature 1..315: note = Description of Artificial Sequence: Synthetic coding sequence
  source 1..315: mol_type = other DNA
atggagacacaggcagacctggtcagccaagagcctcaggcacttttggattccgctctgccttctaaggtccctgctttctccgacaaggatagtcttggggacgagatgctggcggcagcattgctgaaagctaaaagccaggagcttgtgactttcgaggatgttgctgtctacttcataaggaaagagtggaaacgattggagcccgctcagcgggatctgtatcgcgatgtcatgctggaaaactacgggaacgtgttctctcttgaccgggaaactagaactgaaaatgaccaggagatctctgaatag

SEQ ID NO: 141312 - DNA, 1341 bp, synthetic construct
  misc_feature 1..1341: note = Description of Artificial Sequence: Synthetic coding sequence
  source 1..1341: mol_type = other DNA
atggagacacaggcagacttggtttcacaggagccgcaggcactcttggactctgcactgccaagtaaggtacctgctttttctgacaaggacagcctcggagatgaaatgctggctgccgctctgttaaaagccaagagccaggagctggtgacgtttgaggacgtggccgtgtactttattcgtaaagaatggaagaggcttgagcccgcacagcgtgacctctatcgtgacgtcatgcttgaaaactacggtaatgttttttccttggaccgagaaaccagaaccgagaacgaccaagaaatttccgaggacacccgctctcatggcgtgctgctgggtcgatttcagaaagatatctcccagggcctcaagtttaaagaggcttatgaacgcgaggtttcgcttaagagaccacttggcaactccccaggcgaaaggttaaatcgaaaaatgcccgattttggccaggtgaccgttgaggaaaagctcactcccagaggcgaaagaagcgagaagtacaacgactttgggaatagtttcacagtcaatagcaacctgatatctcatcagcggttgccagtaggtgacaggccccacaaatgtgacgagtgcagcaaaagttttaacaggacgtctgatttaatccaacaccagcgcatacacacaggggagaagccttatgagtgcaacgagtgcggaaaggccttttctcagtcttcccacctgatccagcatcagcgcatacacaccggggaaaagccgtacgaatgttctgattgcggcaaaaccttctcctgctccagtgccctaatccttcaccggcgaatacacacaggagaaaagccatatgagtgcaatgaatgtggaaaaaccttcagctggtcttcaacactcacccaccaccagcgcatccatacaggggaaaaaccatatgcttgcaatgagtgcggaaaggctttttccagatcatcaacacttatacaccatcaacgtatccacacaggggagaagccctacgagtgtaacgagtgtgggaaggccttctctcagtcttctcacctgtaccagcaccagaggatacataccggggaaaagccttacgaatgtatggaatgcggagggaagttcacctattcgagcggcctgattcagcaccagagaatccacacgggtgaaaatccctacgagtgcagtgagtgcggcaaggcctttagatattcctctgcactcgtgcgtcatcagcggatccataccggagaaaaaccactgaacggaattggcatgtctaagtcctccttaagagtgactactgagcttaatattcgggaaagtacttag

SEQ ID NO: 141313 - DNA, 558 bp, synthetic construct
  misc_feature 1..558: note = Description of Artificial Sequence: Synthetic coding sequence
  source 1..558: mol_type = other DNA
atggaaactcaggcagatctggtctcacaggagccacaggcactgttagactccgcactccccagtaaagttcccgcctttagtgataaggattcgctaggggatgaaatgctggcagcagcattactgaaggccaaaagtcaggaactcgtgacgtttgaggacgtggcagtctatttcatccggaaagagtggaaacggttggagcctgcacagagagacctttaccgagatgtgatgctggagaactacggcaatgttttctcgttagaccgagagacccgtactgagaacgaccaggagataagtgaggatacgcgcagtcacggtgtgctgctcggtcggttccagaaagacatatcacaggggctgaaatttaaagaagcatatgaaagggaagttagcctcaaaagacccctggggaacagtcccggagagaggctgaatagaaaaatgcctgattttgggcaagtgacggttgaggaaaaactgactcccaggggggagagatcagagaaatacaacgacttcgggaactcattcacagtcaattcctag

SEQ ID NO: 141314 - DNA, 558 bp, synthetic construct
  misc_feature 1..558: note = Description of Artificial Sequence: Synthetic coding sequence
  source 1..558: mol_type = other DNA
atggaaactcaagccgatctggtcagtcaggagccccaggcgttgctagactccgccctacccagcaaagtccctgccttctccgacaaggattccctgggcgatgaaatgttagcagccgccttgcttaaggccaagtcccaagaactagtgacctttgaagacgttgctgtctattttatccgtaaggagtggaagagactggagcctgcgcagagggacctgtaccgggatgtgatgctggagaactacggtaacgtattttcactggaccgggaaaccagaactgaaaatgatcaggagatttctgaggacacacgcagtcatggagtgctgctgggcaggtttcaaaaagacatttcccaaggactgaagtttaaagaggcttacgaaagggaagtttcccttaagcgtccgctgggcaactcacctggagagcgtctcaaccggaaaatgcctgattttggccaggtcaccgtggaggagaaactcacgcctcgaggagagcgtagcgaaaaatataacgactttggcaatagtttcaccgtcaacagctag

SEQ ID NO: 141315 - DNA, 1509 bp, synthetic construct
  misc_feature 1..1509: note = Description of Artificial Sequence: Synthetic coding sequence
  source 1..1509: mol_type = other DNA
atggggactgaaaacaaggaggtgataccgaaagaagagattagcgaggagtctgagccccacggctccctacttgaaaagttccctaaggtggtataccaagggcacgaatttggtgctggctgcgaggaggatatgctcgaaggacacagcagggagagtatggaagaagttattgaacaaatgtctcctcaggagcgggatttcccttcaggtctgatgatttttaaaaagtcgccatcaagtgaaaaagatagggaaaataatgagagcgaacgggggtgtagtccaagccccaacctggtaactcatcagggggacaccaccgagggtgtgagtgcctttgccactagcggtcagaatttcctggagattctggagagcaataagacacagagaagcagtgtcggcgaaaagcctcatacatgtaaagagtgcggaaaggcatttaatcagaattcccacctgattcagcacatgagggtgcactcaggcgaaaaaccattcgaatgtaaagagtgcggcaaaacttttgggaccaactcttctttaaggcgccatttgagaatacacgccggcgagaaacctttcgcttgcaatgaatgtgggaaggcgttcatccagagctctcacctgatacaccatcaccgcattcacaccggcgagaggccatataagtgcgaggagtgcggcaaggccttctcacaaaattctgcccttatcttacatcagagaatacataccggcgagaagccctatgagtgcaatgagtgcggaaagacttttcgcgtctctagccagttaattcagcatcaaagaattcatactgaggagcggtaccatgaatgcaacgagtgtgggaaagccttcaaacattcaagtggcttaattcgtcaccaaaagattcacacaggggaaaagccttatctttgcaatgaatgcggcaagggcttcggacagtcatccgagctgattaggcaccagaggatacacacaggggataaaccgtacgaatgcaatgagtgtggcaaaaccttcggccagaatagcgaaatcatccgacacattaggattcacaccggcgaaaagccttatgtgtgtaaagagtgtgggaaggcattccgtgggaattctgagctcctgaggcacgagagaatccacactggggagaagccctatgagtgctttgaatgcggaaaggcatttcgaaggacatcacacctgatcgtgcatcagagaatccacaccggggaaaagccacaccagtgcaacgagtgtgcacggacgttttgggacaatagtgaactcttgctgcaccaaaagattcatatcggggaaaaaccttacgagtgcagcgagtgcgaaaaaaccttctcgcaacattcccagctgattattcaccagcgaatccatacaggcgaaaaaccatatgaatgtcaggagtgccagaagactttcagcagaagcagccacctgctgcgccaccagtctgtccactgtatggaatag

SEQ ID NO: 141316 - DNA, 1815 bp, synthetic construct
  misc_feature 1..1815: note = Description of Artificial Sequence: Synthetic coding sequence
  source 1..1815: mol_type = other DNA
atgatgaagtcgcagggactggtgagcttcaaggatgtagctgttgatttcacccaagaagaatggcagcagctggacccaagtcagcgaaccctgtatagagatgtgatgctggaaaactatagccaccttgttagtatgggctaccccgtgagcaagcccgacgtgatctcgaaactggagcagggggaggaaccgtggatcataaagggagacattagtaactggatctaccccgacgagtatcaagcggacggccgtcaggatagaaaaagcaatctgcacaatagtcagtcatgcatcttgggaacggtgtccttccatcataagattctcaagggtgtgactagggatggatccctgtgttctatattgaaggtctgtcagggggatggacagctgcagagatttctcgaaaatcaggacaaactgttccggcaagttaccttcgtcaattcaaaaaccgtgaccgaagcatcaggacataagtataacccactgggcaaaatcttccaggagtgcatcgagacagatatttccatccagcgcttccacaaatatgatgccttcaagaagaatctcaagccgaatattgatctccccagctgttataagtcaaactccagaaaaaaacctgaccagagcttcggtggtggtaagagcagttcacaatctgaacctaactcgaacctggagaagatccacaacggggtgatcccattcgatgacaatcaatgtggcaacgtgtttcggaatacgcagtccttgatccagtatcagaacgttgagacaaaagagaagagctgcgtttgcgtgacctgtggaaaggctttcgcgaagaagtcccagcttatcgttcatcagagaatccatactggaaagaaaccttacgactgtggcgcttgcggaaaagccttctccgaaaaattccatctagtggtccaccagcggacgcatactggagagaagccctatgactgttctgagtgtggaaaagctttttcacagaagtcatccctaatcattcatcagcgggtccataccggcgagaagccctatgagtgttccgaatgtggaaaagcttttagccagaagtcgccgctcatcatccatcagaggatacacacaggggagaagccatacgaatgcagagagtgtggaaaagcattcagccagaaatcccagctgattatacaccatcgtgcgcacaccggggaaaagccgtacgagtgcacggaatgtggcaaagcattctgtgaaaagagtcatctcatcatacataaacggatccatacaggtgaaaaaccttacaagtgtgcgcagtgtgaagaagcgttcagcaggaaaactgaattgataactcaccagctcgtccacaccggcgagaagccctatgagtgcactgaatgtggtaagacattcagccggaagtctcagctgatcattcatcagaggacccacaccggggaaaagccatacaagtgctcggaatgtggaaaggccttttgccagaagtcccatcttattggccaccaacggattcatacaggagagaagccatacatttgtacagaatgcggcaaagctttctctcagaagagtcacttgcctggacatcaacgcatccacacgggcgaaaagccatacatttgcgctgaatgcgggaaggcgttctctcagaagtccgacctggtgctgcaccagaggatccacactggtgagcggccctatcaatgcgccatttgcggaaaggcctttatccagaaatctcagcttacggtgcaccagaggattcacacagtggtgaaatcttag

SEQ ID NO: 141317 - DNA, 1815 bp, synthetic construct
  misc_feature 1..1815: note = Description of Artificial Sequence: Synthetic coding sequence
  source 1..1815: mol_type = other DNA
atgatgaaatcccaagggttggttagctttaaagacgtcgctgtcgactttacacaggaggagtggcagcagttggacccttctcaaagaaccctttatcgggatgtaatgttagaaaactactctcatctggtgtccatgggttacccagtcagcaaaccagacgtcatttctaagttggagcagggagaagagccctggataataaagggcgatattagtaactggatatatcccgatgagtaccaggccgacggccgtcaggggaaaaagtctaaccttcataattcccaaagctgcattcttggtaccgttagctttcatcacaagatcctcaaaggagtgactcgcgacggcagcttatgctctattctgaaagtgtgccagggcgacggtcaattgcagaggtttctggaaaaccaggacaagttgtttcgtcaggttaccttcgtgaattctaagaccgtcacagaagctagcgggcataagtacaatcctctggggaagatcttccaggaatgcatcgaaaccgacatctctatccagcgtttccataagtatgacgccttcaaaaagaatctgaagccgaatattgacctcccaagctgttacaagagcaacagccgcaagaaacccgaccagtctttcggcggcgggaaatccagttcacagtcagaacctaattccaacttagaaaaaatccataacggggtaattccgttcgacgataaccagtgcggcaacgtcttcaggaatactcaaagcctgattcagtaccaaaatgtagagacaaaagagaagtcatgtgtgtgcgtcacttgtggaaaagcgtttgcaaaaaaaagccagctcatagtacaccaaagaattcatacaggcaagaaaccctacgactgcggcgcctgtggcaaagctttctccgaaaagttccacctcgtcgtgcatcaacgcacgcatacaggagaaaaaccctatgattgttcagagtgcggcaaagcttttagtcaaaaaagttccctcatcatacaccagcgcgttcacaccggagagaaaccctatgaatgctccgagtgtggtaaggctttttctcagaagtctccacttatcattcaccagcgcattcatacgggggagaagccttatgaatgtcgggagtgcggtaaagcattttcccagaaatctcaattgataatacaccaccgcgcccatacaggggagaaaccttatgagtgcacggaatgcggcaaagctttctgtgaaaagagccaccttataatacataagcgaattcatacaggagagaaaccctataaatgtgcacagtgcgaagaggcattctcccggaaaactgaactgattacccatcagctggtgcatactggagaaaagccctacgagtgtaccgaatgtggtaagactttctcaagaaaaagccagcttatcattcatcagcgcacccatactggcgagaaaccatacaagtgcagtgagtgtggcaaggccttctgtcaaaagagccatttaatcgggcatcagcggattcacactggcgagaagccatatatctgtactgagtgtggaaaagctttctcacagaagagccatctgcctgggcaccaacggatccataccggagagaagccatatatctgtgccgagtgcggtaaggcgttttctcagaaaagcgacttggtgttacatcagcggatccatacaggggagagaccctaccagtgtgctatatgcggcaaagccttcattcagaagagtcagctcactgtccatcagcggatccacaccgtggtgaaatcttag

SEQ ID NO: 141318 - DNA, 1707 bp, synthetic construct
  misc_feature 1..1707: note = Description of Artificial Sequence: Synthetic coding sequence
  source 1..1707: mol_type = other DNA
atgctcgaaaattattctcacctggtctccatgggatatcccgtgtcaaaacccgacgttatatctaaactggagcaaggcgaggagccctggattataaaaggtgatatatccaattggatttaccccgatgagtatcaggccgacgggagacaggaccgcaagagcaatcttcacaattctcaaagttgcattctcggaactgtgagtttccaccacaagattttgaaaggggtgacgagggacggaagtctttgctccatactgaaggtgtgccagggtgacgggcagctacagaggtttctggagaaccaggacaagttgtttcgacaggtaacgtttgtgaatagcaagactgtgactgaagcctctgggcacaagtataatccactcggcaaaatttttcaggagtgcattgaaacggatatctctatccaaaggttccataaatatgatgccttcaagaaaaacctcaaaccgaacattgatctgccaagttgctacaaatctaactctcggaagaaacctgatcaatccttcggggggggcaagagcagctctcaatcagagccaaactctaacctcgagaagatacataatggggtgatccccttcgacgataaccaatgcggcaatgtattcagaaacacccagagtctgatccagtaccagaacgtagagactaaggaaaagtcctgtgtgtgcgtgacctgtggcaaagcctttgctaaaaaatctcaattgatagtgcaccagagaattcataccggcaagaagccatacgattgcggcgcatgcggtaaggcattctcagagaaatttcatctcgttgtgcatcagcgtacccatactggcgagaagccctatgactgcagcgagtgtggaaaggccttcagccagaagtcaagtttaatcatccatcagcgggtgcacactggagaaaagccttacgagtgtagtgaatgtggaaaagcttttagtcagaaatctccacttattattcaccagcgtatccacactggtgagaagccttatgaatgccgagagtgcggcaaggcattctcacagaaaagccaactgattattcaccacagggcacacacgggagaaaagccctacgaatgcaccgaatgtggcaaagccttctgcgagaagtcgcacttaattatacataaaagaatccacacaggggagaagccttataagtgtgctcagtgtgaggaagccttcagccgaaaaaccgaactgatcacccaccagctcgtacacacaggagagaaaccgtacgagtgcaccgagtgtggcaagactttctccaggaaatcacagctgatcatccatcagcggactcacaccggggaaaagccttacaaatgctctgagtgcggcaaggctttttgccagaaatcgcatcttatcggccaccagcggattcacaccggagagaagccttacatttgtaccgaatgcggaaaggccttttcacagaagagtcatcttcccgggcaccagaggatccacacaggcgaaaagccctatatctgcgcggagtgcggcaaggcattttcacagaaatcggacctggtcctgcatcagcgcatccacactggcgaaagaccctatcagtgtgccatttgcgggaaggcttttattcaaaaaagtcagctgactgtacaccagagaatccatactgtggtcaagtcctag

SEQ ID NO: 141319 - DNA, 1863 bp, synthetic construct
  misc_feature 1..1863: note = Description of Artificial Sequence: Synthetic coding sequence
  source 1..1863: mol_type = other DNA
atggtgccagcagagacctcttcatctgggcttctcgaagagcagaagatgatgaaatcacaaggattagtttcatttaaggacgtggcagtcgatttcacccaggaggaatggcaacagctggacccctcacagcgcaccctctaccgggatgtgatgctcgagaactactcacacctcgtctcaatgggatatccagttagcaaaccagacgtaattagcaagctcgagcagggagaagagccatggataattaaaggagacatttctaactggatctatccagacgagtatcaggcggatggaaggcaggataggaaatctaacctgcataactctcaatcatgcatccttggaactgtgagcttccatcataaaatattgaaaggcgtgacacgtgacggttccctctgcagcattcttaaggtctgtcagggcgatgggcagctccagcgtttcctggaaaaccaagacaaactgttcagacaagtgacctttgtgaatagcaagactgttacagaggcttctggccataaatacaatcctttggggaagatttttcaggagtgcatagaaaccgacatctccattcagaggtttcataaatacgatgccttcaaaaagaatctgaagcccaatattgacctaccaagttgctacaagtcgaattctaggaagaaacccgatcagtcctttggaggcgggaaaagctcctctcagtctgagccaaactcaaatttggagaaaattcacaatggggtgattccatttgatgataaccagtgcgggaacgtatttaggaacacacagtccctgatacaatatcaaaatgttgaaacaaaagagaagagctgcgtctgtgtgacgtgtggaaaggcatttgccaagaaatcacagcttatcgtccaccagagaatccataccggcaaaaaaccctacgactgtggcgcttgtggtaaagcattcagcgaaaagttccatctagtcgtccaccagcgtactcacaccggcgagaagccatatgactgtagcgagtgcggcaaggcatttagtcagaaaagttctctgattatccaccagcgagtgcatacaggcgagaagccttacgagtgcagcgaatgcggcaaggcttttagtcagaaatcacccttgatcatccaccagagaatccacactggtgagaagccatacgagtgccgcgaatgcgggaaggccttttcccaaaaaagccagcttatcatccaccaccgagcccacactggagaaaagccatacgagtgcacagaatgcgggaaagctttctgtgaaaagtcacacctgatcatccacaagcggattcacactggggagaaaccctacaaatgcgcccagtgcgaggaggcgttcagcaggaagacagaattgattactcaccagttggttcacacaggcgaaaaaccttacgagtgcacagagtgtggaaagacgttcagtaggaaaagccagctaattatccaccagcggacacatacgggggagaagccttacaagtgttccgaatgtggtaaggcattctgccagaaatctcatctgatcgggcaccagaggattcacaccggtgagaaaccatacatctgcaccgaatgtggaaaagcattctcccagaaatcacatctacccgggcaccagcggatccatactggcgagaagccgtacatctgcgcggagtgcggcaaagccttttcccagaaatctgacctcgtactgcaccaacgcattcacacaggcgaaaggccctatcaatgtgccatctgtggtaaagcattcatccagaagagtcagctgacagtgcaccagcggatacacaccgtcgtgaagtcttag

SEQ ID NO: 141320 - DNA, 1980 bp, synthetic construct
  misc_feature 1..1980: note = Description of Artificial Sequence: Synthetic coding sequence
  source 1..1980: mol_type = other DNA
atggctgccgccgtgctcatggatcgcgtccagagctgcgtgacttttgaagacgtattcgtctattttagccgggaagagtgggagctgcttgaagaagcacaaagatttctgtaccgggatgtgatgctggaaaatttcgcacttgtggcaacactgggcttctggtgcgaagccgaacacgaagctccttcagaacagagtgtctcagtggagggagtgagtcaggtgcggactgccgagagcggattgtttcaaaaggcacacccctgcgagatgtgcgacccattgctgaaggacatcttacaccttgctgagcaccaggggtcgcaccttacccagaagttgtgtactcgaggcctgtgtagacgaaggttttcattcagcgccaacttctatcagcatcagaagcagcacaatggcgagaattgcttcaggggcgacgatgggggcgcttctttcgtgaagtcatgtaccgtgcatatgctcggccggagtttcacctgcagagaagaaggtatggatctgccggattcatctggtctgtttcagcaccagacaacatacaatagggtgtctccttgtcgaaggaccgagtgcatggaatctttcccccattcaagtagcctaaggcagcaccagggcgattacgacggacagatgcttttttcctgtggagacgaaggtaaggccttcctggatacttttaccctgctcgatagccagatgacccacgcagaagtgcgtccatttcggtgcctgccctgtggaaacgtctttaaagagaaaagcgctctcattaaccatcgaaagatccactcaggcgagatctctcacgtgtgcaaggagtgcggcaaagcgttcattcacctgcatcacctgaagatgcaccagaagtttcataccggcaaaagacattatacgtgctctgaatgtgggaaagcctttagccgaaaggacacacttgtgcagcatcagcgcgtgcacaccggcgaacggtcttatgattgttctgagtgcggcaaggcgtattcacgatcctctcacctcgtgcagcaccagagaatccatacaggcgagagaccctataaatgtaacaagtgcggcaaagcatttagtaggaaggataccctagtccagcatcagaggtttcacacgggcgagcgcccgtatgaatgctccgagtgcggcaagttcttctcccagagcagtcatctgatcgagcactggagaatccacaccggggctcgtccttacgaatgcatcgaatgcggaaagttcttttctcacaactcctcccttatcaaacacaggcgtgtgcataccggcgccagatcatacgtgtgctcaaagtgtggaaaggcattcggctgcaaagacaccctggtgcagcaccagataattcacacaggagctcgcccctacgaatgctctgaatgcggcaaagccttcagtaggaaggacaccttggtacagcaccagaaaatccacactggagagcgtccgtacgagtgtggggaatgcggaaaattcttttcacattcatccaatctcatcgttcatcagaggattcacactggcgcgaagccctatgaatgtaacgagtgcggaaagtgctttagtcataacagctccctgatcctgcaccagagggtgcataccggagcgagaccctacgtatgttccgagtgcggtaaggcgtacatctctagttctcacctggtacagcacaagaaagtccacaccggagcacgtccgtacgaatgctccgagtgcgggaagttctttagccgaaattccggactgattctgcaccaacgcgttcacacgggggaaaagccctatgtttgttcagagtgtggcaaagcatatagcaggtccagccacctagttaggcaccaaaaagctcacacaggggaacgtgcccacgaatgtaattcgtttggcggccctctggccgctagcctgaagctggtttag

SEQ ID NO: 141321 - DNA, 1980 bp, synthetic construct
  misc_feature 1..1980: note = Description of Artificial Sequence: Synthetic coding sequence
  source 1..1980: mol_type = other DNA
atggcagcagccgtcctaatggacagagtgcagagctgcgttaccttcgaagacgtgttcgtgtactttagccgggaggaatgggaactattggaggaggctcagagatttctgtatagagatgtcatgctcgagaacttcgcattggttgccacactgggattctggtgtgaagccgagcatgaagcaccctcagaacaatcagtctcagtcgaaggcgtgagtcaagtacgaacagcggagtctgggctattccaaaaagcgcacccatgtgaaatgtgtgacccactgctcaaggacatattgcacctggccgagcaccaggggtctcacctgacacagaagctgtgcacacggggtctctgtcgccgacggttttctttcagcgccaacttttatcaacatcagaaacaacataatggggagaattgctttaggggagatgacgggggagcatcctttgtcaaatcttgcacagtgcacatgctcggtagatcatttacctgccgggaggaggggatggacctgcccgactcatccgggctctttcagcaccagacaacttacaacagagtgtccccatgccgtcgcaccgagtgtatggaatcttttccacatagtagtagccttcgtcagcaccagggagattacgatggacaaatgctcttctcctgcggtgacgaggggaaagcctttttagatacattcaccttgctggacagtcagatgactcacgcagaagtcaggccttttaggtgtttaccctgtggcaacgttttcaaagagaagtctgccttaattaaccacaggaagatccactctggcgagatctctcatgtttgcaaggaatgcggcaaagcattcatccatctgcatcacctcaagatgcaccagaagtttcatactggcaaacgccactacacctgctctgagtgcggcaaagccttctccagaaaggatacgctggttcaacatcagcgggtccatacaggcgaaaggtcttacgattgctcagaatgcggcaaggcttatagcaggagtagtcatctggttcagcaccagagaatccacacgggcgagcgaccttataagtgtaacaagtgcgggaaggctttctcccgtaaggataccctcgtgcagcaccagcgctttcacaccggtgaaaggccctacgagtgtagcgagtgcgggaaattcttcagccagtcgtcacacctgatagagcattggagaatccacacaggggcccgcccttacgaatgtattgagtgcgggaagttcttcagccacaattctagcctgataaagcataggagggtgcacacaggcgccaggagctacgtctgttccaaatgcggtaaagcatttgggtgcaaggacacccttgtgcagcaccagattatccatacaggagcccgcccgtacgagtgctctgagtgcggtaaggccttttcgcgcaaggacacactggtgcaacaccagaaaatccacaccggagagcggccctacgagtgcggcgagtgtggcaagtttttctcccactcgtctaacttgatcgtgcatcagagaatacacacgggggcaaagccatacgaatgtaatgagtgtgggaaatgcttttcccataactcctccttgatcttgcaccagcgcgtgcatacaggcgcacgcccatacgtatgtagtgagtgtggcaaagcctatatcagcagtagccatttggtacagcataagaaggttcataccggggcacggccatatgaatgtagcgagtgcgggaaattcttcagccgtaacagcggactaatcctacaccagagagtccataccggcgagaagccttatgtgtgttcggagtgtgggaaggcttattctcggagttcacacctggtccgtcaccaaaaagcacataccggggaacgtgctcacgagtgtaacagcttcgggggcccacttgccgcctccctgaaattggtgtag

SEQ ID NO: 141322 - DNA, 2121 bp, synthetic construct
  misc_feature 1..2121: note = Description of Artificial Sequence: Synthetic coding sequence
  source 1..2121: mol_type = other DNA
atggctgcagctgtgctaatggacagggtgcagagctgtgtgaccttcgaagatgttttcgtttacttctctcgggaagagtgggaactcctggaggaagcgcagcgattcctgtaccgagacgtcatgctggaaaacttcgccttagttgccactctcgcctttatttttcccgtgccatgctcctgtgctgttgggggcggccggaaaccctgggtccccgatcgcgcggatatcaccgccgcgactgtgaaagagacctatagaggtcatggtcctgccgaatgggagctggaagaaggtttctggtgcgaagctgaacatgaggcacctagcgaacagtctgtttctgtagaaggtgtctcgcaggtgcgcacagctgagtccggactgtttcagaaagcccacccctgtgagatgtgcgaccctctcctgaaggacattctgcatctggccgaacatcaggggtctcacctgacgcagaagctctgcactcgtggtctgtgtcgcaggcggttcagcttcagcgccaacttttatcagcaccagaagcagcacaacggagaaaactgctttcgcggagatgatggcggcgcctctttcgttaagtcatgtacagtgcatatgttgggccggtccttcacctgtagagaggaggggatggacctgcccgacagcagcggactgttccaacaccagacgacctataatcgggtgtccccttgtcgtagaacagagtgtatggaatcatttccacacagctcctccctgcgacagcaccaaggcgattatgatggtcagatgttgttcagctgcggcgacgagggaaaagccttcctcgacacttttactttactcgatagtcagatgactcatgcagaagtaaggcctttccgttgcctcccttgcgggaacgtgttcaaggaaaaaagtgccctgattaaccaccgcaaaatccactccggcgaaatctcgcatgtatgcaaagagtgcggcaaggcgttcattcacctgcaccatctcaaaatgcatcagaaattccacaccggcaaaagacattacacctgctctgagtgcgggaaagccttttcccggaaggatacactggtgcaacatcagcgggttcacaccggcgagcgatcttacgactgttccgagtgtggtaaggcatactcacggagctcccatttagtccaacatcagcgtattcacacaggggaacgcccgtataaatgcaacaagtgcggcaaagctttcagccgaaaagacaccctcgtgcaacaccagagattccatacaggcgaacgcccatacgagtgcagtgaatgcggcaagtttttttcccagtcatcgcatctcatagaacattggaggattcacacaggcgccagaccctacgaatgcattgagtgcggcaaattttttagccacaactcatctcttattaagcatcgccgggttcacacaggtgctagaagttacgtgtgcagcaaatgcggcaaagccttcggatgtaaggatactcttgtgcaacaccagattatacatactggcgctagaccttatgaatgttctgaatgcgggaaggcattcagcagaaaggataccctggtccagcaccagaagatccacaccggtgagaggccttatgagtgtggagagtgtggtaagttcttctcccattcatctaatttgatagttcaccagagaatccacactggcgcgaagccatacgagtgcaatgaatgcgggaagtgtttctctcacaactcctcgcttatcctacatcagcgtgtccatacaggcgcgcgcccgtacgtctgtagcgaatgcggtaaggcctatatctccagttcccacctggtccagcacaaaaaggtgcacacaggggctagaccatatgagtgtagtgaatgtgggaagtttttcagcaggaacagcggactaatcctgcaccagagggtgcacaccggcgaaaagccttatgtctgttctgaatgcggaaaggcctattctaggtcctcccatctcgtccgacaccaaaaggcccacaccggagaaagggcccacgagtgtaatagctttggggggcccttggccgcatcattaaagttagtgtag

SEQ ID NO: 141323 - DNA, 1788 bp, synthetic construct
  misc_feature 1..1788: note = Description of Artificial Sequence: Synthetic coding sequence
  source 1..1788: mol_type = other DNA
atggctgctctctcaccgacttttgcgacatccacccaggactccacttgtctgcaagactccgagttccctgtgtcttccaaggatcactcatgcccacagaacttggatctttttgtctgttcgggactggaaccccataccccctccgtaggtagccaggaatcagtcactttccaggacgtcgctgtggacttcacagagaaggagtggcccctgttagattccagtcagagaaaactgtacaaagacgtcatgctggagaattactcaaatctgacttccctgggctatcaagtaggaaaaccctcactgatctcccacttggaacaagaggaggagcccaggacagaagagcgcggggctcaccaaggcgcttgtgcagactgggaaaccccatctaaaacaaaatggtctcttctaatggaggatatcttcgggaaggaaactccgtccggtgtgactatggagagggcaggtctgggtgagaagtccactgaatatgcacacttgtttgaggtgttcggcatggacccccatctgacccagccaatgggacggcatgcaggaaaaaggccttaccaccgccgggattacggcgtggcatttaaagggcgcccccatctgacacagcacatgagcatgtacgatggtcggaagatgcacgagtgccatcagtgccaaaaagccttcaccacttctgcttctctcacgcgtcaccgtagaatacacacaggggagaagccgtacgaatgctctgactgtggcaaggcctttaacgacccttcagctctgaggtcccatgcaaggacccatcttaaagaaaagcccttcgactgcagccagtgtggaaacgcctttaggactctctccgcgctgaagatccatatgagagtccataccggtgaaagaccttacaaatgcgaccagtgtggcaaggcttacggtagatcctgccatttgatcgctcacaaacggactcacaccggcgagcgcccctacgagtgccacgactgcgggaaggccttccagcatcccagccatctaaaggagcatgtaagaaaccacactggcgaaaaaccttatgcctgtacacagtgcggcaaagcctttagatggaagagcaatttcaacttgcacaagaagaaccacatggtcgagaaaacctatgaatgtaaggaatgtggaaaatcattcggcgacctagtgtcgcgcagaaagcacatgagaattcacatcgtcaagaagcccgtagaatgtcgacagtgcggcaaaacctttaggaatcagtctatattgaagacccacatgaattctcacaccggcgaaaagccttacggttgtgacctgtgtgggaaagcattctcagcttcttctaacttgacggcccacaggaaaatccacacgcaagagagacgctacgagtgcgcagcctgtggcaaagtctttggagactacctcagccggagaagacacatgtctgtgcatttagttaaaaagcgcgtcgagtgtcggcagtgcgggaaggcctttcggaaccaaagcaccctgaaaacacacatgcggtctcatactggagagaagccgtacgagtgtgatcactgcgggaaggcattcagcataggttccaacttgaacgtgcacagaagaatacatactggcgagaagccttatgaatgtctggtatgcggcaaggcattctctgatcattcatctctgcgttcccacgtgaaaacacaccgaggggagaagctctttgtgtctagtgtttggaaaaggctacaatag

SEQ ID NO: 141324 - DNA, 1692 bp, synthetic construct
  misc_feature 1..1692: note = Description of Artificial Sequence: Synthetic coding sequence
  source 1..1692: mol_type = other DNA
atggccgcactgagccctacttttgctaccagcacccaggactcgacctgtttgcaggacagcgagttccccgtgtcctccaaagatcatagttgcccccagaacctggacttgttcgtctgtagcggtttagaaccccacacaccaagcgtcggatcgcaggaatcagtcactttccaggatgtggcggtcgatttcaccgaaaaggagtggccactcctcgacagctcacaaaggaaactgtacaaggacgtgatgcttgaaaactattcgaacctcacaagccttgactgggagacgccctctaagaccaagtggagtctactcatggaggacatctttgggaaagaaaccccatccggagtgacaatggagagggccggtctcggggagaaatcaacagagtatgctcacttatttgaagtcttcggaatggatccccatcttacacagccgatgggtaggcacgctggaaaaaggccttatcatagaagggactacggcgtcgccttcaagggccgacctcatttaactcaacacatgtccatgtacgatggtcgaaaaatgcacgaatgtcatcagtgccagaaggccttcacaacctctgctagcctcaccaggcacaggaggattcacactggtgagaagccttacgagtgttctgactgcggcaaagccttcaacgacccctctgctttgcgcagccacgcaaggactcatcttaaagaaaaaccgtttgactgttcacaatgcgggaatgcatttaggaccctaagcgccctgaaaatccatatgcgcgtacacactggggagcggccttacaagtgcgaccaatgcgggaaggcctatggtcgctcttgtcacctgattgctcacaagagaactcacaccggtgaaaggccatacgaatgtcacgactgcggcaaagcctttcagcatccatctcatctgaaagaacacgtccggaatcataccggcgaaaagccttacgcctgcacgcagtgtgggaaggcattccgctggaagagcaattttaacctccacaagaagaatcatatggtggaaaaaacatatgaatgcaaagagtgtggaaaaagctttggggacctggtgtctcgacgcaaacatatgcgcattcacatagtgaagaagccagtggagtgtcggcagtgcggcaagacctttaggaaccagtctattctgaaaacacacatgaattcccacacaggagagaagccatatggatgcgacctctgtggaaaggctttctcggccagttccaacctcacggcgcacaggaagatccacacccaagaacgacgatacgagtgtgcagcctgtgggaaggttttcggtgattatctttcacgaaggcgccatatgtctgttcatctcgtgaagaaacgggtcgagtgtcgccagtgcggcaaagctttccggaaccagtctaccctgaagacccacatgagatcgcatacgggcgagaaaccgtacgaatgcgaccattgcggtaaggcattttccatcggatccaatctgaacgtccaccgcagaattcacactggcgagaagccctatgaatgtctcgtgtgcggaaaggcattcagcgaccatagctcactcagaagtcacgtgaagacgcacagaggggagaaactgttcgttagctccgtgtggaaacgactgcagtag

SEQ ID NO: 141325 - DNA, 369 bp, synthetic construct
  misc_feature 1..369: note = Description of Artificial Sequence: Synthetic coding sequence
  source 1..369: mol_type = other DNA
atgaatttttctagccaccgtaggagattgccaagtcctcccctccctcggtcgtattcacagtctagcactagcacgcaagactccacgtgcctgcaggattctgagttcccagtcagtagcaaggaccacagctgtccccagaacttggacctgtttgtatgtagcggcctggagcctcacacgccgtcggtcggatctcaggaatccgtaacatttcaagatgtggctgtggacttcactgaaaaggaatggcctctgctggatagctctcaacgcaagttatacaaagatgtcatgctggaaaactacagtaacctcacctctctgggcaaagctagtgctatcagcccgctgattcatccatag

SEQ ID NO: 141326 - DNA, 822 bp, synthetic construct
  misc_feature 1..822: note = Description of Artificial Sequence: Synthetic coding sequence
  source 1..822: mol_type = other DNA
atgtttgggttcccaacggccacgctgctggactgtcacgggcggtacgctcaaaacgttgcattcttcaatgtcatgaccgaggcccaccacaagtacgatcactctgaggctacggggagctcttcctgggacatccagaactcttttcgacgcgagaaacttgaacagaagagtcccgactctaagaccctgcaagaggactcaccaggcgttcgccagcgcgtctacgagtgtcaggaatgcggcaagagctttcgtcagaagggcagtctcacccttcacgaacggattcacaccggtcaaaaaccctttgagtgtacacattgcggaaaaagctttagggctaaaggcaatctggtgacccaccagaggatacacaccggcgagaaaccctaccagtgcaaagagtgtggtaagtctttctctcagcgggggagcctggccgtacatgaaaggcttcacacaggacagaagccatacgagtgcgctatatgccagcggtcctttcgtaaccagagcaatttggcagtgcaccggcgtgttcactctggagaaaagccttatcggtgtgatcagtgtggcaaagcctttagccagaaaggttcactgattgtacacattcgggtgcatacgggactcaagccatatgcgtgcacacagtgccgcaagtccttccacacgaggggcaactgtatcttacacggtaagatacataccggcgaaacaccttatctctgcggacagtgcggcaagtctttcacacagagaggctctttggcggtccatcagcggtcttgttcacagaggctgaccctgtag

SEQ ID NO: 141327 - DNA, 822 bp, synthetic construct
  misc_feature 1..822: note = Description of Artificial Sequence: Synthetic coding sequence
  source 1..822: mol_type = other DNA
atgtttggttttcccaccgccacactgctggattgccatggaagatatgcccaaaatgtggcattttttaacgttatgaccgaggcacaccataagtatgatcatagcgaggctacaggaagcagctcgtgggacattcagaacagttttagacgtgagaagctagagcaaaaaagccctgactctaagacactgcaggaggatagtccaggggtgagacagagagtttacgagtgtcaggagtgcgggaagagctttcggcagaaaggctctctgaccttgcacgaacggattcatacaggccagaaaccattcgaatgtacgcactgtggaaagtcctttcgggccaaaggcaatctggtcactcatcaacggatccacacgggagagaagccataccagtgcaaggagtgcggaaagtcattctctcagcgaggcagtctggctgtccacgaaagattgcatactgggcagaaaccgtatgagtgcgccatttgccagcgctccttccgcaatcaaagtaacctcgcagtccatagaagggtacacagcggcgagaaaccctataggtgcgatcagtgcggaaaggccttctctcaaaagggttccctgatagtgcacatcagagtacacaccggcctaaagccatatgcctgcacacagtgtcgcaagtctttccatacacggggcaattgtatcctacatggtaaaatccacacaggagagactccctacctgtgcgggcagtgcggtaagtcctttactcagaggggttccctggcggtccatcagcgctcctgttcacagcgcttgactctttag

SEQ ID NO: 141328 - DNA, 1530 bp, synthetic construct
  misc_feature 1..1530: note = Description of Artificial Sequence: Synthetic coding sequence
  source 1..1530: mol_type = other DNA
atggcgctatcgcagggactcctgacctttcgggatgtagcaatcgaattttcccaggaggagtggaagtgcttggacccagcccagagaaccctgtacagggacgtaatgttagaaaattatcggaacctagtaagtctcgatatctcgtctaaatgcatgatgaatactctgtcctctaccggccagggtaacactgaagttatccacacaggcaccctccaacgtcaggcgtcttatcatatcggagccttttgtagccaggaaattgagaaagacatccatgacttcgtgttccagtggcaggaagatgaaacaaatgaccatgaggcacccatgaccgagatcaaaaaactgacttctagtaccgatagatacgatcagagacacgccggaaacaaacctataaaaggccaacttgagagcaggtttcatctccatctgagacgtcacaggcgcatccacacaggcgagaagccatacaaatgtgaggaatgcgaaaaggtgttcagttgtaaatcccacctggagatccacagaattattcataccggggagaaaccgtataaatgtaaggtttgtgacaaggcatttaaacacgacagccacctggcaaagcatacccgaatccaccgcggcgataaacattatacctgtaatgagtgtggaaaggtcttcgaccagaaggctaccctagcctgccatcacagatcacacacaggggagaagccatataaatgtaatgagtgcggtaaaacgttttcccaaaccagtcatctggtgtaccaccataggctccacaccggcgaaaagccatataaatgcaatgagtgtggaaagacattcgctagaaactctgtgctggtcattcataaggcggtgcacactgcggaaaagccttacaagtgtaacgagtgcggcaaggtgtttaaacagcgagcgacgctagcgggacatagacgggtccatacaggtgagaagccatatcgctgtgaggagtgtgataaagtcttcagccgcaagtcccacttagagaggcacagacgaattcacaccggggagaagccctacaaatgcaaagtctgtgataaagccttccgtagcgatagtcgtctggcagaacatcagcgcgtacatactggcgaacgcccatatacctgcaacgaatgcggcaaggtcttcagcactaaagcctacctggcctgtcaccagaagctacacactggcgaaaaactatatgaatgtgaggaatgcgacaaggtgtacattagaaaatcgcacttagaacggcacaggcgtatacacactggagagaagccacacaagtgtggagattgcggcaaggccttcaatagtccgtcccacctgatcagacatcagcgcatccacaccggtcaaaagagctacaaatgccatcagtgcggaaaggtcttttcgctgaggtcactgctagctgaacaccagaagattcctttcggggacaactgtttcaagtgcaacgaatacagtaagccatccagcatcaattag

SEQ ID NO: 141329 - DNA, 1530 bp, synthetic construct
  misc_feature 1..1530: note = Description of Artificial Sequence: Synthetic coding sequence
  source 1..1530: mol_type = other DNA
atggccctgagccagggccttctgacattccgcgacgtcgctattgaattcagccaggaagagtggaaatgtttagaccctgcgcagcgaacactgtacagagatgtcatgttagagaattaccgaaacctcgtgtccctggatatcagctctaaatgtatgatgaatactctgtctagtactgggcagggcaatacagaggtgatccacaccggaaccctgcaacgccaagcttcttatcatatcggcgccttctgctcacaagaaatcgaaaaagacatccatgactttgttttccaatggcaagaggacgagactaacgatcatgaagctcctatgaccgaaataaaaaaattgaccagcagtacagaccggtatgaccagcggcacgcggggaacaagcctatcaagggacagctggagtctcggttccatttgcaccttcgcagacacagaagaatccatactggagagaagccttacaaatgtgaagagtgtgaaaaagttttttcatgcaaaagccatttagaaatccacagaattatccataccggggaaaagccctataaatgtaaagtgtgcgacaaggccttcaaacatgacagccatctcgctaagcataccagaattcaccggggcgacaaacattatacttgcaacgagtgcggcaaggtattcgaccagaaggctacactggcatgtcatcaccgcagccacactggagagaagccctataagtgtaatgaatgcggaaagacctttagccagacttcccacctggtatatcatcatagactgcacacaggagagaagccatacaaatgtaacgagtgtggaaagacattcgctagaaacagcgtgctcgtgatccacaaggctgtgcatacagctgagaagccatacaaatgtaacgagtgcggcaaggtatttaagcagcgggctactcttgcgggccatcgtcgcgtgcataccggagagaaaccctatcgctgtgaggaatgtgataaggtgttctcccgcaagtcgcatctagagaggcatcgacgcattcacactggagaaaaaccttacaagtgcaaagtgtgcgataaggcctttaggagcgatagccggctcgccgagcaccagagggtccacactggggaacgaccttatacgtgcaacgaatgcggaaaagtcttttccaccaaagcctatttggcctgccatcaaaagttgcatacaggggagaagctttatgagtgtgaggagtgtgataaggtgtacataaggaagtctcacttagaacggcacaggagaattcacactggcgaaaagccgcataagtgcggggattgtggcaaggcttttaattcacctagccacctcattaggcaccagagaatacataccggacagaagagctacaaatgccaccagtgcggaaaggtgttctctctcagatctctattagcggagcatcaaaagattccttttggagataactgctttaagtgcaacgaatacagtaaaccatcgtcaatcaactag

SEQ ID NO: 141330 - DNA, 1209 bp, synthetic construct
  misc_feature 1..1209: note = Description of Artificial Sequence: Synthetic coding sequence
  source 1..1209: mol_type = other DNA
atgtacaccagcgaggaaaaatgtaaccagcggacccaaaaacgtaaaatttacaatgtgtgcccacggaagggcaaaaagatttttatccacatgcatgagattatccagatcgacgggcatatctaccagtgtctcgagtgtaaacagaatttctgtgagaacctggccttgattatgtgcgagagaacccatacaggcgaaaagccatacaagtgtgatatgtgtgaaaaaacattcgttcaaagctcagacctcacgtcgcatcagaggatccacaactatgagaaaccctacaagtgtagtaaatgtgagaagtctttctggcatcacctggccctgtcagggcaccagcgtacccatgccggcaagaaattttacacttgcgatatctgcggaaagaacttcggtcagtcctccgatttgcttgtgcaccagcggagtcatactggcgaaaagccatacctgtgctccgagtgcgataagtgttttagcagaagtaccaatctgattcgccatcggcgcactcacacaggggagaagccttttaagtgcttggagtgcgaaaaggcctttagcggaaagagcgatctgatctcccaccagcgaacgcacactggcgaaaggccctataaatgtaacaaatgtgagaagagctaccgacacaggtctgcatttatagtgcacaaaagagtgcacactggtgaaaagccttacaaatgcggtgcctgcgaaaaatgtttcggccagaaatctgatcttattgtacatcagcgggtccataccggcgagaaaccatacaaatgtttagagtgtatgcgcagcttcacaagaagtgctaacctgatcagacaccaggccacacacacgcataccttcaaatgtctggagtatgagaaatcctttaactgcagctcagaccttatagttcaccagcgcattcatatggaagagaaaccccatcagtggagcgcgtgcgagtctgggtttctgctgggcatggactttgtggcccagcagaaaatgaggactcagacagaggagctgcattacaagtacaccgtctgtgacaagtcgttccaccagtcctctgccctgctccagcatcagacagtgcatattggcgagaaaccatttgtttgcaatgtttctgaaaaagggcttgaattgagtcctccacacgcctcagaggcatcccaaatgtcctag

SEQ ID NO: 141331 - DNA, 1209 bp, synthetic construct
  misc_feature 1..1209: note = Description of Artificial Sequence: Synthetic coding sequence
  source 1..1209: mol_type = other DNA
atgtacacaagcgaagagaagtgcaatcagcggacccaaaagagaaagatctacaatgtctgtccccgcaaggggaaaaaaattttcatccacatgcacgagattatccagattgatgggcatatctaccagtgcctggagtgcaaacagaacttttgcgaaaatctcgcgcttatcatgtgtgagcgcacccataccggcgaaaagccttataagtgtgatatgtgcgaaaaaacattcgttcagtctagcgatctcacctcccaccaaaggatccataattacgaaaagccatacaaatgctccaagtgtgaaaaatccttttggcaccacctcgctctctccggacatcagagaacacacgctggcaagaagttttacacctgcgatatctgtgggaagaacttcggacagtccagtgatctgctagtgcaccagaggtcacatactggcgaaaaaccctatctctgctctgaatgtgacaaatgtttcagtagatcaactaatctaatcagacatagaaggacacacaccggcgaaaaacccttcaagtgcctcgaatgcgagaaagctttttcgggtaagtcggacctgatcagccaccagaggacacacaccggggagagaccttataagtgcaacaaatgcgaaaagtcatatcggcaccgttccgctttcatagtccacaagcgtgtgcatacaggggagaaaccctacaaatgcggcgcctgtgaaaaatgctttggccaaaaatccgatttgatcgtgcaccagagggtgcacactggagagaagccttacaagtgcctagaatgtatgcggagttttactcgcagtgctaacttgatacggcaccaggcgactcacacccacaccttcaagtgcctcgaatatgaaaagtcatttaactgctcttctgatctgatcgtgcaccagagaatccacatggaggagaagccacaccagtggtctgcctgcgagtccgggttcctgttgggtatggatttcgtggcacagcagaagatgagaactcagactgaagagttgcactacaagtacacagtgtgtgataaaagttttcatcagagctcagccctcctccaacaccaaaccgttcatatcggcgagaaaccttttgtgtgtaatgttagcgagaagggtctagaactgagccctccccacgcgtcggaggcgagccagatgtcttag

SEQ ID NO: 141332 - DNA, 81 bp, synthetic construct
  misc_feature 1..81: note = Description of Artificial Sequence: Synthetic coding sequence
  source 1..81: mol_type = other DNA
atgtatacaagcgaagagaagtgtaaccaacgaactcagaaaaggaagatatacaacgtgtgtccgcgcaaaggcaaatag

SEQ ID NO: 141333 - DNA, 1221 bp, synthetic construct
  misc_feature 1..1221: note = Description of Artificial Sequence: Synthetic coding sequence
  source 1..1221: mol_type = other DNA
atggcgtctactgaagaacagtacgacctcaaaattgtcaaggttgaggaagacccaatctgggaccaagaaacccacctgaggggaaataacttctccggccaggaagcttctaggcagctattccggcaattttgttaccaagagacacccggaccgagggaagcactgtcacgactgagggagctttgccatcagtggctgcggccagagattcacactaaagagcagattctggagcttctcgttctggaacagttcctcacaattctccccgaagaactccaggcttgggtgcgggaacaccaccccgaaagcggggaggaggctgtggctgtcgtggaggatctggaacaagaattgtctgaacctggcaaccaggcgcctgaccacgagcacggccactctgaagtgctcctggaagatgtcgagcacttgaaggtgaaacaagaacctactgacattcaactgcagcccatggttactcaactgcgctacgagtccttttgcctgcaccaatttcaggaacaggatggagagagtatacccgagaaccaggagctggcgtcaaagcaagagatcctgaaggaaatggaacatctgggggattcaaagttgcagcgggacgtgagcctcgacagtaagtacagggagacctgcaagcgcgatagtaaagctgaaaaacaacaggcccacagcacaggagaaaggcgccacaggtgtaacgagtgcggtaaatctttcaccaagtcctccgtgctcatcgagcatcagagaatccataccggagaaaaaccttacgagtgcgaagagtgtgggaaggccttctcgcggcggtcctcgctgaatgagcatcgccgatcccataccggggaaaaaccatatcagtgcaaagagtgtggcaaggccttctctgcaagcaacgggttaacgcggcacagacggatccataccggcgagaaaccatacgaatgcaaggtttgcggcaaagcctttctcctcagcagttgccttgtgcagcaccagcgaatccacactggcgaaaagcgctatcagtgccgggagtgtggcaaggctttcattcagaatgcgggactgttccagcaccttagagtgcacaccggtgaaaagccctaccagtgttcgcagtgttcaaaactgttcagcaaacgcaccctacttaaaaagcaccagaagatacataccggagaaagaccttag

SEQ ID NO: 141334 - DNA, 1221 bp, synthetic construct
  misc_feature 1..1221: note = Description of Artificial Sequence: Synthetic coding sequence
  source 1..1221: mol_type = other DNA
atggcttctaccgaagagcagtatgatctaaaaatcgtaaaagtggaggaagatcctatttgggaccaagaaacacacctgcggggaaataacttctccggccaggaggcatctagacaattgtttcggcagttctgctaccaggaaacccctggtcctcgcgaggcgctgtctcggttgcgtgagttgtgtcatcaatggctcaggcctgagattcataccaaggagcagattttggaattgctcgttcttgagcagtttctaaccatactgccagaggaactgcaagcttgggttagagagcatcatccggaatcgggggaagaggcagtggccgtggtcgaagacctagagcaggagctgtctgagccagggaatcaggctcctgaccacgaacatggacactctgaagttcttctggaagatgttgaacatctaaaagtgaagcaggagccaactgacattcagcttcaaccaatggtcacccagctccgatatgagagtttctgtttgcaccagtttcaggaacaagacggagagagtattcccgaaaaccaggaactggcctctaagcaagaaatcctgaaggaaatggaacatctgggcgattctaagctccaacgcgacgtatccctggacagtaaataccgggagacatgcaagcgggatagcaaagccgagaagcagcaggctcactcgacgggtgagaggcggcaccgctgtaacgagtgtggaaagtcttttacaaaatcgtccgtgctaatcgagcatcaacgaatccacactggagaaaagccctacgaatgtgaggagtgcgggaaagcgtttagccggcgatctagcttgaacgaacacaggagatcccacaccggagagaaaccttatcagtgcaaggagtgcggaaaagcattctctgcctctaatggtctgactcgccatcgccgaatacatacaggggagaaaccgtacgagtgtaaggtgtgcggtaaggccttcctcctctcaagctgtttggtgcaacaccagaggatccataccggagagaagaggtaccagtgtagggaatgtgggaaggcatttatacagaacgctgggcttttccaacatctcagggtgcacactggggaaaagccataccagtgcagtcaatgctccaaattgttctctaagagaacactgctcaagaagcaccaaaagatacacacgggggagaggccatag

SEQ ID NO: 141335 - DNA, 1221 bp, synthetic construct
  misc_feature 1..1221: note = Description of Artificial Sequence: Synthetic coding sequence
  source 1..1221: mol_type = other DNA
atggcatctacagaggaacagtacgacctgaagatcgtgaaggtggaagaagacccaatctgggatcaggagactcacctacggggtaacaacttttctggtcaagaagccagccgccagctcttcaggcaattttgttaccaggagacccccggccctcgtgaggctctttctcggctgcgagagctgtgccaccaatggctgcgccccgaaatacatactaaagaacagatcctggagctacttgtcctggaacaatttctcaccatactccctgaagaactacaggcttgggtgcgggagcaccatcctgagtcaggcgaagaagccgtcgcggttgtggaggatctggaacaggaactcagcgagcctggaaaccaggcccccgaccatgagcatggccatagtgaggttctgttggaggatgtggaacatctgaaggtcaaacaggaaccgacggacattcagctgcagccgatggtgactcagctgaggtacgaaagcttctgccttcatcagtttcaggaacaggatggagaaagcatccctgagaatcaagagctcgcaagtaagcaagaaatccttaaggaaatggaacacctgggggatagtaaactgcagagagacgtgtctttagattcaaagtacagggagacgtgtaaaagggactctaaggctgagaaacaacaggcccactctacaggagaacggcggcatagatgcaacgagtgtgggaagagtttcactaaatcaagcgtcctgatcgaacatcaacggattcacacaggcgaaaagccatatgaatgtgaggaatgtggcaaagctttcagcaggcgctctagtcttaatgaacatcgaagaagtcataccggcgaaaagccttatcagtgtaaggagtgtggcaaagcttttagtgccagcaacggcctgaccagacatcggaggatccacaccggagagaagccctatgagtgtaaagtgtgtgggaaagccttcctgctgagctcatgtctggtacaacaccagaggatccacacaggcgaaaagcggtatcaatgtcgcgagtgcggtaaggcctttattcagaatgctggactattccagcatctgagggtacatactggcgagaagccataccagtgcagtcagtgctccaagcttttctctaagaggacgctgctgaaaaaacaccaaaagattcataccggagagcggccttag

SEQ ID NO: 141336 - DNA, 324 bp, synthetic construct
  misc_feature 1..324: note = Description of Artificial Sequence: Synthetic coding sequence
  source 1..324: mol_type = other DNA
atggcctctaccgaggaacagtatgacctgaaaatagttaaggtcgaagaagatcctatctgggaccaggagacccacctgcggggaaataactttagcgggcaagaggcaagccggcagctgttccggcaattttgctaccaggagacccccggtccgagggaagctctgagccggttgcgcgagctttgccaccaatggttaaggcccgaaatccatacaaaggagcagattcttgaattactcgttctggagcagtttctgacgattcttccagaagagctgcaagcctgggtccgcgagcaccacccagaatccggctag

SEQ ID NO: 141337 - DNA, 237 bp, synthetic construct
  misc_feature 1..237: note = Description of Artificial Sequence: Synthetic coding sequence
  source 1..237: mol_type = other DNA
atggcatcaacagaagagcagtatgacctgaagatagtcaaggtggaggaagatcccatttgggatcaagaaacgcacctccggggcaacaacttctcaggtcaggaggcctccagacaattgtttaggcagttctgctatcaggaaaccccaggacccagggaagcgctcagcagactcagggaattgtgtcaccagtggcttcgtccagagattcatactaaagagcaaatctag

SEQ ID NO: 141338 - DNA, 1221 bp, synthetic construct
  misc_feature 1..1221: note = Description of Artificial Sequence: Synthetic coding sequence
  source 1..1221: mol_type = other DNA
atggcctccactgaagaacaatacgatctgaagatcgtgaaggtggaggaagaccccatctgggaccaagagacacacctgcgtggtaacaacttctctggacaggaggcaagcagacagttgttcagacaattttgctaccaggaaacgcctggacctcgggaagccttgtcccggctgagagaactctgccaccagtggctgcgccctgagatccatacgaaggagcagattctggagctgctcgttctcgagcagttcctgaccattctgccagaggagctgcaggcatgggtgcgcgagcatcatcccgaatcaggagaggaggcagtcgcagtcgtggaagacctggagcaggaattatccgagcctggcaatcaggccccggaccacgagcatggacactccgaagtcctcctggaagacgtagagcacctaaaggtgaagcaggaacccactgatatccagctccagccaatggtcacccagctccgatacgaatctttctgcctgcaccagtttcaggagcaggacggcgagtctattcccgagaatcaggagctggcaagtaagcaagaaattttgaaagagatggaacaccttggcgacagcaaactgcagcgggacgtgagtcttgatagtaagtaccgtgaaacctgtaaacgcgatagtaaagcggagaaacagcaggcccattctactggagaaagacgtcatagatgcaatgagtgcggcaagtcgtttacaaagtcgtcagtcctaatcgaacaccagaggatccatactggggagaagccctatgaatgtgaagagtgtggcaaggccttcagtcggcgtagctcactgaacgaacatagacgttcccatacaggcgagaagccataccagtgtaaagagtgtggcaaggccttttccgcttcaaatggcctaactcggcacagacgcatccatacaggtgagaaaccatatgagtgtaaagtatgtggcaaggcatttctgctgtccagctgcctcgtgcagcatcaaagaatacacacaggtgagaagcgctaccaatgcagggagtgtgggaaagcttttattcagaacgctggattgtttcagcacttgcgagtccatacaggagaaaaaccttatcagtgttctcaatgcagcaagctcttctcaaaacggacactcctgaaaaagcaccagaaaatccacacaggagagcgcccttag

SEQ ID NO: 141339 - DNA, 54 bp, synthetic construct
  misc_feature 1..54: note = Description of Artificial Sequence: Synthetic coding sequence
  source 1..54: mol_type = other DNA
atggcatccacagaggaacagtatgacctgaaaattgtcaaggtagaggaatag

SEQ ID NO: 141340 - DNA, 468 bp, synthetic construct
  misc_feature 1..468: note = Description of Artificial Sequence: Synthetic coding sequence
  source 1..468: mol_type = other DNA
atggcatcaacagaggagcagtatgacctgaagatcgtcaaggtcgaagaggatccaatctgggatcaagaaacgcatctccggggaaataacttctcaggacaagaggcgtctcgacagctcttccgtcagttttgttatcaggagacccccggccctagagaagccctgagtcgcttgcgcgagctgtgccaccagtggctcagacctgagatacacacgaaggagcagatcctggagctcctggtgttagagcaatttctgaccatattacccgaagaactgcaggcctgggtccgagagcaccaccctgaaagcggggaggaagctgtagcagttgtggaagatctcgagcaagaactgtcggagccgggaaaccaggcgccggaccacgaacacggccactctgaggtgttactggaagacgtagaacatctcaaagtgaagcaggagcctactgatatctag

SEQ ID NO: 141341 - DNA, 75 bp, synthetic construct
  misc_feature 1..75: note = Description of Artificial Sequence: Synthetic coding sequence
  source 1..75: mol_type = other DNA
atggcaagcactgaggagcagtatgacctgaaaatagtaaaagtggaggaagatccgatatgggatcaagaatag

SEQ ID NO: 141342 - DNA, 312 bp, synthetic construct
  misc_feature 1..312: note = Description of Artificial Sequence: Synthetic coding sequence
  source 1..312: mol_type = other DNA
atggcaagcactgaagagcagtacgatttaaagatcgtcaaggtcgaggaagatccgatttgggaccaggaaacccaccttcggggtaataacttcagtgggcaggaagccagccgccaactgtttagacaattttgttaccaggaaactcctggtcctcgggaagcgttaagccgcctgcgcgaactgtgtcaccagtggttaagacctgagatccacactaaggagcagatactcgagttactggtcctagagcagtttctcactatcctccctgaggaactacaggcttgggtgcgggagcatcactag

SEQ ID NO: 141343 - DNA, 447 bp, synthetic construct
  misc_feature 1..447: note = Description of Artificial Sequence: Synthetic coding sequence
  source 1..447: mol_type = other DNA
atggcctctaccgaagagcaatatgatctcaaaatcgtgaaagtggaggaagaccccatttgggaccaggaaacacacctcagggggaacaacttctctggccaggaggcctcccggcagctattcaggcagttctgctaccaagaaacgcccggcccgcgggaagctctgtcgcgacttcgagagctctgccaccagtggctgagacctgaaatccacactaaagaacagattctggaactgctcgtattagaacaatttcttacaatcctgcctgaagagcttcaggcctgggtgcgcgagcatcaccccgaaagtggagaggaggctgtggccgtcgtggaagacttggagcaggagcttagcgaacccgggaaccaggctcctgaccatgagcacgggcacagcgaagtgctgctggaggatgtggaacatctaaaagtgtag

SEQ ID NO: 141344 - DNA, 654 bp, synthetic construct
  misc_feature 1..654: note = Description of Artificial Sequence: Synthetic coding sequence
  source 1..654: mol_type = other DNA
atggcttcaacggaagagcagtacgatttgaagatagttaaagtggaggaggatcctatctgggatcaggaaacacatttaaggggcaacaacttcagtggccaggaggcgagtaggcagttattccggcagttctgttatcaggaaactcccggaccccgggaggccttgagtaggctgagagagttatgtcatcagtggctgcgacctgaaattcataccaaggagcagatactggagctgctggtactggagcaatttctgacaatactgccagaggagctccaagcatgggttcgcgaacaccaccccgagagtggcgaagaagctgttgctgtcgtcgaagacctggaacaggaactgagcgaacccgggaatcaagcacccgatcacgaacatggacattccgaggtactccttgaggatgtggaacacttaaaggtcaagcaagaaccgactgatattcaactgcagccaatggtgacacagcttagatacgaaagcttttgcctccatcaattccaagagcaggacggcgagagcattcctgagaatcaggaactggcatcaaagcaggagatcctgaaagagatggaacacctaggcgatagcaaactgcagagagacgtcagcctggatagcaaataccgatag

SEQ ID NO: 141345 - DNA, 963 bp, synthetic construct
  misc_feature 1..963: note = Description of Artificial Sequence: Synthetic coding sequence
  source 1..963: mol_type = other DNA
atgcctaagaaaaaaacaggcgctcggaagaaggccgaaaatcggagggagagagagaagcagctccgagccagtcgcagcactatcgatctcgccaagcatccctgcaacgcaagcatggagtgtgataaatgtcaaaggagacaaaagaatagagctttttgttacttctgtaattctgtccagaagttacctatttgcgctcagtgcggtaaaactaagtgtatgatgaaatccagcgactgcgtcatcaaacatgctggcgtatactctacaggactggcaatggtcggggcgatatgcgacttctgtgaagcctgggtctgtcacgggaggaaatgcctctccacccacgcgtgcgcatgtcccctgacagatgctgagtgcgtggagtgtgaaagaggcgtgtgggaccatggaggacgaatctttagctgctctttctgccataacttcctctgcgaggacgaccagtttgagcatcaggccagctgtcaagtgttggaggccgaaacgtttaagtgtgtgagctgtaacaggctgggacagcattcttgccttcggtgcaaggcctgcttctgtgacgatcacacaaggtccaaggtatttaaacaagaaaagggtaaacaaccaccttgcccaaagtgcggtcatgagacacaagagacaaaagatttaagcatgtccaccaggagcctcaaattcggaaggcaaactggcggcgaggagggtgatggtgcctccggctacgatgcctattggaaaaacctctcctccgacaaatacggtgacaccagctatcacgacgaagaagaggacgagtatgaggcggaagatgacgaggaagaagaggatgagggtagaaaggactctgatacagagtctagcgacctcttcacaaacctgaacctgggccgcacctacgcttccgggtatgcccactacgaagaacaggaaaattag

SEQ ID NO: 141346 - DNA, 783 bp, synthetic construct
  misc_feature 1..783: note = Description of Artificial Sequence: Synthetic coding sequence
  source 1..783: mol_type = other DNA
atgcctcagtggaacgttacttccgtcaggggcaagactaagtgtatgatgaaaagtagcgactgtgtcatcaagcacgccggggtgtacagtaccggcctcgccatggtaggcgctatttgcgacttctgtgaggcatgggtgtgtcacggacgaaagtgtttgtcaacccatgcttgcgcatgccctctcaccgacgctgaatgcgtagagtgcgaaagaggcgtatgggaccacggcggcaggattttctcttgctctttctgccataattttctatgcgaagatgaccaattcgagcaccaagcctcctgtcaggtgctcgaggcggagacgttcaagtgtgtgtcctgcaacaggctagggcagcattcttgtttaagatgtaaggcctgtttctgtgatgatcacacaaggtctaaagtatttaagcaggagaaaggtaaacagcctccttgtccaaaatgcggacacgagacacaggagaccaaagaccttagcatgtctacacgatcgctaaaatttggtcgccaaactgggggcgaagagggggacggtgccagtggctatgacgcttactggaaaaacctgtctagtgacaagtatggcgatacatcctatcatgacgaggaggaggatgagtacgaagccgaggatgatgaagaagaggaggatgaaggccgtaaggactctgatactgaatcatctgacctcttcactaatctgaatttaggcagaacctatgcaagcggctacgcccactacgaagaacaagagaattag

SEQ ID NO: 141347 - DNA, 423 bp, synthetic construct
  misc_feature 1..423: note = Description of Artificial Sequence: Synthetic coding sequence
  source 1..423: mol_type = other DNA
atgccaaaaaagaaaacaggtgcaagaaaaaaggcagaaaaccgaagggagcgggagaagcagctccgtgcgagtaggagtacaatcgatctggccaaacacccatgcaatgcatccatggagtgtgataaatgccagcggaggcagaaaaaccgcgccttctgctacttttgtaattcagtgcagaagctgcccatatgcgctcaatgcggcaagaccaagtgtatgatgaaatcgtcggattgtgttattaaacacgccggagtgtactctaccgggctggcgatggtcggcgcgatttgcgatttttgtgaggcctgggtgtgtcatggacgaaaatgcctctcaactcacgcttgtgcttgtcctttaaccgatgccgaatgcgtggaatgcgagcggggtgtttgggatcatgggtag

SEQ ID NO: 141348 - DNA, 462 bp, synthetic construct
  misc_feature 1..462: note = Description of Artificial Sequence: Synthetic coding sequence
  source 1..462: mol_type = other DNA
atgcccaagaagaagaccggggccagaaaaaaagccgaaaataggagggagagagaaaagcagctgagagccagcagatcaaccattgatctggctaagcacccctgcaacgccagtatggagtgtgataaatgccaaaggcgacaaaaaaacagggcattttgttacttttgcaatagcgtgcagaaactgccaatctgcgcgcagtgtggcaaaaccaagtgtatgatgaagtcctcggactgcgtcataaagcacgccggagtgtatagcactgggctggcaatggtgggggcgatttgcgacttttgcgaggcatgggtgtgtcacggtaggaagtgtctgagcactcatgcctgcgcatgtcctctgacagatgcagagtgcgtcgaatgtgagcgcggagtgtgggatcatgggggcaggatcttttcctgcagcttttgccataactttctgtag

SEQ ID NO: 141349 - DNA, 690 bp, synthetic construct
  misc_feature 1..690: note = Description of Artificial Sequence: Synthetic coding sequence
  source 1..690: mol_type = other DNA
atgcctaagaaaaagactggcgcccggaaaaaggcggagaatagacgagagcgcgagaagcagctaagagcatccagatcaacaatagaccttgcaaagcacccatgcaacgcatccatggagtgcgacaagtgccaacgacgacaaaagaacagggccttctgttacttttgcaactctgtgcaaaagctccccatctgtgcacagtgcgggaaaaccaaatgcatgatgaaaagtagtgattgcgtgatcaagcatgcgggtgtgtacagtaccggactggctatggtgggtgctatatgtgatttctgcgaagcctgggtatgtcatggtagaaagtgcctgagcacccacgcctgcgcctgccctttgacagatgctgagtgtgtggaatgcgagcggggcgtgtgggatcacggtggcaggatcttctcatgttccttctgtcataacttcctgtgcgaggatgaccagttcgaacaccaagcgtcctgccaggtgctggaagccgagacctttaagtgtgtctcctgtaacaggttaggacaacactcttgcttacgctgtaaggcatgcttttgcgacgaccacactaggagcaaagtgtttaagcaggagaaaggtaagcagccaccgtgtccaaagtgtggccacgagacccaggagaccaaggatctctcaatgtcctag

SEQ ID NO: 141350 - DNA, 1392 bp, synthetic construct
  misc_feature 1..1392: note = Description of Artificial Sequence: Synthetic coding sequence
  source 1..1392: mol_type = other DNA
atggcacagggactcgttaccttcgcagatgtagcgatcgatttctcacaagaagaatgggcctgcctcaattccgctcagcgcgatctctattgggatgtgatgctcgagaattacagcaatttagtctctctcgatctggaatccgcgtatgagaataagtccctccctacagagaagaatatccatgagatccgggccagcaagcgtaacagtgaccgacggagtaagtctcttgggcgaaactggatttgtgagggcaccctggagcgcccccaaaggtcacgcggtagatacgtgaatcagatgatcattaattacgtcaaaaggccggccacaagagagggtactcccccacgcactcaccagagacatcacaaggagaactcttttgagtgcaaggattgtgggaaggcattctcacgcggctaccagctctctcaacatcagaaaattcatactggcgagaaaccttacgaatgcaaagagtgcaagaaggcatttaggtggggcaatcaactgacccagcatcagaagatccacacaggagaaaagccatacgagtgtaaagactgcgggaaagcctttcgctggggctctagcctggtaatccataagcgcatccacactggggaaaagccatacgagtgcaaagactgcgggaaagcatttcggcgcggagacgagctgacccagcaccagagatttcacacgggcgaaaaggactatgaatgcaaagattgtggcaaaacattctccagagtttacaaattaattcagcataaacgcatccattcaggagaaaaaccgtatgagtgtaaggactgtgggaaagcctttatttgcgggtcttctttaattcagcataagaggatccataccggcgaaaaaccgtatgagtgtcaagagtgcggcaaggccttcaccagggtgaattacttaacacagcatcagaagatccatacaggcgagaagcctcacgaatgtaaagagtgtggcaaagcctttcgctgggggagctcactagtgaagcacgagagaattcacaccggcgagaaaccttacaagtgtacagagtgtggaaaagcatttaactgtggctatcacctcacccagcacgagcgaattcatactggagaaacgccgtacaagtgtaaagaatgcggcaaggcctttatttatggcagtagcctggtaaaacacgagcgaattcatacgggcgtgaaaccgtatggttgtaccgagtgcggcaagagcttcagccacggccatcagctaacccagcatcagaagacacactctggggcaaagtcctatgaatgtaaagagtgtggcaaggcctgcaaccacctgaatcatcttcgagagcaccagcgaattcataactcatag

SEQ ID NO: 141351 - DNA, 1392 bp, synthetic construct
  misc_feature 1..1392: note = Description of Artificial Sequence: Synthetic coding sequence
  source 1..1392: mol_type = other DNA
atggcccagggcctggtaactttcgcagacgtggccattgactttagccaagaggagtgggcttgtctcaattctgctcagcgggatctctactgggatgtgatgttggagaactacagtaacctcgtatcacttgacttagaaagcgcttacgagaacaagtccctcccaacagaaaagaacatccacgaaatccgggcctcgaagcgaaacagtgatcggcggagcaaaagcttggggagaaattggatttgcgagggcacactggaaagacctcagagaagccgcggacggtatgtgaatcagatgataattaactatgtcaagcgacccgccacacgagagggaaccccacccaggacacaccaacgccatcataaagaaaacagcttcgaatgtaaggattgcggtaaggctttttctcggggctaccaattgtcccagcaccagaaaattcacaccggggagaaaccgtacgaatgcaaggaatgcaagaaggcattcaggtgggggaaccagttgacacagcatcaaaagattcacacaggggaaaagccatacgagtgcaaggactgcggtaaggccttccgctggggcagctcactggtgatccataaaagaattcatacgggagagaaaccctacgagtgtaaggactgtggcaaagcctttcgccggggagatgagctaacacagcaccagaggttccatacgggagaaaaagattatgagtgtaaggactgcggtaagacgtttagtagggtttataagctcatccagcataagcgcattcactctggtgagaagccctatgaatgtaaggactgtggcaaggcgttcatctgcggcagctctttaatccaacacaagcgaattcacacaggagagaaaccatacgagtgccaggaatgcggcaaagcgtttacccgtgtgaactacctgactcagcatcaaaaaattcacactggagagaaaccccacgaatgtaaagagtgtggaaaagcgttccggtgggggtcatcactggtgaagcacgagcgcatccacacaggggagaaaccgtacaagtgtaccgaatgtggcaaagcgttcaactgcggctaccacctgacacaacacgagagaattcacactggcgagaccccgtataagtgtaaagagtgcgggaaggcatttatatatgggtcatcattggtaaaacatgagaggattcatactggggtaaagccctatggctgtaccgagtgtggcaagtcattctctcacgggcaccagctgacacagcatcaaaagacccatagtggggctaagagctacgaatgcaaagaatgtggtaaggcctgtaaccacctgaaccatctcagagagcatcaaaggattcacaacagctag

SEQ ID NO: 141352 - DNA, 1392 bp, synthetic construct
  misc_feature 1..1392: note = Description of Artificial Sequence: Synthetic coding sequence
  source 1..1392: mol_type = other DNA
atggcccagggtctggtgactttcgccgatgtggccatcgacttttcccaggaggaatgggcctgcctaaattcagcccagcgggatttatactgggatgtaatgctggaaaattactctaatctggtcagtttagacctcgaaagcgcatatgagaataaatccctgcctacagagaaaaacatccacgagatccgtgctagtaagcgaaattcagaccgtagaagcaagtccctcggcaggaattggatctgtgagggcaccctggagagacctcagcgctctcgcgggcgatacgtgaaccagatgataatcaattacgtcaaacgacctgcgacccgagaaggaacaccacccaggacacatcagcggcaccataaagagaattcttttgagtgcaaggattgtggaaaagctttcagcaggggataccagctctcccagcatcagaagatccacacgggggagaagccgtacgaatgtaaggagtgcaagaaagcttttcggtgggggaatcagcttacccaacatcaaaagatccacactggcgaaaagccatatgagtgcaaggactgtggtaaagcttttcggtggggttcttccctggtgattcataaaagaatccatacaggagagaaaccgtatgagtgcaaagattgtgggaaggccttccgccgcggcgatgagctgactcagcatcagcgattccataccggggagaaagactatgaatgcaaggattgtggaaagacttttagcagggtttacaagctcatccagcataagcgaattcatagtggcgagaagccctacgagtgcaaagactgcgggaaagcgttcatttgtggatccagtctgatccagcacaagcgtatccacactggtgaaaaaccatacgagtgtcaggaatgtgggaaggcgttcacacgtgtgaattatctcactcagcaccaaaagatccataccggtgaaaagcctcacgaatgtaaagaatgtggcaaagcttttcgctggggttcctccctggtgaaacatgaacgaatccacaccggtgagaaaccatacaagtgcacagaatgtggaaaggcgttcaactgtgggtatcacctgactcagcatgagagaattcacaccggggagaccccttacaagtgtaaggagtgcggcaaagcattcatctatggtagttcgctggtgaaacacgagcggatccacacaggcgttaaaccatatgggtgcacagaatgcgggaagagcttctcacatggacatcagctgacacagcaccagaaaacgcattccggtgctaaaagttacgaatgcaaagaatgtggcaaggcctgtaatcatctcaatcatctcagggagcaccaacgtattcataactcctag

SEQ ID NO: 141353 - DNA, 192 bp, synthetic construct
  misc_feature 1..192: note = Description of Artificial Sequence: Synthetic coding sequence
  source 1..192: mol_type = other DNA
atggcgcagggattagtcactttcgccgacgttgctattgacttctcacaggaggaatgggcctgcctgaatagtgctcagcgagacctgtactgggacgtgatgctagagaattactcgaatctcgtgtccctggacctagagtctgcttacgaaaacaaatccctgccaacagaaaagaacattcattag

SEQ ID NO: 141354 - DNA, 258 bp, synthetic construct
  misc_feature 1..258: note = Description of Artificial Sequence: Synthetic coding sequence
  source 1..258: mol_type = other DNA
atggctcagggactggtgaccttcgccgatgttgctattgatttttcccaggaagagtgggcatgtctgaacagtgcccaacgcgatctgtactgggatgtgatgctagagaactattcgaacctggtgtcactagaccttgaatccgcttatgagaataagtcccttcccacagaaaagaacatccatgagatcagggcttcaaaaaggaactcggaccgccgctcaaagagtctgggtagaaattggatctgctag

SEQ ID NO: 141355 - DNA, 201 bp, synthetic construct
  misc_feature 1..201: note = Description of Artificial Sequence: Synthetic coding sequence
  source 1..201: mol_type = other DNA
atggctcagggccttgtgacctttgcagatgtcgcgatagatttctcacaagaagaatgggcttgtcttaattctgctcagagggacctgtactgggatgtcatgttagagaattacagtaatctcgtttccttggacctcgaatcagcctacgaaaataagagtctgcccacggagaagaatatacatgagatcagatag

SEQ ID NO: 141356 - DNA, 195 bp, synthetic construct
  misc_feature 1..195: note = Description of Artificial Sequence: Synthetic coding sequence
  source 1..195: mol_type = other DNA
atggcccagggactggtgaccttcgccgatgtagccatcgactttagtcaggaggagtgggcatgtctcaacagcgctcagagagacttgtactgggacgttatgcttgaaaactactccaacctggtctcattggaccttgagtctgcctacgagaataaatctttaccaactgaaaaaaacattcatgagtag

SEQ ID NO: 141357 - DNA, 534 bp, synthetic construct
  misc_feature 1..534: note = Description of Artificial Sequence: Synthetic coding sequence
  source 1..534: mol_type = other DNA
atggcccaagggctggttactttcgctgacgttgcaattgacttcagccaggaggagtgggcttgtctgaattccgctcaaagggatctgtattgggacgttatgttagagaattacagcaacctggtgagcctggacctcgagagtgcctacgaaaataaatccctaccaaccgaaaaaaatatacacgaaattagagcctccaagcgaaatagtgaccggcggagcaagtcccttggaagaaactggatttgtgagggcacactggaaaggcctcagcgcagtagaggacgctatgtgaatcaaatgataatcaactacgtgaaacgcccagccacccgagagggcacccccccaagaacccaccagagacatcacaaggaaaacagtttcgagtgcaaagattgcggcaaagccttctctagagggtatcagctctctcaacatcagaaaattcatactggagaaaagccttacgagtgcaaggagtgcaaaaaggccttccgatggggcaatcagttgacccagcattag

SEQ ID NO: 141358 - DNA, 264 bp, synthetic construct
  misc_feature 1..264: note = Description of Artificial Sequence: Synthetic coding sequence
  source 1..264: mol_type = other DNA
atggcccaggggcttgtgacttttgctgatgtggcaatcgatttttcccaggaagagtgggcctgcctcaacagtgctcagagagacctgtattgggatgtgatgctggaaaattattccaacctggtgagtctggacctggaaagtgcctatgagaataaatcactgcccacagagaagaacatccacgaaatccgggcttccaaaagaaattcggataggcgctcgaagagcctcggtagaaattggatctgtgagggttag

SEQ ID NO: 141359 - DNA, 144 bp, synthetic construct
  misc_feature 1..144: note = Description of Artificial Sequence: Synthetic coding sequence
  source 1..144: mol_type = other DNA
atggctcaagggttggtaaccttcgcagacgtggcaatcgactttagccaggaagagtgggcttgcttgaactcagcgcagagggacctgtattgggatgtcatgctggaaaattacagtaacttggtttcacttgatctctag

SEQ ID NO: 141360 - DNA, 1392 bp, synthetic construct
  misc_feature 1..1392: note = Description of Artificial Sequence: Synthetic coding sequence
  source 1..1392: mol_type = other DNA
atggcacagggactggttacatttgcagacgtcgcgattgacttcagtcaagaggagtgggcctgccttaacagcgcgcaaagagacttgtactgggacgtgatgctagagaactattccaatctggtatccctagatctggagtcagcctatgagaataagtccttacctaccgagaaaaacatccatgagatacgcgctagcaagcgtaatagcgaccggcgatcgaagagtctgggacgtaattggatttgtgagggcacgttagagcgaccgcagcgttcaagaggcaggtacgtcaatcagatgatcatcaattacgtcaagagaccggccacgagggaaggcacgccaccccggacccaccagcgccaccacaaggagaattcatttgagtgcaaggactgtggcaaggcctttagcaggggttatcagctgtcacagcaccagaagatccacactggcgagaaaccttatgagtgtaaggagtgtaagaaagctttccggtggggcaaccagttgactcagcaccaaaagattcacaccggagagaaaccttacgagtgtaaagactgtggaaaagcctttaggtggggaagctctctggtgattcacaagaggattcacactggagaaaaaccatacgagtgcaaagactgcggaaaagcatttagacggggcgatgaattaacacagcaccagaggtttcacactggggagaaggattacgagtgtaaggactgcgggaaaaccttttccagagtgtataagctgatccagcacaagaggatacacagcggcgagaagccctacgaatgtaaggactgcggaaaggcctttatttgtgggtcaagcctgatccagcataaacggatccatactggggaaaaaccttatgagtgccaagagtgcgggaaggccttcaccagggtgaactacctgacacagcatcagaaaatccacacgggcgaaaaacctcacgaatgcaaagagtgtggcaaggccttccggtgggggagttctcttgttaagcatgagcgcattcacactggggaaaagccttataaatgcactgagtgcgggaaggctttcaattgcgggtaccacctcacccagcatgagaggatccatacgggggaaactccttacaaatgtaaagaatgtggcaaagcattcatctacggatcctctctggtaaaacacgaacggatccacacaggtgtaaagccatatggatgcacggagtgcggtaagagctttagtcatgggcatcagctcactcaacaccagaagacacatagcggcgctaaatcctacgaatgcaaggaatgcggaaaggcgtgcaaccatctcaaccacctgagggaacaccagaggatccacaatagctag

SEQ ID NO: 141361 - DNA, 318 bp, synthetic construct
  misc_feature 1..318: note = Description of Artificial Sequence: Synthetic coding sequence
  source 1..318: mol_type = other DNA
atggcacagggattggttaccttcgctgatgttgctatcgacttttcccaggaggagtgggcatgcttgaattccgcgcagagggacctgtattgggatgtgatgctggaaaattatagtaacctagtctcccttgacctcgaatccgcctatgagaacaaaagcctgcctaccgagaagaatattcacgaaattcgtgcttcaaagcggaactccgatagaaggtccaaatcactgggacgaaactggatttgtgaaggcactctggaaagaccgcagcggtctcggggtaggtacgtgaatcagatgattatatag

SEQ ID NO: 141362 - DNA, 1392 bp, synthetic construct
  misc_feature 1..1392: note = Description of Artificial Sequence: Synthetic coding sequence
  source 1..1392: mol_type = other DNA
atggcccagggacttgtcacatttgccgacgttgcgatagattttagccaagaagaatgggcatgtctgaacagcgctcaaagggatctgtactgggacgtaatgctggaaaactacagtaacctcgtctcactagacctggaatccgcttatgaaaacaaatcactcccaaccgagaaaaacattcacgagattcgtgcaagtaaacgaaactctgacagacgtagcaaaagcttgggccggaactggatctgcgaaggaacactagagcggccccaaagaagccgcgggcgctacgttaaccagatgattatcaactacgtgaagaggccagccacaagagaggggactccccctcgcacacaccagaggcatcacaaggagaactctttcgagtgtaaggactgtggaaaagccttctctagaggctatcagctctcccagcatcagaagattcatactggcgaaaagccctacgaatgtaaagagtgcaagaaagccttcaggtggggtaaccagctgactcagcatcaaaaaatccacactggcgaaaaaccatacgagtgcaaggattgcgggaaagctttcagatggggttcttcccttgttattcacaagagaatacataccggagagaagccctacgaatgcaaggattgcggaaaggcttttagacgcggggacgagttgacgcagcatcagcgcttccataccggagagaaggactatgaatgcaaagattgcggtaaaactttctcacgagtctacaaacttatccagcacaagcggatccatagcggggaaaaaccgtacgaatgcaaggattgcgggaaagcctttatatgcgggtcctctctgatccagcacaagcggattcacaccggggagaagccttacgaatgtcaggaatgcggtaaggcctttacaagagtgaactacctgacccagcaccagaagatccacactggcgaaaaaccccatgagtgcaaagaatgcgggaaagcgttccgatgggggtcatcactagtgaaacatgagagaatccatactggggaaaaaccatacaaatgtacggaatgtgggaaggccttcaattgtggctatcatctgacacagcacgagaggattcataccggcgagaccccatacaagtgcaaggagtgcggcaaggcctttatctacggatcctccttggtaaaacacgagcgcatacataccggcgttaagccttatggatgcacagagtgtgggaagtctttttcacacggccaccagctgacacagcatcagaagacccactcaggtgccaaaagctacgaatgcaaggagtgcgggaaggcgtgtaaccatttaaaccacttaagggagcaccagaggattcacaactcttag

SEQ ID NO: 141363 - DNA, 1392 bp, synthetic construct
  misc_feature 1..1392: note = Description of Artificial Sequence: Synthetic coding sequence
  source 1..1392: mol_type = other DNA
atggcccaggggttggtcacattcgccgacgtggccatcgactttagccaggaagaatgggcctgtctcaattcagcgcagagagatctttactgggatgttatgctagagaactactctaacttagtaagtttggatctcgagtccgcgtacgagaataaaagcctgcccaccgaaaagaatatccatgagattcgggcctcaaaacgaaactctgatcgacgatccaaatccctgggtagaaactggatctgtgagggaacccttgagagaccgcagaggagccgcggaagatatgtgaaccagatgattatcaactacgtcaagcgccccgccactcgtgaagggacccctcccagaactcaccagcggcatcacaaggagaactcgtttgagtgcaaggactgcgggaaagcgttttctcggggataccagcttagtcaacatcagaagattcacacaggagaaaaaccttacgaatgcaaagagtgtaaaaaagccttccgctggggcaatcagctcactcagcatcagaagattcacactggtgagaagccatatgaatgcaaagactgcggcaaagctttccggtgggggtcctctcttgtcatccacaaacggatacacactggagaaaagccatatgagtgtaaggattgtggaaaagcctttcggagaggcgacgaactgacgcagcatcagcgctttcacaccggggaaaaggattacgaatgcaaagattgtggaaagacgtttagcagggtatataagctcattcagcataagcggatacatagcggagagaagccctatgaatgcaaagactgcgggaaagcatttatctgtggctcatccctgatccaacataaaagaatccacaccggcgaaaagccatacgaatgccaggagtgcggcaaagcattcacccgcgtgaactatctgactcaacatcagaagattcataccggagaaaaacctcacgagtgcaaagaatgtggtaaggcttttcgttggggcagcagtttggttaaacacgagaggattcacacaggggaaaagccatataaatgcactgagtgtggtaaagccttcaattgtggatatcatcttacccagcatgaacggatccataccggcgaaaccccctacaaatgcaaggaatgtgggaaggccttcatttatgggtcgagtctcgtgaagcacgagagaattcacaccggggtgaaaccgtacggctgtacagaatgtggcaagagcttctcacacggtcaccagctcacccaacatcaaaagacgcattcaggcgcaaagtcttacgaatgtaaggaatgcggaaaggcgtgcaaccatttaaaccatctgagagaacaccagcgcatccacaacagctag

SEQ ID NO: 141364 - DNA, 297 bp, synthetic construct
  misc_feature 1..297: note = Description of Artificial Sequence: Synthetic coding sequence
  source 1..297: mol_type = other DNA
atggcgcaagggctagtaacctttgctgatgtagccatcgacttcagccaggaagagtgggcatgcctgaatagcgcccaaagagatctgtactgggatgtcatgcttgagaattacagcaacctggtctctcttgacctggagtctgcgtacgagaacaaatctttaccgaccgagaagaatattcacgagattcgcgctagcaaacggaattccgaccggcgaagcaagtccctcggaaggaattggatctgcgaagggacattggagcgccctcaacgtagtagagggaggtag

SEQ ID NO: 141365 - DNA, 1392 bp, synthetic construct
  misc_feature 1..1392: note = Description of Artificial Sequence: Synthetic coding sequence
  source 1..1392: mol_type = other DNA
atggcccaaggtctcgtaacgtttgccgatgtcgccatcgacttttcccaagaagaatgggcctgtctgaactctgcccaaagagatctctattgggacgttatgctcgagaattactccaacctggtaagccttgatttagagtcagcatacgagaacaaatctctgcccacagaaaagaacattcacgaaatccgtgccagtaaaaggaactctgatcgacgctctaagtctcttggcagaaattggatatgcgaaggcaccctggaacgaccccagcgtagtcgggggagatatgttaaccagatgataattaactatgtcaaacgacccgccacgagagaaggtaccccccccaggactcaccagcgtcatcacaaggaaaattcttttgagtgcaaggattgcgggaaagcattctcacggggctaccagctgtcccaacaccaaaaaattcacacaggggagaagccttacgagtgtaaagaatgtaagaaggcgttccgatggggcaaccagctcacccagcaccagaaaattcatactggcgagaagccatacgaatgtaaagattgcggaaaagcatttcggtggggttcctcactggtgatacacaagaggattcacacaggcgagaagccatatgagtgcaaggactgtggaaaggccttccggaggggggacgaactcacgcagcatcagcgcttccacactggcgagaaagactacgagtgcaaggattgcggcaagacgttctctcgggtgtataagctgatccaacacaagcgcatccattcaggcgagaagccctacgaatgtaaggactgtggaaaggcattcatctgcggctcgagtctgatacaacataaacggatccacactggggaaaagccgtatgagtgtcaagagtgcggcaaggcctttacccgcgtgaattacctgacgcagcatcagaagattcacacgggtgaaaaaccccatgagtgcaaagagtgcggcaaggcttttaggtggggcagctccctggtaaaacacgagcggatacacactggcgaaaagccatataagtgtacggagtgcggcaaggcgttcaattgtgggtatcacctcacccaacacgagcggatccataccggtgaaaccccttacaagtgcaaggagtgtggaaaggcattcatctacggatcgagtctcgttaaacacgagcggatccatacgggagtcaagccgtatggatgcacagaatgcggaaagagcttttctcacggtcatcagctcacccagcaccagaagacacactcaggagccaaaagctacgaatgcaaagaatgcggaaaagcttgcaatcacttgaaccatctgagagaacaccagcggatccataacagctag

SEQ ID NO: 141366 - DNA, 504 bp, synthetic construct
  misc_feature 1..504: note = Description of Artificial Sequence: Synthetic coding sequence
  source 1..504: mol_type = other DNA
atggctcaggggttggtgaccttcgccgacgtggcaatagacttctcccaagaggagtgggcatgtctgaactctgctcagcgggacctatattgggatgtgatgctggaaaattattccaacctcgtgtctctcgatctggagtctgcttatgagaataaaagtcttccgacggaaaaaaatattcatgagatccgggcgtccaagcgcaatagcgacaggcgctccaagagtctgggccgtaactggatctgcgaagggactctggaacgaccccagagaagtaggggaaggtatgtgaatcagatgattattaactatgtaaagcgccccgctactagggaggggactccgcctcggactcatcaacggcaccataaagagaacagcttcgaatgcaaggattgcggcaaggccttctcacggggttaccagctaagccagcaccagaagatccacactggagagaagccgtatgagtgcaaggagtgtaaaaaagcctag

SEQ ID NO: 141367 - DNA, 303 bp, synthetic construct
  misc_feature 1..303: note = Description of Artificial Sequence: Synthetic coding sequence
  source 1..303: mol_type = other DNA
atggcacaaggtctggtcacattcgccgatgtggccattgactttagccaggaggaatgggcctgtctgaatagtgcacagagagacctttactgggacgtgatgctcgagaactactcaaaccttgtgtccctggacctggaaagcgcatacgagaacaagagtctgcctaccgagaagaacattcacgagatacgcgcttcaaagaggaattctgacagacgctccaagagcctggggcgaaactggatctgtgaaggtactctggaacgcccccagcgcagcagaggacgctacgtgtag

SEQ ID NO: 141368 - DNA, 1998 bp, synthetic construct
  misc_feature 1..1998: note = Description of Artificial Sequence: Synthetic coding sequence
  source 1..1998: mol_type = other DNA
atggagtcggttacatttgaggacgtggcagtcgagtttatccaggagtgggctctgttggattcagctcggaggagtctctgtaaatacagaatgctggaccagtgcagaacactggcctcaagagggacacccccttgcaagccttcatgcgttagtcagctggggcagcgagccgagcccaaggctactgagaggggaatcctgcgggcaacaggggtggcatgggaaagccagctgaaaccggaagagctgccctctatgcaggacctcctggaggaggccagtagccgggatatgcaaatgggcccaggcctctttttaagaatgcagcttgttcccagcatagaagagcgggaaacccccttaacacgggaggatcgccccgccctgcaggagcccccctggtcactgggatgcacagggctcaaggcagcgatgcagatccagagagtcgttattcctgttcccacacttggacaccggaacccctgggtcgctcgagattcagcagtgcccgccagagacccggcctggctgcaggaggacaaagtggaagaggaagcgatggcacccggcctgccaaccgcctgctcccaggaaccagtgactttcgccgatgtggcagtggtgtttacgccagaagagtgggtctttctggacagcactcagcggagtctgtaccgggatgtcatgctcgagaactatcgcaacctcgccagtgttgccgaccaattgtgcaagccgaacgccctgtcctatctggaagagagaggcgaacagtggactaccgacaggggcgtgctttccgatacctgtgctgaacctcagtgccaaccacaagaggccatcccgagccaggacacctttactgaaattctaagcatcgacgttaagggtgaacagccccagcctggagaaaaactctacaaatacaacgagctcgaaaaacccttcaattccattgaaccgctgttccaatatcaaagaatccacgccggggaagcctcgtgcgagtgtcaggaaatccgcaactcctttttccaatctgcccatctgatagtgccggagaagatccggtctggcgataagagctacgcgtgcaacaagtgcgaaaagtccttcagatatagctccgatttgattagacacgaaaagactcacaccgcagaaaaatgctttgactgtcaggagtgtgggcaggcgttcaaatattccagcaacctgaggagacacatgcggactcatacaggcgagaaaccctttgaatgctcccaatgcgggaagacattcactaggaactttaatctcatactgcaccagcggaaccatacgggggaaaagccgtacgaatgtaaggattgtggcaaggcattcaatcagccaagcagtctgcgctctcatgtacgaacccatacgggtgagaagcccttcgagtgtagtcagtgcggaaaggcttttcgcgaacatagcagcctgaaaactcatctgagaacacacactagagagaaaccttatgagtgtaaccagtgtggcaaaccgtttcgaacgtcaacccatttgaacgtacacaaacgtattcacacaggggagaagctttacgaatgtgccacctgtggtcaggtactctcacgtctgtctacactgaaaagtcatatgcgcacccataccggtgaaaaaccctacgtgtgccaggagtgtggcagggcattcagcgagccatcttccctacgtaagcacgctcgcacacacagcggaaaaaaaccttacgcttgtcaggagtgtggacgagccttcggacagagttcccatctgatcgtgcacgtacgcacccatagtgccggtcgcccataccagtgcaaccagtgcgaaaaggcctttcgtcactcctcttcgttgactgtgcacaagcgcactcacgtcggtagggagacaattagaaatggaagtctgcccctgagcatgagtcatccatattgcggtcccctggcaaattag

SEQ ID NO: 141369 - DNA, 549 bp, synthetic construct
  misc_feature 1..549: note = Description of Artificial Sequence: Synthetic coding sequence
  source 1..549: mol_type = other DNA
atggaatccgtcacattcgaagatgttgccgttgaatttattcaggaatgggcactgttggacagcgcaaggcgcagcctgtgcaaatataggatgctcgatcaatgtaggacactggccagtcgtggaacgcccccttgtaaacccagttgtgtaagccaactcggtcaaagggcagagcctaaagccactgagcgtggcatactgagagccaccggagtggcctgggagagccagttaaaacccgaagaactaccatcaatgcaggatttgttggaagaggcttcttctagggacatgcagatgggccctgggctgtttctgcgcatgcagctcgtgccaagcatcgaagaaagagagacacccctaacccgtgaggaccgaccggcactccaggagcctccctggtccctaggctgtaccctgcccctgctctcgttactgcttccatcttgtccagaacctcctctggtgcttctggattcttcttccgcacccgacaggcaccttgggtccactctggacacggaagcccggggaattccctag

SEQ ID NO: 141370 - DNA, 1671 bp, synthetic construct
  misc_feature 1..1671: note = Description of Artificial Sequence: Synthetic coding sequence
  source 1..1671: mol_type = other DNA
atgcagttagtgccttcaatcgaggaacgggaaaccccattaaccagggaggatcgtccagcactccaggaacccccttggagtttgggatgtactggactgaaagccgcaatgcagatacagcgagtggttattccagtgcctacactgggccatagaaatccctgggtggcaagggactccgccgtcccagcgagagatccagcatggctgcaggaagataaggtggaagaggaggccatggcacccggccttccaacggcatgtagccaggagccagtaacctttgccgatgttgctgtcgtgtttaccccggaggaatgggtgttcctcgacagtacccagagatccctgtatagggatgtcatgctggaaaactatcggaatctggcctcggtggccgatcagctgtgtaagcctaatgctctgagttacctggaggaacgcggggaacagtggactaccgatcgcggcgtgctgagcgacacttgcgccgagccacagtgtcagccccaggaggcgattccatctcaagacaccttcaccgaaattctgagcatcgatgtcaagggcgagcaacctcagccaggggaaaaactgtacaagtacaatgagctggaaaaaccatttaattcaattgaaccacttttccagtatcagaggatccacgccggtgaggcctcctgcgaatgccaggagatcagaaactccttttttcaatccgcccatctcatcgtgccagagaaaatccgatccggcgataaatcctatgcgtgtaacaaatgcgaaaagagtttcagatacagctcagacctgattcgccatgaaaagacccataccgcagaaaagtgcttcgattgccaggaatgcggtcaagcattcaaatattcttccaatctccgccgacacatgcgcactcacactggcgaaaagccctttgagtgttctcagtgtgggaagacttttactcgcaattttaatttgatcctccatcagaggaaccacacaggagagaagccatacgagtgtaaggactgcggaaaggctttcaaccagcctagcagtctcagatctcacgtgaggacccatactggcgagaaaccgtttgagtgtagccagtgtggcaaggcatttcgtgagcattcttctctgaaaacccatcttaggacccacaccagggaaaaaccttatgaatgcaatcagtgtggaaaaccatttcgtacatccacacacctgaacgtccacaaacggatccacacaggcgaaaagttgtacgagtgtgccacatgcggacaagttttgtcccggctgtccactctaaaaagccatatgaggactcataccggggagaagccttatgtgtgtcaggagtgcggaagggcgttttcagagcctagctcgttgcggaaacatgccaggactcactccggcaagaaaccctacgcctgtcaggagtgcggcagggctttcggacagagctcccaccttatcgtgcacgtgcgaactcattcagccggtaggccataccagtgtaatcaatgtgaaaaagccttccgccattccagttccctgacagtgcataagcggacacacgtcggtcgggagacaattcgaaacggatcgcttcccctctccatgtcccacccatactgcggtccgctggccaactag

SEQ ID NO: 141371 - DNA, 912 bp, synthetic construct
  misc_feature 1..912: note = Description of Artificial Sequence: Synthetic coding sequence
  source 1..912: mol_type = other DNA
atggagtccgttacgttcgaggatgtcgcagtcgaattcattcaggaatgggccctcctcgactctgctagacgctccctctgcaagtacaggatgttggaccagtgtcggaccttggcatctcgcggaacccccccttgtaagccaagctgtgtgtctcagttgggccagcgagctgagcccaaggcgaccgaacggggtatcctaagagctacaggagtggcgtgggagtcacagctcaagcccgaggagctgccatctatgcaggaccttcttgaagaagccagctcacgcgatatgcagatgggcccgggtctgtttctgcggatgcaactcgtgccctcaattgaggaacgggaaacaccgctaacacgggaggatcggcccgcccttcaggaacctccctggagtctaggttgcactggcttgaaggccgccatgcagatccaaagggtagtgatcccggtcccaacacttgggcacaggaacccatgggttgccagagattcagctgtgcctgcacgtgaccctgcctggttgcaggaggacaaggtcgaggaagaggcaatggcccccggccttccaaccgcatgctcacaggagcccgtgacattcgccgatgttgctgtcgtgttcactcccgaagagtgggtgttcctggacagcacccagcgctccctttacagagatgtgatgctggagaactatagaaatctggcgagcgttgcggatcagctgtgtaaacctaatgctctctcctacctggaggagcgcggggagcagtggaccactgataggggggtgctcagcgatacctgtgcagaaccacagtgccaaccacaggaggctatcccttcacaggacacattcacagagatcttgtccatcgatgtcaaaggccccccaaactag

SEQ ID NO: 141372 - DNA, 3360 bp, synthetic construct
  misc_feature 1..3360: note = Description of Artificial Sequence: Synthetic coding sequence
  source 1..3360: mol_type = other DNA
gcagccgaagagcggggatggcgacctcgccggtgtcgcagccaacggggaacatggcttaggaagccacgatcagaggtacccagaccatatgctccattgtcaggttcgcctccgatcaggtggagacggacccgctggagagccgcagctacacggcccctgggtcttgccggtccaaggtcacccctgagggcagcatgggtttgggcgccgtcccgcgtccggagacaacagcgacgtcggggcagacctggcgccgggagaggcatcgacgacctcgaagaagattccgattacaatccagccgaagacgaacccagaggccgtcaactgagacttcagcggcctacaccttctactccaagaccacgaagaagaccaggccggcctagaaagctgcctcggctggagatctccgaccttcccgatggtgtcgaaggggaacccctggtgagctcccagtcaggtcagtctcctcctgaaccccaggatcctgaagcccctagcagctcaggtccgggccatctcgtggccatgggaaaggtgagccgcactcctgtggaagccggagtttcccaatcggacgccgagaacgcagccccttcctgtcccgacgagcacgataccctgcctcgccggaggggtcgaccgtccaggaggtttctggggaagaaatacaggaaatactactacaagtctccaaaacctctgttgcgccccttcctgtgtcggatctgcgggtctagattcttaagccacgaggatttgaggttccatgttaattcgcacgaagccggcgaccctcagctttttaaatgcctgcagtgctcttatcgaagtcggcgatggagtagcctgaaagaacacatgtttaatcacgtcggtagcaaaccttacaagtgtgacgaatgctcctacacctccgtgtatcggaaagacgtgattagacacgccgccgtacactcgcgtgaccgtaagaagagaccagatcctacacctaagctgagcagctttccttgtcccgtctgcggacgcgtctacccgatgcagaaaaggctaacccagcacatgaaaactcattcaaccgaaaagccccatatgtgcgataaatgtggcaagagtttcaagaagcggtacacattcaagatgcatctcctgacccacatacaggcagtcgctaataggcggttcaaatgcgagttttgcgaatttgtttgtgaagacaaaaaggcgctcctcaaccaccagcttagtcatgtgtccgacaaaccttttaaatgtagcttctgcccctaccgcacctttagggaggacttcctcctcagccacgtcgcagtcaaacatacaggagcaaaaccgttcgcctgtgagtattgccacttttccacgcggcacaagaagaatctccgcctgcacgttcgatgtcgacacgcaagttcatttgaagagtggggtagaaggcatccagaagagcccccctcccgccgacgaccctttttcagtctgcagcagatcgaggagctgaaacaacaacactcagcagcccctggacctccaccctcttctcccggtccacctgagatcccacccgaggctaccacctttcagtcttcagaagcgccatccctgctctgttccgataccctcggtggagccaccatcatataccagcaaggggccgaggaaagtacagccatggcaacacagactgctctggatctcttgctgaacatgtccgctcagcgggaactagggggcacggccctgcaagtcgccgtggtcaaatcagaagatgtggaggctgggcttgcctcaccgggcggccagcccagcccagagggcgccaccccccaggtggtgacactgcatgtagccgaaccaggcggaggcgcggccgccgagtctcagctcggcccaccagacctgccacaaatcactttggccccaggacctttcggcgggaccggctacagcgtgatcaccgccccccccatggaggaaggcacctcagcccctggtacaccatacagtgaagagcccgccggggaggctgcacaggcagttgtggtttccgacacactgaaggaggctggaacccactatatcatggccaccgatgggacacaactgcaccatatcgagctcacagccgacgggagtatttcttttcccagccccgacgctttagcgtcaggcgccaagtggccgctgcttcagtgtggaggcctccctcgtgatgggccagagcctccttcccctgctaagacccattgcgtgggagacagccagtcatcagcttcatcaccaccggccacctctaaggcactgggcttagcggtacctccaagccctccttctgcagccaccgcggcttccaagaagttttcctgtaaaatctgcgccgaggcctttcctggcagagccgagatggaatcacacaaaagggcccacgcgggacctggagcattcaagtgtccagattgcccgttttcagcccgacagtggccagaggtccgggcacacatggcccagcattcaagcctgaggccccaccaatgctcacaatgtagtttcgcctctaagaacaaaaaagatcttcggagacacatgctcactcacactaaggaaaagccattcgcctgccatctgtgtgggcaacgcttcaatcgcaacgggcatctcaagtttcacattcaaagacttcattcacccgatgggaggaaatctggaaccccgaccgccagggcccccacacagacacccacccagactattatccttaattccgacgacgagacacttgctactctgcacaccgccttacagtcgtcacacggggtcctgggaccggaacgactgcagcaggctttgagccaggagcacataatagttgctcaggaacagactgtgacgaaccaggaggaagctgcctacattcaggagatcacaacggctgatgggcagaccgttcagcacctcgttacgagcgacaatcaagtccaatacatcatttcgcaggatggggtccaacatttgctgccccaggagtatgttgtcgtcccagagggacatcatatccaggtccaggaggggcaaataacccacatccagtacgagcagggcgcaccgttccttcaggagagccagatacagtacgttcccgtgtctcccggccagcagctagtgacccaggctcaattagaggccgctgctcacagcgcagtcacggccgtagctgacgcagcgatggcccaggctcagggtctcttcgggaccgatgagaccgttccagaacatatccaacagctccagcatcaaggaattgaatatgatgtaataacccttgccgatgactag

SEQ ID NO: 141373 - DNA, 4029 bp, synthetic construct
  misc_feature 1..4029: note = Description of Artificial Sequence: Synthetic coding sequence
  source 1..4029: mol_type = other DNA
atggaggagaacgaggtcgagtcctcgtccgatgcagctcctggccccggtcgtcctgaagagccttccgaaagtggattgggcgtcgggacatcagaagcagtgagcgccgactcttcagatgctgcagccgcgcccgggcaggcagaagccgatgacagtggcgtgggtcaatcatcggaccgcggaagccgctcacaggaggaagtatcagaatcaagctcttcagccgacccattacctaattcatacctgcctgactcctcctcggtttctcatggaccagtggctggcgtgactggtggccctcccgcccttgtccattcctcagccttgcctgaccccaacatgctcgtgtctgactgcaccgcgtcttctagcgacttggggagcgctatcgataaaattattgagagcactatcggcccggatctgatccagaattgcattacagttacaagcgctgaagacggaggggctgagaccacaaggtatctgatactgcagggaccggatgacggtgccccaatgactagccccatgtcctcttcaacactggctcatagtctcgccgcaattgaagccttagccgatggcccgactagcacttccacctgtctcgaggcccaggggggcccctccagcccagttcaactacctcctgccagcggggccgaggaaccagatctccagagtttagaggccatgatggaagtggttgtcgtgcagcagttcaaatgcaagatgtgccagtataggtcaagtaccaaagcgaccttgcttcgccatatgcgggaacgacactttcggcccgttgctgcggctgccgcagcggctgggaagaagggaagactcaggaagtggtctacttccactaagagccaggaggaagaaggtcccgaggaggaggatgatgacgacatcgtagatgccggagctatcgacgacttggaggaggacagtgactataatccagctgaggatgaaccacgcggaagacaattacgactgcagcgcccgacccccagcaccccgcggccacggcggagacccggtcgaccgagaaaattgccccgtctggagatctccgaccttccagacggcgttgaaggagaaccgctggtaagctcacagtccgggcagtctcctccagaaccccaagacccagaggcaccttccagcagtggaccaggtcacctggtggctatggggaaagtgtccaggacacctgtggaagctggcgtatcacagtcagacgctgaaaacgccgcaccatcttgtcccgacgaacatgacactctgcctcggaggagaggccggccctcccgccgatttctgggcaaaaaatacagaaagtattactataagtcgcccaagccccttctgaggcctttcctgtgccgcatttgtggctccaggttcctaagtcacgaagatcttaggttccatgtgaactctcatgaggcaggcgatccacaactcttcaaatgccttcagtgttcatacagaagccggcgctggtcctctttaaaggagcacatgtttaatcatgtagggtcgaaaccctataaatgcgacgagtgcagctacaccagcgtgtacagaaaagatgtcatccggcacgcagccgttcacagccgcgatcggaagaaaaggcccgaccccacacccaagctctcctcttttccatgccctgtgtgtggaagggtgtacccaatgcagaaacggttgacacaacacatgaagacgcattcaacggagaaaccacacatgtgcgacaagtgtggcaagagtttcaagaaacgctacacctttaaaatgcacctgctcacacacatccaagccgtcgccaacaggcggttcaagtgtgagttctgcgagttcgtgtgcgaggacaaaaaagcactcttgaatcaccagttgtctcacgtttcagataagccgttcaaatgttctttctgcccttaccggacttttcgcgaggacttcctgctgtcgcacgtagctgtgaaacataccggtgctaagccgttcgcgtgtgagtactgccacttttcaacaagacacaagaaaaatctgagactccacgtgagatgccggcacgccagtagctttgaagaatggggacgaaggcacccggaggaacccccgtcccggcggcggcccttcttctccctgcaacaaattgaagaactcaaacagcaacattctgcagcaccagggccgcctcccagctcacccggaccccctgagattccacccgaagctacaaccttccagagctcagaggccccatcactgctatgttccgacactctagggggtgccacaataatttatcaacagggggcagaggagtctacggccatggcaactcaaactgctctggatctgctcctgaatatgagtgcacagcgcgaactcggggggacggctctgcaggttgccgtcgtgaaatcagaagacgtcgaggccggcctggcatcacccggaggacagccgagtccagagggcgccacgcctcaagtggtgacactgcatgtggccgaacctgggggcggcgctgccgccgaatcgcagctgggccctccagatttgcctcagatcactcttgctcccgggccgtttggagggaccggatactctgttatcacagctcccccgatggaggaaggcacaagcgcccctggcaccccctatagcgaagagccggccggtgaagcagctcaggccgtcgtggtctcagacactctcaaggaggctgggactcattacattatggcaaccgatggcacgcagctccatcatatcgagctgactgcggacggtagtatttctttcccttctcctgatgctctggcttctggagctaaatggccattactgcaatgcggcgggctgccccgagacgggccagaaccacctagccccgcaaagacacactgcgttggtgactcccagtcctctgcgtccagcccgcccgcaacgagcaaagccctcggcttagccgtgcccccttcccctcccagtgcagcgacagccgccagtaagaaattcagttgcaaaatttgcgccgaagcttttcccggtcgcgcagagatggaatcccacaaacgggcccacgcgggccccggcgccttcaagtgcccagactgccccttctccgcaagacagtggcccgaggtccgggcccacatggcccaacactcctccctgagaccacatcagtgctcgcaatgttctttcgcatcaaaaaataaaaaggatctgagacggcacatgctaacccacaccaaagaaaaaccctttgcctgccatctgtgtgggcagcggttcaaccgaaatggccatcttaagtttcatatccagcgtctgcattcccccgatgggaggaaaagtggcacacccaccgcacgggcccccactcaaactccaactcagactatcattctgaattctgatgatgaaaccttggctacccttcatactgccttgcagagcagccacggtgtcctcgggcctgagcgcctgcagcaggcgctgtctcaagagcacattatcgtggcccaagagcagaccgtgaccaaccaggaggaggctgcatatattcaggagattaccaccgccgatggccaaacggtgcaacacttagtcacctctgacaaccaggtacaatacatcataagccaagacggggtccagcacctgctgcctcaggagtatgtagtcgttccagagggtcaccacatccaagtacaggaagggcagataacacatatacagtatgaacaaggagcacctttcctccaggaatctcaaattcagtatgtacctgtaagtcccgggcaacaactggtgacccaggcccagctagaggcggccgcacacagtgctgtgactgccgtggctgatgccgctatggcacaggcccaagggttgtttggaaccgacgagaccgttccagagcatattcagcagcttcagcatcagggtatcgagtacgacgtgattactctggccgatgattag

SEQ ID NO: 141374 - DNA, 3564 bp, synthetic construct
  misc_feature 1..3564: note = Description of Artificial Sequence: Synthetic coding sequence
  source 1..3564: mol_type = other DNA
atggccaccagctccatgcctgagtctgagcgcaacgtggccacaaaggccagtggggcccccatgacttcacccatgtccagcagtactctggcccatagtctggccgcaatcgaggctctggccgatggccccacatccacctcaacttgtttggaggcgcaagggggccccagctcccctgtccagctgcctccagccagcggcgctgaggagccagatctgcagtcactggaagccatgatggaggttgttgtggtgcagcagtttaaatgtaagatgtgtcagtatcgttccagcactaaagccacattgttgaggcatatgcgggaaaggcacttcaggccagtagccgcagcagctgctgccgccggcaaaaagggtcgcctgagaaagtggtccacatcaacgaaaagtcaggaggaagaaggcccagaagaggaagacgacgacgacatcgttgatgctggagccatcgacgatctggaggaggattccgactacaatccagctgaagatgagcccagagggcgccagcttcgattgcagagacctacccctagtacgccgcggccaagaaggagacccggccggccccggaagttgccgagactggaaataagtgatctgcctgacggggtggagggggagcctcttgtcagctcacagagcggacagtccccacccgaaccacaagaccctgaagccccttcttcctccggaccaggtcacctggtcgcaatggggaaggtcagtaggacccccgtggaagccggggtttcacagtccgacgccgagaatgcagccccgagctgccccgatgaacacgatacccttccaaggcgcagaggtcgtccatcccggcggtttctcggcaaaaagtatcgcaagtattactacaagagtcctaagccactgctgcggcctttcctctgcagaatttgcgggtcccgattcttgtcccacgaggacctccggtttcatgtgaacagccatgaagcgggcgacccacagttgttcaaatgcttgcagtgctcttacagaagccgaaggtggtcgtccctgaaggagcacatgtttaatcacgtgggctctaaaccttacaagtgtgacgagtgctcttacacaagtgtgtaccggaaggatgttattcgccatgcagctgttcacagtcgggatagaaaaaagagacctgaccctacacccaagcttagctcctttccctgtccggtgtgcggccgcgtttaccctatgcagaaacggttgacgcagcatatgaaaacccactctactgaaaagccccatatgtgcgacaagtgtggcaagtcttttaaaaaacggtatacttttaaaatgcatctgctcacgcacattcaggccgtcgcaaaccggcgctttaaatgtgagttttgtgaatttgtgtgtgaagataagaaggcgctactgaaccaccaattatcccacgtgtcagataagccttttaaatgctcattttgcccttacaggacattccgtgaagatttcctgctgtcccacgtggccgttaaacatactggtgctaagccctttgcgtgtgaatactgtcacttctcaacgcgccataaaaagaatcttcgtttgcacgtccgttgtcggcacgcaagctccttcgaggaatggggccggaggcaccctgaggaacctccatccagaagacggccttttttttcactgcagcagatcgaggagttgaagcagcagcacagcgccgctccgggaccccccccaagttctcctggtcccccagaaatccctcccgaggctaccacatttcagtccagcgaagcccccagcttgctctgcagcgacacactggggggggcaacaatcatataccagcagggcgcagaggagtctaccgccatggccacccagactgcactggacctgcttctcaacatgagcgcgcagcgcgagctgggaggaaccgctctacaggtggcagtggtcaagagtgaagacgtcgaggcagggttggccagtcctggcgggcagccgagtcctgaaggtgccactcctcaggtggtgaccttgcacgtcgcagagcctggggggggagccgccgccgagtctcagcttggtccccctgatctacctcagattacactggcccccgggccgtttggaggaacaggctatagcgtgattacagccccacctatggaggagggaacctcagcccccggtaccccctactcagaagagccggccggggaggcagctcaagcggttgttgtgagcgatactctgaaagaggcaggcacacactacattatggcgactgacggcacgcagctgcaccatatagaattaacagccgacggttccatcagttttccatcccctgatgcactcgcttctggggctaaatggccgttgctccagtgtggaggcctgccccgcgatgggcctgagcctccttcccccgccaaaacacattgtgtgggggacagccagtcaagtgccagctcccctccagctacctcgaaggccttaggtctcgcagtgccgccttcccccccatctgccgcaactgccgccagtaagaaatttagttgcaagatatgcgccgaggccttccctgggcgcgcagaaatggaatcacataagcgggcccacgctgggccaggcgccttcaagtgtccagattgtcctttcagtgcacggcagtggccagaagtccgtgcccatatggcccagcactcatcactgaggcctcaccagtgcagtcaatgtagtttcgcaagtaaaaacaagaaagacctgcgccgtcacatgttgactcatactaaagaaaaacccttcgcatgccacctctgtggccaacgatttaacaggaatggtcacttgaagtttcatatacagcggctgcactctcccgatgggcgaaaatcagggacccccacagcgcgggcaccgactcagacgcccacgcagacgatcattttgaattcagatgacgaaactctcgccaccttgcacacggcactgcagtcaagtcatggcgtgcttggcccggaaaggctgcagcaggcactgagccaggagcatatcatcgtggcacaggagcagaccgtgaccaaccaggaagaggcagcttacatacaagagattactacagccgatggacagactgtgcagcacctggttacctccgataatcaggtccagtacatcatctctcaggatggagtccaacacctattgccacaggagtacgtagtcgtacccgaaggacaccatatccaagttcaggagggacagatcactcatattcagtacgaacagggtgcgccttttcttcaggagagtcaaatccagtacgtgcctgtaagtcctggacagcaactcgtgactcaggcccagctagaagccgccgcccactcagctgttacagctgttgctgatgcggcaatggcgcaggcacaggggctgttcggcactgatgaaactgtacctgagcacatccagcagctgcaacaccaggggattgagtatgatgtgatcaccctcgccgacgactag

SEQ ID NO: 141375 - DNA, 330 bp, synthetic construct
  misc_feature 1..330: note = Description of Artificial Sequence: Synthetic coding sequence
  source 1..330: mol_type = other DNA
atgctagagaattacagtaacctagtttccgttgggtactgcgttcacaagcccgaggtgatttttcgcctgcaacagggtgaggagccgtggaaacaggaggaggagtttccgtcgcaatccttcccagagatggggttccaccacgttcccgcaggtctgaagttgctgtcctccagcgacccgccggccttggcttcccagtccggtcggatcacaggtatgtctcactccatccccccggtgatgggctctttcaagttcacaacgtccatattcacgtgtgtgggattgttcagattcttttttttttacctgtcctggttttag

SEQ ID NO: 141376 - DNA, 417 bp, synthetic construct
  misc_feature 1..417: note = Description of Artificial Sequence: Synthetic coding sequence
  source 1..417: mol_type = other DNA
atgaataaagtcgagcagaagagtcaagagtccgtgagctttaaggatgtgaccgtcgggtttacccaggaagaatggcagcatctcgacccctcgcagcgggcactctaccgcgatgttatgctagaaaactacagtaacttagtcagcgttgggtattgcgtgcataagccagaggtgatcttccgactccagcagggcgaggagccatggaagcaggaagaggagtttccctcacagagcttcccagaagtgtggactgctgaccacttgaaagagagaagccaggaaaaccagtcaaaacatctgtgggaggttgtgttcataaataacgaaatgctcaccaaggagcagggtgacgtgatcggtatcccattcaatgttgatgcccctgagatgctgatgcctctggactag

SEQ ID NO: 141377 - DNA, 2433 bp, synthetic construct
  misc_feature 1..2433: note = Description of Artificial Sequence: Synthetic coding sequence
  source 1..2433: mol_type = other DNA
atgaacaaggtggaacagaaatcccaagaaagtgtgagcttcaaagatgtaactgtgggttttacccaggaagagtggcagcatctggaccctagccagcgcgctttgtatcgggacgtaatgctggagaactactcaaacttggtctccgtgggctactgcgttcacaagccagaagtgatattccgactgcagcaaggggaagaaccgtggaagcaggaagaagagttccccagccagagtttccctgtttggactgccgatcatctgaaagagaggagtcaagagaaccaaagtaagcatctgtgggaggtggtcttcatcaataacgaaatgctgaccaaagagcagggcgacgttattgggattccattcaatgtggacgtgtcaagcttcccatcgagaaaaatgttctgccagtgtgactcttgtggaatgagctttaacacagtcagcgaattggttatatctaaaattaactatttgggcaaaaaaagtgacgaattcaatgcgtgcggaaaacttctcctgaatatcaaacatgatgagacccatacccaggagaaaaacgaggttttgaaaaatcggaacacactttctcatcatgaagaaactcttcagcatgagaagatacagactcttgagcataactttgaatatagcatatgtcaggaaaccctgctcgagaaagctgttttcaatactcagaagagagagaacgcagaggagaacaattgcgattacaatgaattcggacgtactctttgcgactccagcagtctcctgttccatcaaatttctccaagtagggataaccactatgagttctctgattgcgagaagttcctgtgcgtgaagtctaccttgagtaagcctcatggcgtttccatgaagcattacgactgtggagaaagcggcaataactttagaagaaagctctgcttgtcccacctgcagaagggcgataaaggagagaaacactttgagtgcaacgaatgcggtaaagcgttctgggagaagtctcacttgacgcgacaccagagagtgcacacagggcagaaaccctttcaatgcaacgagtgcgagaaagccttctgggacaaaagtaatcttactaagcaccagcggtctcacactggtgagaaacccttcgagtgcaatgagtgtggaaaggccttttcacataagtcagccctgacactgcaccagaggactcataccggtgaaaaaccttatcagtgcaacgcctgcggaaagactttttgtcagaaatccgacttgactaaacatcaacgtactcataccggtctcaagccatacgagtgttacgaatgtggtaaaagttttcgcgtcaccagtcatttgaaggttcatcaacgcacccacacaggtgagaagccttttgaatgccttgagtgcggcaaatctttctcggagaagtccaatctcactcaacaccagcgaattcacattggtgataagtcgtatgagtgcaatgcctgtgggaaaacattttatcataagagtttgctaactcggcaccagattattcatactgggtggaaaccctatgaatgttacgagtgcggcaaaacattctgcctgaaatccgacttgacggttcaccagcggacccacaccggacagaagccttttgcctgtcctgaatgcggtaaatttttttcccacaaatcaaccttgagtcaacattaccggacccacaccggcgagaagccttacgaatgtcacgagtgtggaaaaatattctataataagagctacctgactaagcacaatcgtacacacaccggtgagaagccttacgagtgtaatgagtgtggcaaagcattttatcaaaaaagtcagctgacccagcaccaacggatccacatcggggaaaaaccctacaagtgcaatgaatgtggcaaggctttttgccataaaagtgcactgattgtccaccagcgcacacatacccaggagaagccctacaaatgtaacgaatgcggcaagagcttttgtgttaagagtggtcttatcttccacgaacgcaaacacacaggagagaaaccctacgagtgcaatgagtgtggaaaattctttagacataaaagcagtttgacagtacatcatcgggcacacaccggagagaagtcgtgccagtgcaacgaatgcggtaaaattttctatcgtaaaagcgaactcgcccagcatcagaggagccacacgggggaaaaaccatacgagtgcaacacgtgcaggaaaaccttctctcagaagtcgaacctgatcgtacaccaacgcaggcacattggcgagaacctgatgaatgaaatggacatccgcaatttccagcctcaggtgagccttcacaatgctagcgagtactcccactgcggagagtctcccgatgatatcctaaacgtccagtag

SEQ ID NO: 141378 - DNA, 2436 bp, synthetic construct
  misc_feature 1..2436: note = Description of Artificial Sequence: Synthetic coding sequence
  source 1..2436: mol_type = other DNA
atgaataaagtggagcagaaatctcaggagagcgtgtcgttcaaagatgtcaccgtaggctttactcaggaggagtggcagcatctggatccttcacaaagggctctgtaccgcgacgtgatgctcgagaactactccaacctcgtgtcagtgggctactgtgtgcacaaaccagaggtgattttccggcttcagcaaggagaagaaccctggaagcaagaggaagaatttccctcccagagctttcccgaggtgtggacagcagaccacttgaaggaacgatcccaggagaaccagagcaagcacttgtgggaggtagtatttatcaacaatgaaatgttgaccaaggagcagggggatgttatcggtattcccttcaatgttgatgttagctcttttcctagccgaaagatgttctgtcagtgcgattcttgtgggatgtctttcaacactgtaagcgaacttgttattagcaagataaattacctggggaagaagtcagatgagtttaatgcatgtggcaagctgttactgaacatcaaacacgatgaaacacacactcaggaaaaaaacgaagttttgaagaatcgcaacacactgagccaccacgaagaaacgcttcagcatgagaagatccaaaccctcgaacacaactttgaatatagcatatgccaggaaactcttttggaaaaggctgtgtttaacacccagaaaagagagaatgccgaagaaaataactgtgactataatgagttcggcagaaccctctgcgacagttcctctctgctctttcaccagatcagccctagtagagacaatcactatgaattttccgattgtgagaaatttctgtgtgtaaagtctactttaagcaaaccacatggtgtgtcaatgaaacattacgactgtggggagtctggaaataacttccgccggaagctttgcctaagccatctacagaaaggcgacaagggcgagaagcactttgaatgcaatgaatgcggtaaggccttttgggagaagtcccacctgactcgacaccagcgggtgcacacaggccaaaaaccattccagtgcaatgaatgcgagaaagctttctgggataaaagcaatctgaccaagcaccaaagaagccacaccggcgaaaagcccttcgagtgcaatgaatgcgggaaggcattttcgcataagtcagccctgaccttacaccagagaacacacacaggcgagaaaccgtatcaatgtaacgcttgcggaaagaccttctgccagaagtctgatcttaccaaacaccagcggacccataccggtcttaagccatacgagtgttacgaatgcggaaaaagcttcagggttacaagccacttgaaagtgcatcagagaactcatactggcgagaaaccttttgagtgcctcgagtgcggaaagagttttagcgagaaatccaacctcacacaacatcagcgaattcatattggcgacaaatcgtacgaatgtaacgcttgtggtaagaccttctatcacaagagtctgcttaccaggcatcagatcatacacaccgggtggaagccatatgagtgctatgagtgtggcaagactttctgtctgaagtccgacctcacagtgcatcagaggactcacaccgggcaaaaaccgttcgcctgtccagagtgtggaaagttcttcagccacaagtccactctgtcccagcactaccgcactcacaccggcgagaaaccttacgaatgtcacgagtgcggtaagattttttataataaatcctatctgactaagcataacaggacgcacacaggcgaaaagccatatgagtgtaacgagtgtggcaaggccttctatcagaagtcccagcttactcagcaccagcgcatccacattggggaaaagccttataagtgcaatgaatgcgggaaggctttctgtcacaaatccgccctgatagtgcatcagagaacacacacgcaggaaaagccttacaaatgtaacgaatgtggcaagagcttctgcgttaagtcaggactgatttttcacgaacgcaagcacacaggggaaaaaccctatgagtgcaacgaatgcggcaaattctttagacataagagttccctcactgttcatcatagggcccatactggggagaagtcctgtcagtgcaatgaatgtggcaagattttctaccgcaagtccgaattggctcaacaccaaaggagccacacgggagaaaagccatacgagtgtaacacttgcagaaagacattttctcaaaaaagtaatttgatcgtgcatcagcgacgccatatcggcgagaatctcatgaacgaaatggatatcagaaactttcagcctcaggtatccttacataatgcttctgagtactcccactgcggggaaagtccagacgacatcctaaacgtgcaatag

SEQ ID NO: 141379 - DNA, 2454 bp, synthetic construct
  misc_feature 1..2454: note = Description of Artificial Sequence: Synthetic coding sequence
  source 1..2454: mol_type = other DNA
atggccaatgctaccagacggggctccggggtggaacaaaagtctcaagagagtgtttctttcaaagatgtgactgtggggtttacgcaggaggagtggcagcatctagatcctagtcagcgagctctttatcgggacgtgatgctggaaaattatagtaacctcgtgtccgtaggatattgcgtgcacaaacccgaagtaatctttaggcttcagcagggcgaggagccctggaaacaagaggaggagttcccatcacagtcttttcctgtgtggactgccgatcacttgaaagaaaggtcccaggagaatcagagtaagcatttgtgggaggtcgtcttcattaataacgaaatgctaactaaggaacaaggggacgtgattggtatccccttcaatgtagacgtgagcagctttccctctagaaagatgttttgccaatgtgacagttgtggaatgtcattcaacactgtttccgaactcgtgatttccaaaattaactacctcggtaagaagtctgacgagtttaacgcctgcggcaagcttctgcttaatataaagcatgatgagacacatacacaggaaaaaaatgaagtactgaagaacaggaacacactttctcaccacgaagagactctgcaacacgaaaagattcagacactggaacataattttgagtattccatttgccaggagacattgctggaaaaggccgtctttaatacgcagaaacgggaaaacgccgaagagaacaactgtgattataatgagttcggacggaccctgtgtgattcgagttcactgctctttcatcagataagtccatcccgagataaccactatgaattcagtgattgcgaaaaattcctgtgcgttaagtctacactgtctaaaccacatggggtctccatgaagcattacgattgtggggagtcaggaaataactttcgacgtaagctgtgcctgtcccatctgcagaaaggagataaaggtgaaaagcacttcgagtgtaatgaatgcgggaaggccttctgggaaaagtctcacttaacacggcatcagcgtgtgcacacgggccagaaaccatttcagtgcaatgagtgcgaaaaagcattttgggacaaaagtaatttaactaaacaccagcgcagccatactggggaaaaacctttcgagtgtaacgagtgcggaaaggcattctcccacaagtctgccctaactctccaccagcgcactcacaccggcgagaagccgtatcagtgcaacgcttgtgggaagaccttttgtcagaagtcagacctgaccaagcaccagcgcacacataccggactgaagccttacgagtgttacgagtgtggcaaaagtttcagagtgactagccacctcaaagttcatcagcggacccacacaggtgagaagccatttgagtgcctggagtgtggtaaatcctttagcgaaaagagtaacctcacacaacaccagcgtatccacatcggcgataagagctacgagtgcaatgcttgcggaaagaccttctaccacaagagcctgttgacaagacatcagataatacacacaggctggaagccatatgagtgctacgagtgcggaaagacattctgcctgaagtccgatctgacagttcaccagcggactcacacaggccagaaaccatttgcctgccctgaatgcggcaagttcttctcccataagagcaccctcagccagcactaccgcacccacacaggcgaaaagccctatgaatgtcacgaatgcggtaagatcttttataataaaagttatttgaccaagcacaatcgcacccacaccggagaaaaaccatacgagtgtaacgaatgtggcaaagctttttaccagaaaagccagctgacacaacatcagagaatccatataggtgagaaaccttataaatgcaatgaatgcggaaaagccttctgccataagtctgctctgatcgttcaccagcgcacccatacacaggagaagccttataagtgtaatgagtgcggcaagtccttttgcgttaagtccgggcttatatttcacgaaaggaagcatactggcgagaagccctatgagtgtaatgagtgcgggaagtttttccggcataaatcctctctcacagtacaccatcgcgcacataccggagaaaagagttgccaatgcaacgagtgcggcaaaatcttttatcgcaaatcagagcttgctcagcaccagagatctcacacaggggagaagccctacgaatgtaacacttgccggaagacattttcccagaagtcaaatctcatcgtgcaccaacggcgccatatcggggagaacttgatgaatgagatggatattcggaactttcagccccaggtcagcttgcacaacgcctccgagtactctcactgtggggaatcacccgacgacattcttaacgtgcagtag

SEQ ID NO: 141380 - DNA, 2433 bp, synthetic construct
  misc_feature 1..2433: note = Description of Artificial Sequence: Synthetic coding sequence
  source 1..2433: mol_type = other DNA
atgaataaggtggagcagaagtctcaggagagtgtgtccttcaaggatgtcactgtcgggttcacacaagaggagtggcaacacctggacccctctcaacgcgccctctatcgggatgtgatgctggaaaattactctaacctggtgagcgtgggctattgcgtgcataaacctgaggttatcttccggcttcagcagggcgaagaaccttggaaacaagaagaagaatttccaagccagtcttttcccgtctggacggcagaccatttgaaagaacgctcccaggagaaccagagcaagcacctgtgggaagttgtgtttatcaataacgaaatgctgacaaaggaacagggcgatgttataggcattccctttaacgtggacgtgagttcattcccttctcgcaaaatgttctgtcagtgcgactcctgtggaatgtcctttaataccgtaagtgagctggtgatatctaagatcaactatcttggaaagaaatctgacgaattcaacgcatgcggcaaattactgttaaacattaagcatgacgagacacatacgcaggagaagaatgaggttcttaagaacagaaatacactgagtcaccacgaggaaactctgcagcacgaaaagattcaaactttagaacataacttcgagtactccatctgtcaggagaccctgttggagaaagcggtttttaacacgcagaaacgcgagaacgctgaggaaaacaactgcgattataacgagttcggacgaacactgtgtgatagttccagccttctgttccaccagatttcaccatcaagagataaccactacgaattcagcgactgcgaaaagtttctatgcgtcaagagcacgctaagcaaaccccatggcgttagtatgaagcattatgattgtggagagtccggtaataacttccgacggaagctgtgcctgtcccatctgcaaaaaggagacaaaggtgagaaacacttcgaatgcaacgagtgcggaaaggctttttgggaaaaatcgcatctcacacgacaccagcgcgttcacacgggtcagaagcccttccagtgcaatgaatgcgaaaaggctttttgggataaaagtaatctgacaaaacaccaacgaagccacacaggggagaaacccttcgaatgtaacgagtgtggaaaggcattctcccacaagtccgcccttacattacaccagaggactcacaccggggagaagccctaccagtgcaatgcctgtggcaagacgttttgtcaaaagagcgacctgacaaagcaccaaaggactcacactggtctgaagccctacgagtgttacgagtgcggcaaatccttcagggtgacctctcacctgaaggtacatcagagaactcacactggggagaaaccattcgagtgtctcgaatgtggaaaaagtttttcagagaagtccaacctgacacagcatcaacggatacatatcggggataaatcctatgaatgcaacgcttgtggaaaaacattttaccataaatccttactgactcgacatcaaattatacatactggatggaaaccctacgaatgttatgagtgtggcaaaacattttgcctgaagtctgatttaacggtgcaccagcggacccatactggccagaagcccttcgcttgtccggaatgtggaaaattcttttcacacaagtccactctgtctcagcactaccggacacatactggggaaaaaccttacgagtgccatgagtgtggcaaaatcttttacaataagagttatcttaccaagcacaataggactcacactggtgagaaaccatatgagtgcaatgaatgtggcaaagccttctatcagaagagtcagttgactcagcaccagcgaatccatatcggagaaaaaccttataagtgtaatgaatgcgggaaggccttttgccacaagtctgcgctgatcgtgcatcagagaacccacacacaggaaaaaccatataaatgtaatgaatgcgggaagagcttttgcgtcaaatccggactgatctttcacgaaagaaaacataccggcgagaaaccctatgaatgcaacgagtgcggaaagtttttcagacataaatcatcactgaccgtccaccatcgcgctcatacaggtgaaaagtcatgtcagtgcaacgaatgtggcaaaatcttttataggaagagcgagctcgcccaacaccaacgttctcatacaggtgaaaaaccatatgagtgcaacacctgtcgaaaaactttttcccaaaagtcgaacctgattgtccaccagagacggcacatcggtgagaatttaatgaacgaaatggatatccggaattttcagccccaggtgtctctgcacaatgccagtgagtacagccattgtggagagagcccagatgacatactgaacgtccaatag

SEQ ID NO: 141381 - DNA, 417 bp, synthetic construct
  misc_feature 1..417: note = Description of Artificial Sequence: Synthetic coding sequence
  source 1..417: mol_type = other DNA
atgaataaggttgaacaaaaatcacaggaaagcgttagcttcaaagacgtgacagtcggattcacgcaggaagaatggcaacacctggacccaagccaacgcgccctttaccgcgacgtcatgctggagaactattctaacctggtttcagtgggctactgtgtacataagcctgaggttatatttcggctccagcaaggagaggagccttggaagcaggaggaagaattccctagtcaaagcttcccagaagtctggactgctgaccatctcaaggaacggtctcaagagaaccagtcaaagcacctgtgggaggtggtgtttataaataacgaaatgctgactaaagaacaaggcgacgttattggtatcccattcaatgtggacgcccccgaaatgctcatgcccctcgactag

SEQ ID NO: 141382 - DNA, 2337 bp, synthetic construct
  misc_feature 1..2337: note = Description of Artificial Sequence: Synthetic coding sequence
  source 1..2337: mol_type = other DNA
atgaacaaggtggaccagaaattccagggatccgtgtcttttaaggatgtcaccgtggggtttactcaagaggagtggcagcatttagacccatcccagcgcgccctttatagagacgtaatgctggagaattattccaaccttgtgagtgtggggtactgcgcccataagcctgaggtgatttttagacttgaacagggagaggagccctggcggctggaagaagagttcccctctcaatcatttccagaggtttggaccgccgaccaccttaaagagcgctcgcaagagaaccaatccaagcatttgtgggaggtggtgttcatcaacaacgagatgctcactaaagagcagggtaacgtcattggcattccgttcaacatggacgtgagctcttttccttcaagaaaaatgttctgtcagtacgactcccggggaatgagctttaacacagtgagtgagcttgtgataagtaaaatcaattatcttggaaagaaaagcgatgagtttaatgcttgcggaaagttgttgctgaacattaagcatgacgaaactcacacaagggaaaaaaatgaagtgctgaagaacaggaacaccctgagccaccgtgaaaacacactgcagcacgagaaaatacagaccctcgaccacaatttcgagtatagcatctgccaggaaaccctgctggagaaggctgtatttaacacccggaagagggaaaatgccgaagaaaacaactgcgattataatgagtttgggcggactttctgtgacagcagctctttactgtttcaccagatacctccaagcaaagactcccattacgagttctccgactgcgaaaagtttctgtgcgtcaagagcacgttgtctaaacacgacggagtacccgtgaagcactacgactgtggagagtcgggcaataacttcagacggaagctctgtctcagccagttacagaagggtgataagggtgagaaacacttcgagtgcaatgagtgtgggaaagccttctgggagaaatcacacctgactagacaccagagggttcacaccggagaaaaacattttcagtgtaaccagtgcggaaaaacattctgggagaagtccaatctcacaaaacaccagcgttcacacactggcgagaagccattcgagtgcaacgagtgtggcaaggcattctctcataaatcagccctcaccctccaccagaggacccacaccggagagaagccataccaatgtaacgcctgcggaaagaccttctatcagaagagcgacttaacaaagcaccagcggacccataccggacaaaagccctacgaatgctatgaatgcggcaagagcttctgcatgaattctcacctgacagttcatcagaggactcacaccggagagaagccctttgagtgtctggaatgtggcaagtccttctgccaaaagtcccacctgacgcaacaccagcgaacccacattggggataaaccgtatgagtgcaatgcttgcgggaagacattttaccacaagtcagtcttaactcgccaccagattatccacacagggttaaaaccctacgagtgttacgaatgcggtaaaactttctgcctgaaatcagatttgaccatccatcaaaggacacacaccggagagaagcccttcgcctgtcccgaatgcgggaaattcttctcgcataagtcaactttgtcacaacactaccggacccataccggggagaaaccctacgagtgccacgaatgcggaaagattttttataacaagtcctaccttacaaaacacaatcgcactcacaccggcgagaagccatatgaatgcaacgaatgcggcaagactttctgccagaaatctcagctgacccagcaccagcgcattcacatcggcgagaaaccctacgaatgcaacgaatgtggcaaggcgttctgtcataagtcagcccttatcgtgcaccagcgaacacacactcaggaaaaaccatacaaatgcaatgaatgcgggaaatccttctgcgtaaaatcaggactgatcttacacgagcgcaaacacaccggtgagaagccttacgagtgtaacgaatgcggtaagtccttctcccataagagtagcctgaccgttcatcaccgagcgcacaccggggagaagtcgtgccagtgcaacgagtgcggcaagatattctacaggaagagcgatctggcaaaacaccaacgctcccacaccggcgagaaaccctatgaatgtaatacttgtagaaagactttctcacagaaaagcaacctgatagttcaccagagaacccatatcggggaaaaaccttatgagtag

SEQ ID NO: 141383 - DNA, 2235 bp, synthetic construct
  misc_feature 1..2235: note = Description of Artificial Sequence: Synthetic coding sequence
  source 1..2235: mol_type = other DNA
atgaacaaggtcgaccagaagtttcaaggaagtgtgagcttcaaagacgtcaccgtaggttttacccaggaagagtggcaacacctggatccaagccagcgcgctctatacagagatgtgatgctggaaaactatagtaacctggtgtctgtaggaaccgcggaccacctgaaagaaagatcacaggagaatcagtcaaagcacctgtgggaggtcgtgttcatcaacaatgaaatgctgacaaaagaacagggcaacgtgattggcatcccattcaacatggacgtgtcatcttttccaagtagaaagatgttctgccagtatgactccagggggatgtcattcaacacagtgtcggagctggtgatatcaaagataaattatctcggcaagaagtccgatgagtttaacgcctgcggcaaattgcttttgaatataaagcacgatgagacccacacgagagaaaagaatgaggtgctgaagaatcgaaatacactgtcacatagagagaatactttgcagcatgagaaaatccagacattagatcataactttgagtattctatttgccaggaaaccttactggaaaaggctgtctttaacacccgcaagagagaaaatgccgaagaaaataactgcgattacaacgagttcggaaggacattctgcgactcatcttctctcctgtttcaccagattcctccaagcaaggactctcactacgagtttagtgattgtgagaagttcctgtgtgtcaaatccactttgagtaagcatgacggagttcccgttaaacactacgactgcggagagagcggcaacaactttaggcgcaaactgtgcctgtctcagctgcagaagggtgataagggtgaaaagcactttgagtgcaatgagtgcggtaaagccttttgggaaaagtcacatcttactaggcaccagagagttcataccggggaaaagcacttccagtgcaaccagtgcggcaagactttctgggaaaaatccaatctcaccaagcatcagaggagtcacactggcgagaagccatttgagtgcaacgagtgcggtaaggcgttcagccacaagagcgctctgactcttcaccagaggacacacactggggaaaagccataccagtgcaacgcatgcggaaagaccttctaccagaagtcagacctaacaaagcatcagagaacccacacgggacagaaaccatacgagtgctacgaatgcgggaagtctttctgtatgaatagccatctcaccgttcatcaacgcacccacaccggggaaaagcccttcgagtgtctggagtgtgggaagagtttctgccagaagagtcatctcacacagcaccagcgcactcacatcggcgacaagccatacgagtgcaatgcgtgtggcaagactttttatcacaaatctgtgctcactaggcatcagattatccatactggactgaagccttacgaatgttacgagtgtggcaaaactttctgcttgaagagcgacctaactatccaccagagaacccataccggcgagaagccatttgcctgtcctgaatgtggtaagtttttctctcacaagtccaccctgagtcagcactatcgaacgcatacgggtgagaaaccttatgagtgtcacgaatgtgggaaaatattttataataagtcataccttaccaagcataaccgcacccatacgggtgagaagccttacgagtgcaacgagtgcggcaagacgttctgccagaaatcacagcttacccagcatcagaggatacatattggcgaaaaaccatatgaatgcaacgagtgcgggaaagcattttgtcacaagagcgccctgatcgttcaccagcgtacccacactcaggaaaagccttacaaatgtaatgaatgtggaaaatccttttgcgtgaaaagcggcctgatcttgcacgaacggaagcatacgggagagaaaccttacgaatgtaacgaatgtggaaagagtttttcccacaagagctcacttaccgtgcaccatagggcacacacgggtgagaagtcatgtcagtgcaatgagtgtggaaagatattttaccggaagtctgatttagctaagcaccagcgctctcacactggggaaaagccgtacgagtgtaacacctgtaggaaaacgttctctcagaaaagcaatcttattgtgcaccagcgaacacatataggcgagaagccttatgagtag

SEQ ID NO: 141384 - DNA, 1683 bp, synthetic construct
  misc_feature 1..1683: note = Description of Artificial Sequence: Synthetic coding sequence
  source 1..1683: mol_type = other DNA
atgctgctacttcttagcgaccagctgctgctaactgccctgcgtaagccgaatccgcaggccatggcagccctgtttcttagcgccccccctcaggctgaagttacgttcgaagatgtggcagtgtatctctctagggaggagtggggtcgcctgggacccgcccagagaggcctatacagagatgtcatgctggaaacttacggtaaccttgtgagtctcggagttggtcccgctgggccaaagccgggcgtaattagccagctagagaggggtgacgagccttgggttcttgacgtgcagggaacatcaggaaaagagcatttgagggtgaatagccctgctctcggaactagaaccgaatataaggagcttacgtctcaggaaacatttggagaggaggacccccagggctccgagccagtggaggcatgcgatcatattagtaaaagcgaaggatcactggagaagctggttgagcagaggggcccaagagccgtcaccttgacaaacggtgagtcttcccgggaatccggcggtaatctgcggcttctctctaggccagtgccggaccagagaccccacaagtgtgatatttgcgaacaatccttcgagcagaggagctacctgaataaccataaacgtgtgcataggagtaagaaaacaaacacggtccggaattctggagaaatcttttccgccaatctggtagtgaaggaggatcagaaaataccaactggtaaaaaattacattactgctcttactgtggaaagactttccgctatagcgccaatttggtgaagcatcaaaggctacatacagaagagaagccttataaatgcgatgagtgcggtaaagcattttcccaaagctgcgaatttatcaaccataggcggatgcattctggggaaattccttacaggtgcgacgagtgcggcaaaactttcaccaggaggcctaatcttatgaaacaccaaagaatccacaccggggagaagccctacaagtgcggggagtgcggcaaacacttttcggcgtactcttctctgatttatcaccagcggatccatactggagagaagccatacaaatgtaacgattgtggaaaagctttctccgatggctctattttgattagacacagaaggactcatacgggggaaaaaccctttgagtgtaaggagtgcggcaaggggttcacacagtcttccaatctcatccagcatcagcgcatacacaccggagagaagccctataaatgtaatgagtgtgagaaggcttttatccagaaaacaaaactagttgagcatcagagatcacacacaggtgagaagccttatgagtgtaatgattgcggcaaagtatttagccagtccacacatctgattcaacatcaacggattcacactggcgagaagccatacaaatgttcggagtgtggaaaggctttccacaactcctcacgtctcattcatcaccagcggctgcaccatggcgaaaaaccctaccgctgttccgactgcaagaaggccttctcccagtccacatacctgattcagcatagacgcattcacacaggagagaagccctataaatgcagtgagtgcggtaaggctttccggcactcatcaaacatgtgtcagcatcagaggatccatctcagagaagacttctcaatgtag

SEQ ID NO: 141385 - DNA, 1620 bp, synthetic construct
  misc_feature 1..1620: note = Description of Artificial Sequence: Synthetic coding sequence
  source 1..1620: mol_type = other DNA
atggccgccctgttcttgtcggctccaccacaagctgaagtcacctttgaggacgtcgcagtgtatctgtcccgcgaggaatgggggcgccttggtccggcacagagggggttgtacagagacgtcatgctggaaacctatggaaatctggtttctttaggggtaggccccgccgggcctaaaccaggcgtcatctctcaactggaaagaggggacgaaccttgggttcttgatgtgcaaggcacatcaggcaaggagcacctgcgcgttaattctccagccctcgggactcggactgagtacaaggagctgacctcacaggaaacctttggagaggaggatccacagggctccgagcctgtagaggcctgtgaccatatatctaaatccgagggaagtttggaaaagttggtcgagcagagaggtccacgcgcagtgaccctcactaatggtgagtcctcaagagaaagcggtgggaacctccgcctgctcagtcgccctgtgccagatcagcgaccccataagtgtgatatttgtgagcagagctttgagcagcggtcatatcttaacaatcacaaaagagtccaccgcagtaagaaaaccaatacagttcgaaacagcggcgagatcttcagcgctaacttagtagtgaaagaagaccaaaaaatccctactgggaaaaaactacattattgctcttactgcggtaagacgttccgctattccgccaatctggtaaaacaccagcgactccatactgaggaaaaaccttacaagtgcgacgagtgcgggaaagcattcagccagtcctgtgaattcattaatcaccggcgcatgcactccggggaaattccctatcggtgcgatgaatgcggcaagacctttacccgaaggcccaatctgatgaagcaccagagaattcacaccggtgagaagccttataagtgcggggaatgcggaaagcattttagcgcttactcgtctttgatttaccatcaaagaattcacactggagagaaaccgtacaagtgtaatgactgcggaaaggccttctcagatggctcgatactcatcaggcacaggagaacccataccggggagaagcccttcgagtgtaaggaatgtggaaaaggattcactcagtcttctaatctgattcagcaccaacggatccacacaggggagaaaccttacaagtgcaatgagtgtgagaaagctttcatacaaaagacgaagctcgttgaacaccagaggtcacatacaggcgaaaaaccatacgaatgcaacgactgcggaaaagtgttctcccagtcaactcatttgatccagcaccagcgcatccataccggagagaaaccttacaagtgtagtgaatgcggtaaggcctttcacaattctagtaggctcatccaccaccagaggcttcaccacggcgagaagccatatcgctgctctgactgcaagaaagccttttctcagtccacctatcttatccagcaccgacggatccacaccggagagaagccgtataaatgctcagaatgtgggaaagccttccgacattcatctaatatgtgtcaacatcaaagaatacatctgcgtgaggacttctcaatgtag

SEQ ID NO: 141386 - DNA, 1560 bp, synthetic construct
  misc_feature 1..1560: note = Description of Artificial Sequence: Synthetic coding sequence
  source 1..1560: mol_type = other DNA
atgtacctgatccgcgaatcgcatgccagcgggtcatcttccgtaacctcaagttgctctctgccaagcgaatctccaacactccgccagtggcggccttgtagttgtctcccacacccccggcctggcgttatatcgcaactagagagaggtgacgagccatgggtgttggacgtacagggcacttcgggcaaagaacaccttcgcgtaaattctcctgctcttggaacccggactgagtataaagagctgaccagccaggaaaccttcggcgaagaggatccccagggctctgaaccagtggaagcatgtgatcatattagcaagtccgaggggtcactggagaaactggtcgagcaaagggggccaagagccgtgacattgacaaatggggaaagttctagagagtcaggggggaatttgcgccttttgagtaggccagtgcccgaccaacggccacacaagtgcgacatctgtgaacaatccttcgagcaacgctcatacttgaacaatcacaagcgagtgcaccgttccaagaagacgaataccgtccgtaacagcggggagattttcagtgcgaatctggtggtcaaggaggaccagaaaatcccaaccggcaaaaagctccactactgctcctattgtggaaagacattccgatattcagcaaacttggttaagcaccaacgtctgcataccgaggagaagccctacaagtgcgatgaatgtgggaaggcattctctcagtcctgtgaattcattaaccataggagaatgcatagcggggaaatcccctaccgatgtgatgaatgcggtaaaactttcacacggaggccaaatttgatgaagcaccagcggatccacaccggtgagaagccctacaaatgcggagagtgcggtaaacacttttctgcatattcttccctcatttatcatcagagaatccataccggggaaaagccatacaagtgcaatgattgcggaaaggctttctctgatggctctatccttatcagacacagacgaacacacaccggcgaaaaacccttcgaatgtaaagagtgtggtaagggcttcacccagagctccaacctaattcagcaccagcgtattcataccggcgagaagccatataaatgtaacgagtgtgaaaaagcttttattcaaaagactaaactggttgagcatcagcgcagccatactggcgaaaaaccctacgagtgcaacgactgtggcaaagtgttctcccagtccacccaccttattcagcaccaacgcattcataccggagaaaagccttataagtgctccgagtgcgggaaggcttttcataactcatccagactcatacaccaccagcgtctccaccatggcgagaagccatatcggtgctctgactgtaagaaggctttttctcagtccacatatctgattcagcatcgcaggatacacaccggggagaaaccatataagtgtagtgaatgtgggaaggcttttcgacactccagcaacatgtgccagcaccagcggatccatctccgggaggatttctctatgtag

SEQ ID NO: 141387 - DNA, 1584 bp, synthetic construct
  misc_feature 1..1584: note = Description of Artificial Sequence: Synthetic coding sequence
  source 1..1584: mol_type = other DNA
atgaccgccgagctgagagaagccatggctcttgccccatgggggcccgtgaaggtaaagaaggaagaggaagaagaagaaaacttccccggtcaagcttctagtcagcaggtccactccgaaaacatcaaggtctgggccccagtacaaggattgcaaaccggtctggatggtagtgaggaggaggagaaaggccagaatattagttgggacatggctgtggttctgaaggcaactcaagaggctcctgcagccagtaccctgggcagctacagcctgccaggcactttagcgaaaagtgagattctagaaacccatggcaccatgaactttttgggcgccgaaacaaagaacctgcaacttctggttcccaagaccgaaatttgcgaagaagctgaaaaacccttgattatttccgaacgaattcagaaggcagatccccaggggcccgagttgggggaggcctgcgagaagggaaacatgttgaaaaggcagaggatcaaacgggaaaagaaggattttcgtcaagtgattgtgaatgattgtcatcttcctgaaagcttcaaagaagaggagaatcagaaatgtaagaagtcaggtggcaagtacagccttaattcgggggcagttaaaaaccccaagactcagctgggccagaagccctttacctgttcagtttgcggcaaaggcttctcacagtcagccaaccttgtcgttcatcagcggatacatacaggagaaaagccattcgagtgtcatgagtgcggcaaagcatttattcagtctgcgaaccttgtggtccatcaaagaatacataccggacagaaaccatacgtatgctctaaatgcggtaaagcctttacacagtcgagtaacctcacagtccatcagaagatacattcccttgaaaagactttcaagtgcaacgagtgtgaaaaggctttttcatattcgtcacagctggcccgtcatcaaaaagtccatattacggagaagtgttatgagtgtaacgagtgcggcaagacctttaccagatcgtccaacctcatcgtgcaccaaagaattcatacaggcgagaagccattcgcttgcaacgattgtggaaaggccttcactcagagcgccaatctcattgtacaccagaggtcccacaccggcgagaagccttatgagtgtaaagagtgtggcaaagcattttcctgcttttctcacctgattgtacaccaacgcatccacactgccgaaaaaccctatgattgctctgagtgtgggaaggcattctcccaactgtcttgtctcatcgttcaccaaaggatccattctggggatctcccttatgtttgtaatgagtgcgggaaggccttcacttgtagctcctatctgcttatccaccagcgcatccacaacggagagaaaccctatacctgcaacgaatgcgggaaggctttcaggcagcgatcctcccttaccgtgcaccagagaacccatactggagagaagccatatgaatgtgagaagtgtggagcagcttttatcagcaatagccatctgatgcgtcatcaccgcacgcatcttgtggagtag

SEQ ID NO: 141388 - DNA, 405 bp, synthetic construct
  misc_feature 1..405: note = Description of Artificial Sequence: Synthetic coding sequence
  source 1..405: mol_type = other DNA
atgacagcagagctgagagaagcaatggcactcgccccgtggggccccgtcaaagtgaagaaggaggaggaggaagaagaaaactttcccggacaggcttcttcgcagcaggtccacagcgaaaatatcaaggtatgggcacctgtccagggcctgcaaactgggctggacgggtccgaggaggaagaaaaagggcagaacattagctgggatatggccgtcgtacttaaggcgacgcaagaggcacccgccgcatcgacactggggagctattccctacccgggacattagccaaaagcgagatcctggagacccacggcacgatgaacttcctgggcgccgagaccaaaaatctgcagctgctggtgccaaaaaccgagatctgcgaggaagccgagaaatag

SEQ ID NO: 141389 - DNA, 339 bp, synthetic construct
  misc_feature 1..339: note = Description of Artificial Sequence: Synthetic coding sequence
  source 1..339: mol_type = other DNA
atgacagccgagctccgggaagcgatggccctggccccttggggcccggttaaagttaagaaggaggaagaggaagaggagaacttccccggccaggcttcctctcagcaagtccattctgagaatataaaagtgtgggctcccgtgcagggtctccagaccggcctggacggctcggaggaagaggaaaaagggcagaatatttcatgggacatggccgtggtgctgaaggcgacacaagaagcacccgccgcctcgaccttaggttcgtactccctgcccggtaccctagctaaaagcgagatcttagaaactcacggaactatgaattttttgtag

SEQ ID NO: 141390 - DNA, 1104 bp, synthetic construct
  misc_feature 1..1104: note = Description of Artificial Sequence: Synthetic coding sequence
  source 1..1104: mol_type = other DNA
atgttaaagcgtcagcggatcaagcgcgaaaagaaggacttcaggcaggttattgtgaatgattgccacttaccggaaagtttcaaggaggaggagaaccagaaatgcaaaaagagcggaggtaagtattctctgaactctggggccgtcaaaaacccaaaaactcagttaggccagaaaccatttacttgttctgtttgtggaaaggggttttctcagtccgccaatctggttgtacatcagagaattcacaccggcgaaaagccgttcgagtgccacgaatgtggcaaggcgtttattcagtccgccaacctggtggtgcaccagaggatacacaccgggcaaaaaccctatgtgtgtagcaagtgcgggaaggcctttactcagagtagcaatctgactgtgcaccagaaaattcactcacttgagaaaaccttcaaatgcaacgagtgtgagaaagcctttagttattcaagccagctcgcaagacaccagaaagtgcatattaccgaaaagtgttacgaatgcaacgagtgtggcaaaacattcacacgaagctcaaatctcatcgtgcatcagcgcattcacactggagagaaaccttttgcctgtaacgattgcggcaaggcttttacacagtcggccaatctgatagtccaccagcgaagtcatacgggcgaaaagccatatgaatgtaaggagtgcggaaaggctttcagctgtttttcacaccttatcgtacaccagcgcattcatactgccgaaaaaccatatgattgcagcgagtgtggcaaggctttctcccagttgagctgtctgatcgtacatcagcgcatacacagtggcgatctgccctacgtttgcaacgaatgtggtaaagcctttacttgctcctcctacctcctaatacaccagaggatccataacggagaaaagccctacacgtgtaacgaatgtggcaaggcgttccggcaaagaagttcactgaccgttcaccaacggacccacacaggggaaaagccgtacgagtgcgaaaaatgtggtgccgcctttatatccaattcacaccttatgagacaccacaggacacacttggtggagtag

SEQ ID NO: 141391 - DNA, 981 bp, synthetic construct
  misc_feature 1..981: note = Description of Artificial Sequence: Synthetic coding sequence
  source 1..981: mol_type = other DNA
atggatttaaccgctatctatgagtcactcctgtctttgtctcctgatgtgccagtaccatcagaccatggggggactgaatcttcacctggctggggcagttcggggccctggagtctctccccatccgacagttcgccaagtggcgttacctcacgcctcccagggcgaagcacctccctcgtggaagggaggtcatgcggatgggttcctccgccccctggttttgcgccgctagcaccaagactcggaccggaactgtctcccagtcccacctccccaacggccacctccacaaccccatctcggtataagaccgagctgtgtagaactttctccgagtcagggcggtgtaggtatggggctaaatgtcaattcgcgcatgggctgggcgaattgagacaagctaacaggcatcccaagtacaaaaccgaactgtgccacaagttctacctccagggcagatgcccatacgggtcccggtgtcacttcatccacaacccatcggaagatttagcggctcccggtcatccgcctgtacttcggcagagcatttccttctctggcttgccctccggaagaagaacctcgcctcccccgccgggactagcaggtccaagtctgagcagctcatcattctccccatcttcttcccctcccccaccaggggatctgccactttccccatctgctttttccgcagcccctggcacccctctagcccgaagagatccaacgcctgtttgttgcccttcttgtagacgggccacacccatttccgtttggggtccactgggtggactagtgcgaacccctagcgtccagtcgcttggttccgatccggatgaatatgctagtagtgggagcagccttggagggtcagacagtcctgtctttgaggccggagtgtttgcaccaccccaacctgtcgcggccccccgccgcctgcccattttcaaccggatttcagtgagtgagtag

SEQ ID NO: 141392 - DNA, 1017 bp, synthetic construct
  misc_feature 1..1017: note = Description of Artificial Sequence: Synthetic coding sequence
  source 1..1017: mol_type = other DNA
atgacaacgaccctggtatccgccacaatcttcgatctatctgaggtgttgtgcaaagggaacaaaatgctgaactattccgccccttcagcaggcggttgtctgttggacagaaaagctgtagggactccggccggaggcggatttccgagacgacatagtgtaactcttcccagctcgaagtttcatcagaatcagttgctgtcatccctgaaaggcgagcctgcgcccgctctttcttcaagagatagccgctttcgcgaccgcagtttcagtgaaggaggagaacggctactgcccacccagaaacagcccggtggcgggcaggtaaattcgagccggtataagacagagctctgtcgaccctttgaagagaacggtgcctgtaagtacggagataagtgccagttcgctcacggcattcatgaactcaggagcctcactcgccaccccaagtataaaaccgagctttgtagaactttccacacaattggcttctgtccttacggaccacggtgtcatttcatccacaacgctgaggaacgccgcgccttggcaggggcaagggacctgagcgccgataggcccaggcttcagcatagcttttctttcgccgggtttccatccgccgccgctaccgcagcagccactggcctgttggactcgcccacctccatcacaccccccccaatactgagtgccgacgacctacttggctcacctactctgcccgacggtaccaataacccattcgccttctctagccaggaactcgcttctctgttcgcccccagcatgggactccctggcggagggagccccacaactttcctgtttcggcccatgtcagagtctccacatatgtttgacagtccaccttctccccaggatagcctctcagaccaagaaggatatctatcctcctcaagttctagccactccggcagcgattctcctactctcgacaactcccgacggctcccgatattttccagattgtcaattagcgatgattag

SEQ ID NO: 141393 - DNA, 501 bp, synthetic construct
  misc_feature 1..501: note = Description of Artificial Sequence: Synthetic coding sequence
  source 1..501: mol_type = other DNA
atgaatacatatacgcgaagtgcatcgtttactccaaagacctttactttccctctggcccaaaatcgtactagtcatccaactacaacctctaagttaaagtacctgggccgcccttcacctagacgagatgccttgcaggccaatggcgagggccccgaagtcggccccggcaccgaggagcctgcccaccggcttccggttggctccggaagtgctggagaggccgcagcctccctgggaacagcgcgggttcggtctggccgtgcagagtgcacggccaaattagcaggagatggacacgcgcgcttagccagcgctttcctgcatagaagagctgcattacctccacccctgggcacatgccggcctaggctgggagagggcggttccgctcccgcactgggccccagcccccgacggggcagaagagtgagtgagggtcttcgcgactccctaccccctcttggcagcctgaccctgggcaaaagtccgaagtag

SEQ ID NO: 141394 - DNA, 966 bp, synthetic construct
  misc_feature 1..966: note = Description of Artificial Sequence: Synthetic coding sequence
  source 1..966: mol_type = other DNA
atgaccacaaccttggtgtcagccactattttcgatttgtctgaggtgctgtgcaagggaaataaaatgctgaactattctgccccatcagcaggcggctgcctgctggatcgcaaagcagtagggaccccggccggtggtgggtttccacgtagacattctgttactcttccttcgtcaaaatttcaccagaaccagttgctatctagtttaaagggagaaccggctccagcactgtccagtcgcgacagccggtttagggacaggtccttctccgaaggtggggagcggcttctgcccacgcagaaacagccctttgaagagaatggtgcttgcaaatatggggacaaatgtcagtttgctcacggtatccacgagctgaggtctctcacacgacatccaaaatataagactgagctctgtcggacatttcataccatcggcttctgcccctacgggccaaggtgtcattttatccacaatgctgaagagcggagagcgcttgccggtgcgcgcgacttaagtgctgatcgtcctcggcttcagcactctttttctttcgccggatttccgtctgccgccgctaccgccgcagcaactggcttacttgacagccctactagtattacacccccacctatcctgtcggctgacgaccttctgggctctccaacactccctgatggcactaataatccttttgcattttccagccaagagctggcttcccttttcgccccttctatgggcctgccaggtggcggctcccctacaacgtttctcttccggccaatgagtgaatccccccacatgttcgattcccctcctagccctcaggacagtctgtcagaccaggaaggttacttgagttctagtagttcatcccatagcgggagcgactcacccacgcttgacaactctagaagactgccaatcttctcacgattgtccatcagtgacgattag

SEQ ID NO: 141395 - DNA, 1017 bp, synthetic construct
  misc_feature 1..1017: note = Description of Artificial Sequence: Synthetic coding sequence
  source 1..1017: mol_type = other DNA
atgaccacgacgctggtgagcgcaaccatcttcgacctttctgaagtgttgtgtaaggggaataagatgctgaactatagtgccccctcagccggcggctgtcttttggatagaaaggccgtgggaacccctgctggcggtggattcccacgccggcacagtgtgactctaccaagttctaaattccaccagaaccagctccttagttctctcaagggagagccagcccctgccctctcctcacgtgattcgaggtttagggacaggagctttagtgaggggggcgagcggctgttgcccacacaaaagcagccaggaggcggccaggtgaacagtagtcgatacaagaccgagctatgtcgcccattcgaggaaaacggcgcttgcaaatatggggacaagtgtcagtttgcacacggcatccacgaactccggagcctgactaggcaccctaaatataagactgagttgtgtaggacatttcatacaattggattctgtccttacggtcccagatgccattttatccacaacgcggaggaacgacgcgcactcgccggggctcgggatctctcagcagatagaccgagacttcagcattccttctctttcgccggattcccttcggccgccgcaacagcggctgcaactggcctcctggacagccctacgtctataactccacctccaatcctctcagctgatgacctcctcggctctccaaccctgcctgatggaactaacaatccgttcgctttcagttcccaggagctggcctctctgtttgctcccagcatggggttgcctggcggcggctcaccaaccaccttccttttcaggcctatgtcagagtcaccccatatgtttgacagccctcccagcccgcaagattcactcagtgatcaggagggttatctcagcagttctagctccagtcattctggaagcgactctcctactctggacaactcccggcgcctgccaatatttagccgcctctctatttcggacgattag

SEQ ID NO: 141396 - DNA, 1485 bp, synthetic construct
  misc_feature 1..1485: note = Description of Artificial Sequence: Synthetic coding sequence
  source 1..1485: mol_type = other DNA
atgtccactaccctcctctcagccttctacgacgtcgacttcttgtgtaaaacggagaaaagcctcgctaacttaaatctgaacaatatgctcgataaaaaggcagtgggcacaccagttgctgctgcgccttcaagtggcttcgccccgggttttctccggcgacactctgcaagtaatcttcacgcactcgcccatcccgccccaagtcccgggtcctgtagtcccaagtttccaggcgcagctaacggtagcagctgcgggtccgctgcagctggaggtccaacctcttacggcacacttaaggaaccctcaggcggagggggtactgccctactgaacaaagagaacaagtttcgcgataggagtttttccgagaacggcgatcggagccagcaccttctccatctccagcaacagcagaagggaggcggcggttctcagataaactcgactagatacaagaccgagttgtgtcgcccctttgaagagtcaggaacatgcaagtacggagaaaaatgccaattcgctcacggctttcatgagcttaggtccctgactaggcaccctaagtataaaacagaactctgtcggacatttcacaccattggcttctgcccatacggtccccggtgtcacttcattcataacgccgatgagcgtaggccagctccctccggaggggcatcgggggacctccgcgccttcggcactcgggacgctttacacctggggttcccaagggaacccaggccaaagctccaccactctctgagcttcagcgggttcccttcaggccatcaccaacctcccggagggctggagtcacccctcctcctcgatagcccgacatcaaggacacctccccctccttcttgcagttctgctagtagttgctcctctagtgcgtcgtcctgtagctccgcatccgcggctagtaccccctccggcgcacccacttgttgtgcctccgccgccgctgcagccgctgccgccttgctgtatggaactggtggggccgaggaccttcttgccccgggcgcaccatgtgctgcatgcagctccgcgtcttgtgctaacaacgcttttgctttcggcccagaattgtcctctctgattactcccctggcaattcaaactcataatttcgcagccgtggccgcagcggcttactatagatcacagcaacagcaacagcaacagggtttagctcccccagcccagccacctgccccacctagtgccacccttcctgccggcgccgcggccccgcccagtccccctttctctttccagctgccccgacggctgtcagactctccagtcttcgacgctcccccgtctcccccagatagcctgtccgaccgcgatagctatctctccggaagcctttcatccggatctctttcgggaagcgagtctccatctctggatcctggtaggcggcttcctatcttctccaggctaagcatcagtgacgactag

SEQ ID NO: 141397 - DNA, 651 bp, synthetic construct
  misc_feature 1..651: note = Description of Artificial Sequence: Synthetic coding sequence
  source 1..651: mol_type = other DNA
atgagtgctcttggacagatcaccatcactgtttcccgctgctggaacaccgagagaaaccaaaccgacaagaacccttgcctccatggcgcttatctgcagttgcgggagacagtgaagaataagtcaactcacctgaaaaagcctctcatgaaacaggcacccccatggaaggaccaccttacattccagcctctgcacccagccgagcgaaaaacccaagtttggcggtggcagtccgggaacagcagtgatcttgaaaccacatctagtgcctcaccctggcccaccgggtccaacagggacgtagtactgaacactttggctgaatcttgctgcggactctcggagttaatcactgcccctccctacgctggcgtgagcatccagggtttttcccagatttgggtgcttttccctttctgtggcggcacattccaccacaacgagaaagacgttctcgggcttcaggacttcgagcgagagtcggtgtccacttcccagtcccggaatatttcgcttctcactctgggccagttgcagaattgcgttataggaaaactaacaattatcgatctcctgacagagcatcttcttggagtgaggcatggagtcatttgttttccttgggggctaccaagttcctcttag

SEQ ID NO: 141398 - DNA, 1224 bp, synthetic construct
  misc_feature 1..1224: note = Description of Artificial Sequence: Synthetic coding sequence
  source 1..1224: mol_type = other DNA
atgcagcagaaggcattcgaagaatcacggtatccttggcaggaaagcttcgaaaatgtcgccgtatgcctccctttaagatgccctaggtgcggggatcacacaagattccgttctctgagttcattacgagctcatttggagttctcgcatagctatgaggagagaacattgctcacgaagtgctctctgtttcccagtttgaaagacaccgatctggtcacaagctctgaactgctgaagcccggaaagttacaaagcagtggaaacgtggtgaagcagaagcccagctatgttaacttgtactcgattagccacgaacactccaaagatcgcaagccttttgaagttgtggcggagcgaccggtgtcttatgtgcagacgtacactgctatggatctgcacgcggactccttagacggaacaagatcggggcctggactacccaccagcgataccaaggcaagtttcgaagcccatgtgagagaaaaatttaacaggatggtggaggcagtggataggacgattgaaaagcgcattgacaaattgaccaaagagttggcacaaaaaaccgccgaacttctggaagtgcgcgcagccttcgtgcaacttactcagaaaaagcaggaggtccaaaggagagaaagagccctcaacagacaggtggatgtggctgtggaaatgattgcagttctgcggcaacggttaaccgaaagtgaggaggagttgctgaggaaggaggaggaggtggtgacgtttaatcactttttggaggccgccgccgagaaagaagttcaaggaaaggctcgtttacaagattttatagagaacctgctccagcgggtggaactggccgagaagcaactagagtactatcaaagtcagcaggcctctgggtttgtccgtgacctttccggccacgttctcacggacatatcctctaaccggaaaccaaagtgcctcagtaggggtcatccccactccgtctgcaatcaccccgatctcaaggcgcatttccacccaaaggggcgcaaccatttgaagaaagctaaagacgaccgcgcctcaatgcagccagcaaaagccatccatgagcaggccgagagttcgagagacctttgtcgcccgccaaagaagggggaattgcttggcttcggacgaaagggcaatattaggccaaaaatggcaaagaagaaaccaacagctatcgtgaacatcatctag

SEQ ID NO: 141399 - DNA, 1002 bp, synthetic construct
  misc_feature 1..1002: note = Description of Artificial Sequence: Synthetic coding sequence
  source 1..1002: mol_type = other DNA
atgcaacagaaggcctttgaagagtcacgctacccgtggcaggaaagtttcgagaatgttgctgtttgtctaccactgcgctgccctagatgtggggaccacacgagatttcggtctctaagctcgttgcgcgctcacttagaattctctcattcctacgaagaacgtactctgcttacgaagtgctctctgtttccctcactcaaggacaccgaccttgtcaccagtagtgagctgctcaagcccggaaagctgcagtcatctggtaacgtggtgaaacaaaagccgtcttacgtgaatttatattcaatctcacacgaacactcaaaggacagaaaaccattcgaggtagtggccgagcggcctgtttcttacgtgcagacgtacactgcaatggacttgcatgcagacagtcttgatggcacaagaagtggcccaggcctcccaacctctgataccaaagcaagctttgaggcccacgtgcgagaaaagttcaaccggatggtcgaggctgtagaccgtaccatcgaaaaacggattgataaactgacaaaggagcttgcacagaagacggccgagcttctggaagtaagagctgcgttcgtgcagctgacccagaaaaagcaagaggtgcagcggcgcgaaagggcacttaatcggcaggtcgacgtggccgtagaaatgatcgcagttctgaggcagaggttgactgaaagtgaggaagagctcctgcgaaaggaggaagaagtggtgactttcaatcatttcctagaggctgctgcagaaaaggaagtgcaggggaaggcccgcctgcaggattttatcgaaaatttgctgcagagagttgaactcgccgagaagcagttggagtattaccagtcccagcaagcgtccgggttcgtaagggatctaagtggtcatgtctcatggaaaggagccggagaggctcgcctggtttgtcagaatgacctcgagctggaggagtctgccattgtggaatag

SEQ ID NO: 141400 - DNA, 1389 bp, synthetic construct
  misc_feature 1..1389: note = Description of Artificial Sequence: Synthetic coding sequence
  source 1..1389: mol_type = other DNA
atgcagcagaaagctttcgaagagtctcgatatccatggcaggaatccttcgaaaacgtggcggtttgtctgccgttaagatgtcctaggtgcggtgaccatacaaggtttaggtcccttagtagtctccgagcccacctcgagttttctcactcttacgaagagagaacgctgcttacgaaatgtagtctcttcccctcactaaaagatacagatctcgtgactagttcggaactgttaaaaccaggcaagctccaaagctccggcaatgtggtgaaacaaaaaccgagttacgtgaacctctattccatctcccacgaacactccaaggaccgtaagcctttcgaggtggtcgccgagcgtccagtttcttacgtgcaaacttatactgcaatggatctgcacgcagatagcttggatggaacccggagtggccctggcctgcccacaagcgacacaaaggccagtttcgaggctcacgtgagagagaagttcaaccgaatggttgaagctgtggacaggaccatcgaaaaacgcatcgataagttaacaaaagagcttgctcagaaaaccgcagaactgcttgaggtccgggctgccttcgtccaactgacacagaagaaacaggaagtgcagcggagagaacgtgccctcaatcgccaggtagatgtcgccgtggaaatgatcgcagttttgcgtcagagactgacagagtccgaagaggagctcctccggaaagaagaagaggtcgtgacttttaaccattttctggaggctgcagctgagaaggaggttcaggggaaagctaggctgcaggacttcattgaaaacttgctccagagagtagaattggccgagaaacagttggagtactaccagtcacaacaggcctccggctttgtgagggacctatccggccacgtttcttggaagggcgcaggggaggcaagactggtgtgtcaaaatgacctggaactggaaatcttcggacacatcaaccaccacctgtcaggattgaaagattctcactgcctggtgtttctgcaagcgccccctgtgccttggatcatcttagcatcctttctctggatcctcggaaacccatggacaagctccacggcgactgcgggattttcacagatctgggttctgttcccattctgtggaggaacattccatcataacgagaaagatgtgctcggactccaggacttcgagcgcgagtctgtttccactagtcagtcccgtaatatcagtctgctgacccttggacaactccagaattgcgtgattggtaagctaacaattatagacctgctgaccgagcacttactgggcgtgcgccacggtgttatctgcttcccgtggggactgcctagctcttcctag

SEQ ID NO: 141401 - DNA, 162 bp, synthetic construct
  misc_feature 1..162: note = Description of Artificial Sequence: Synthetic coding sequence
  source 1..162: mol_type = other DNA
atgcagcagaaagcatttgaagaaagtcgatatccctggcaggaatcatttgaaaacgtcgccgtgtgtctaccattgagatgtcctagatgtggcgaccacacaagatttcgctccctgtcgagtctgcgtgcacacttggagttctcacacagctactag

SEQ ID NO: 141402 - DNA, 1893 bp, synthetic construct
  misc_feature 1..1893: note = Description of Artificial Sequence: Synthetic coding sequence
  source 1..1893: mol_type = other DNA
atgagtgtctccagcggcgtgcaaatcttgactaagcccgaaactgtggataggcgacgaagcgccgagacaacaaaggaagccggccgccctctggagatggcggtgtcagagcccgaagcgagcgcagccgagtggaagcagcttgacccggcccagtcaaacctgtacaacgacgtaatgctagagaactactgtaatcaggcctctatggggtgtcaagctcccaagcccgatatgatcagcaaattggagaaaggcgaagcaccctggctgggaaaaggtaaaaggccatctcaggggtgcccttctaaaatcgctcgaccaaagcagaaagaaactgatggaaaggtgcagaaggatgacgaccaactcgagaacatacaaaaatcccagaacaagctgctgcgggaagtcgctgtaaaaaagaagacccaagctaagaaaaatggcagtgattgtggaagcctggggaagaagaataatctgcataaaaagcacgtccctagcaagaaaaggctgctaaaatttgaaagctgtggcaagattctgaagcagaacctggacttacctgatcacagcaggaactgcgtcaagcgcaagtctgatgcggctaaagagcacaagaagtcattcaatcattccctctcagatacaaggaaagggaagaagcaaaccggaaagaaacacgaaaagctgagttcacacagcagttccgacaaatgtaataagactgggaaaaagcacgataaactgtgttgccactcatcaagccatattaagcaggataagatccagactggcgaaaagcacgagaaaagcccaagtttgtctagttccactaaacacgagaaaccacaagcttgtgtgaaaccatatgaatgcaaccagtgtggcaaagtgttaagccataaacagggtctgatcgatcaccaaagagtccacaccggcgagaaaccgtatgagtgcaatgagtgcggaatcgcattctcacagaagtctcacctcgtggtacatcagcggacccataccggtgagaagccctacgagtgcatccagtgtggcaaagcacacggccataagcacgccctcacagaccatttgcggattcacactggtgaaaaaccttacgagtgcgctgaatgcggtaagacatttcggcatagttcaaacctgatacagcatgttagaagtcatactggcgaaaagccatacgagtgtaaggaatgcggaaaatcatttagatacaactcctcactgacggagcacgtccggacccatactggggagattccctatgagtgcaatgaatgtggaaaagccttcaaatattctagctccctgaccaaacatatgcgcatccatacaggcgagaagcctttcgagtgtaacgaatgtggtaaggccttcagtaagaagtcccacttgattatccatcagcggacacatacaaaggaaaagccctacaaatgcaatgaatgcggaaaggcctttgggcactccagctcactcacttatcacatgagaactcacacaggagagtcaccattcgagtgcaaccagtgcgggaaaggatttaagcagattgaaggtctaacgcaacatcaaagagtgcatacaggagagaaaccttatgagtgcaatgagtgcggaaaggcattttcccagaagagccatcttatcgtccaccaaaggacacacaccggtgaaaagccatacgagtgcaacgaatgtgaaaaggccttcaacgctaagtctcaattggtgattcaccagagatctcatactggcgaaaaaccgtacgagtgtaatgagtgcggcaaaaccttcaaacagaatgcttctctgactaagcacgtcaaaacccactctgaagataagtctcacgaatag

SEQ ID NO: 141403 - DNA, 1938 bp, synthetic construct
  misc_feature 1..1938: note = Description of Artificial Sequence: Synthetic coding sequence
  source 1..1938: mol_type = other DNA
atgagcgtttcgtccggagtccagatactgactaagcctgaaactgtcgatcgcaggcgcagtgctgagactaccaaggaggcaggaaggccacttgagatggccgtcagtgaacccgaggcctctgccgccgtgtcggtgacttttaaacatgtgactatggccttcacccagaaagaatggaagcaactggatccagcgcaaagtaacctctataatgacgtgatgctcgagaactattgtaatcaggcaagtatgggctgtcaggcacctaaaccagacatgatctcaaagttggagaaaggagaagcaccttggcttgggaagggaaagcgacccagccagggttgcccctccaaaatcgcacggcctaaacaaaaagagaccgatggaaaagttcaaaaagatgatgaccagttggaaaacatccagaagagtcagaataagttactcagggaggtcgcagtgaaaaagaaaacacaagccaagaaaaatggtagtgattgtggttcactgggcaagaaaaataacctgcataaaaagcatgtacccagtaagaagagactgcttaaatttgagtcttgcggcaagattctcaaacaaaatctcgacctgcctgatcactcgaggaattgcgtgaagagaaagtccgatgctgccaaggaacataagaaatcatttaatcactccttgtcagacactaggaagggcaagaaacagacgggcaagaaacatgaaaagctttcttcccactctagttcggacaagtgcaacaagacggggaagaagcacgataagctgtgctgccactcaagcagccatattaagcaagataagatacaaaccggagaaaagcacgaaaagagcccttcactgtctagctcaacaaagcacgagaagccgcaggcgtgcgttaaaccctacgagtgcaaccaatgtggtaaggtcctgtcccataaacaggggctcattgatcatcagcgggttcacacaggagaaaaaccatatgaatgcaacgaatgcggtatcgcatttagtcaaaagtcacaccttgtggttcatcaacgaacccacacaggagagaaaccatacgagtgtatacagtgcggcaaggcacacgggcacaagcacgccctgactgatcacctgcggattcacaccggagaaaaaccatatgaatgtgcggaatgtggaaaaacgtttcgccacagcagcaatttgatccagcacgtgcgatcacacacaggcgaaaaaccctatgaatgtaaggagtgtgggaaatctttccgctataatagctccctcacagagcacgtgcgaactcacacaggagagataccatacgaatgcaatgaatgcggcaaggctttcaaatacagcagctctcttacaaaacacatgagaatacacactggcgagaaacccttcgagtgtaacgagtgtggaaaggccttctcaaaaaagtcccatttaatcattcaccagcgtactcacactaaggagaaaccatataagtgcaatgagtgcggaaaagctttcggacactcatcttctttgacataccacatgcggacgcatacaggcgaatccccctttgaatgtaaccagtgtggtaagggattcaagcagatcgagggcctgacccagcatcaacgtgtgcataccggcgaaaagccttatgaatgtaatgagtgtggcaaagccttttcccagaagtcgcacctgatcgttcaccagcggacccacaccggggagaagccgtacgagtgtaacgagtgtgagaaagctttcaatgccaaatctcagttggtgatccaccagaggtcacacaccggagaaaagccctatgaatgcaatgagtgcggcaaaaccttcaaacaaaacgcttccctgacaaagcatgtcaaaactcattctgaagacaagtcccacgagtag

SEQ ID NO: 141404 - DNA, 1896 bp, synthetic construct
  misc_feature 1..1896: note = Description of Artificial Sequence: Synthetic coding sequence
  source 1..1896: mol_type = other DNA
atgtcagtgtcttccggggtgcagatcctcaccaaaccggagaccgtggatcgcagacgtagtgctgaaactaccaaggaggcgggtcgacctttggaaatggccgtgtccgaacctgaggcctccgccgctaaagaatggaaacagttagaccccgcacagagcaacctgtacaatgacgtgatgctcgaaaactactgcaatcaggcctctatgggatgccaggctcctaaacccgatatgatatcaaaattagagaagggagaagcgccgtggctgggcaaaggtaagcgcccctcccagggttgccctagtaaaattgccaggccaaagcagaaggagactgacggaaaggttcagaaagacgatgatcaactcgaaaatattcagaagagtcaaaacaaactgttgagggaggtcgccgttaagaagaaaacacaggctaagaagaacggatcagactgtggttccctgggaaaaaagaacaacctgcataagaagcacgtgccttctaaaaagaggttactcaagtttgaaagctgtggcaagattctgaagcagaatctggacctccctgaccattctagaaactgtgttaagaggaaatctgacgccgccaaggaacataagaaaagcttcaaccactccctttcagacacaagaaagggaaaaaaacagacaggaaaaaaacatgaaaaactgagctcccattcttcttccgacaagtgcaacaaaacagggaagaaacacgacaaactgtgttgccattcttcttcacacattaaacaagacaagatccagaccggggaaaaacacgagaagagccccagcctgtcgagctctacaaaacacgagaagcctcaagcctgtgtgaagccttacgaatgtaaccagtgcggcaaagtgctgagccataaacaaggcttaattgatcatcagcgcgtccacactggggaaaaaccatatgagtgcaatgaatgcgggatcgcattttcacagaaatcccacctggtagtgcatcagagaacacacaccggcgaaaagccctatgagtgtattcagtgcggcaaagcacacggccacaaacacgccctgacagaccatctccgtatccataccggagagaagccgtacgagtgcgctgaatgcggtaaaactttcagacactcatccaacttgatccaacacgtccggagtcacacaggcgaaaagccttacgaatgcaaggaatgcgggaaatccttcaggtataatagtagcctgacggaacacgtgcgaacccatacgggtgagatcccatatgaatgcaatgagtgtggtaaggccttcaagtactcttcatccctgaccaagcatatgaggatacataccggggagaagccttttgaatgcaacgagtgtggcaaggcgttctcaaagaagagccacctcatcatccaccagcggacccatactaaggagaaaccatataaatgtaatgaatgcgggaaagcattcggccacagctcttctcttacgtaccatatgcgtactcatacaggggagtccccctttgaatgcaaccagtgtggcaaaggattcaaacagatagaagggcttacccagcaccagagagtgcacactggtgaaaaaccttacgaatgcaacgagtgtggtaaggccttttcccagaagagccacctgatagtgcatcagaggacacataccggcgaaaaaccttatgagtgtaacgagtgtgaaaaggcgttcaatgcaaaatcacagctagttatacaccagaggagtcacactggagagaaaccttatgagtgtaacgagtgtggtaaaactttcaagcagaacgccagcctgaccaaacatgtgaaaactcatagtgaagataagtcacacgagtag

SEQ ID NO: 141405 - DNA, 1653 bp, synthetic construct
  misc_feature 1..1653: note = Description of Artificial Sequence: Synthetic coding sequence
  source 1..1653: mol_type = other DNA
atgcctcttcaggggtccgtcagcttcaaggacgtgacagttgacttcacacaggaagaatggcagcagctggatcccgcgcagaaggcgctgtaccgcgatgtgatgctcgaaaactattgtcacttcgtgagcgtgggatttcatatggccaaacccgatatgataaggaagctcgagcaaggcgaggagctttggacccagcgcattttcccaagttacagttatctcgaggaagacgggaaaacagaagatgtgctggtgaaatttaaagagtatcaggaccgtcattcaagaccattaatcttcatcaatcacaagaagctgattaaggagcgcagtaatatctatgggaagacttttactttgggtaagaatcgtatttcgaagactatcctatgcgagtataagcccgacgggaaagtactcaaaaacatcagcgagttagtaattaggaacattagtccaataaaggaaaaatttggagattcgactggttgggagaagagcctcctgaacacaaagcacgaaaagatccacccggcagtgaacctgcacaaacaaaccgaaagggtcctcagcggaaaacaggagttgatacagcaccagaaggtgcaggctccggaacagccatttgaccataatgaatgcgagaaaagttttctgatgaaagggatgctgttcacacacacccgggcccataggggtgagaggactttcgagtacaacaaggacggaatcgcctttatagaaaaaagttctttatccgtgcacccatcaaatctcatggaaaagaaaccatcagcctacaataagtacggcaagtttctgtgcagaaagcccgttttcatcatgccccagagaccacagaccgaggaaaaacctttccattgtccctactgtggtaataatttcagacgcaagtcctacttaatagaacatcagagaatacacactggggaaaaaccttacgtatgcaatcagtgtggaaaagcatttcgtcagaagactgccctaaccctgcatgagaagacgcatatcgagggaaaacctttcatttgtatcgactgcggcaagtccttccgtcagaaagcaaccctgacacggcaccacaaaactcacacgggtgaaaaggcatacgagtgcccccagtgcgggtctgcattccggaaaaaaagctacctgattgatcatcagcgcacccacactggtgaaaaaccttatcagtgtaacgagtgtggcaaggcctttatccagaagactactttgaccgtccatcagcggacacacacaggggaaaagccttacatctgtaacgagtgtggcaaaagtttctgccaaaagacgacactgactttgcaccagcgaattcacactggtgagaagccatacatctgtaacgagtgtggaaaaagcttccggcagaaggccatccttacagtgcaccataggatccacaccggcgaaaagtcgaatggctgtccgcagtgtggaaaagctttcagtcgcaagtccaatttaatccggcatcaaaaaacccatacaggagagaagccctatgaatgtaaacagtgtggaaagttcttcagttgtaagagtaacttgatagtacatcagaagacccacaaagtggagaccactgggattcagtag

SEQ ID NO: 141406 - DNA, 1650 bp, synthetic construct
  misc_feature 1..1650: note = Description of Artificial Sequence: Synthetic coding sequence
  source 1..1650: mol_type = other DNA
atgtctcagggctctgtgagctttaaagatgtaacagttgatttcacccaggaggagtggcagcagctggatcctgctcagaaagctctgtatagagacgttatgctggaaaactactgtcacttcgtatcagtgggttttcatatggcaaagccggatatgattaggaaacttgagcaaggcgaagagctgtggacacagcgaattttcccttcctattcctatttagaggaggacggaaagacagaggacgtcctagtgaaattcaaggaataccaggatcggcatagccgcccgctgatattcatcaatcacaaaaagctgatcaaagagcgcagcaatatttacggcaagactttcaccctgggcaagaatcgcattagtaagaccatcctgtgcgaatacaagccagacggcaaggtgctaaaaaacataagcgagcttgtcattcggaatatcagtcctatcaaggaaaagtttggggactccactggctgggagaaatcactgctcaatactaagcacgaaaaaattcatcctgccgtgaatctgcacaagcagaccgagagggtgttgagcggcaaacaagagctgattcagcaccagaaggtgcaggcccctgagcagccctttgaccacaacgaatgtgagaaatccttcctcatgaagggcatgctgttcacacataccagagctcataggggagaacgtacattcgagtacaacaaagacggaattgcttttatcgagaagtccagtttatcagtgcacccatccaacctgatggagaaaaaacccagcgcctacaacaaatatggaaagttcctgtgccgcaagcccgtgttcatcatgccacaacggccacagacagaagaaaagccatttcattgcccatattgcggaaataattttaggcgcaagagctaccttatagaacaccagcgtattcacaccggcgagaaaccgtacgtgtgcaatcagtgtgggaaagcctttcgccaaaaaacagcgttgacactgcatgaaaaaacacacatcgaaggaaaacccttcatatgcattgactgcggcaaaagtttcagacagaaggcgacgctaacccgccaccacaagacacatactggtgaaaaggcatatgaatgtccacagtgtggatccgccttcagaaaaaaatcctacttgatcgaccaccagaggacccacacaggagaaaagccttatcagtgcaatgagtgcggaaaggcattcattcagaagactacgttgacagtgcaccagaggactcacactggggagaaaccttatatctgcaatgaatgcggaaagagcttctgccaaaagacaacactgactctccaccagcgcattcatacaggtgaaaagccctacatctgtaacgaatgtggaaagtcttttagacaaaaggcgatcctaactgtgcaccatcgcattcatactggggagaaaagcaatgggtgtccacagtgcgggaaagccttttctaggaagtcaaaccttataagacatcagaaaacccacaccggggaaaagccatacgaatgcaaacagtgtggtaaattcttcagctgcaagagcaatctcattgtccaccagaagacccacaaagtagagactactgggatccaatag

SEQ ID NO: 141407 - DNA, 1503 bp, synthetic construct
  misc_feature 1..1503: note = Description of Artificial Sequence: Synthetic coding sequence
  source 1..1503: mol_type = other DNA
atggaggaaagccattttaatagcaacccatatttttggccctcaatcccgactgtgagcggccagattgaaaacaccatgtttattaataagatgaaagaccagctgctgccagagaagggctgtggcctcgccccaccccattaccccaccctgttaacagtgcccgccagcgtgtcacttccaagcgggatttctatggacacagagtctaaaagcgaccagttaactccccactcccaggcctctgtaacccagaacatcaccgtggtccccgtccccagtaccgggttaatgaccgccggccccgggttagtgatcacaagtccctccggatccctggtgactactgctagctctgctcaaacttttcctatttcagcgcctatgatagtgagcgctctaccaccaggttcccaagccttacaggtcgtgcctgatcttagtaaaaaagtggcaagcactctcaccgaagaggggggcggaggtggaggcggaggaggaagcgttgctcccaaaccaccaaggggcagaaaaaaaaaaaggatgctggaaagcggtttgcccgaaatgaacgacccatacgtcctctcgcccgaagatgacgacgatcaccagaaagatggaaaaacatatagatgtcgcatgtgttctcttacgttttactccaaatcagagatgcaaatacacagcaagtctcatactgagactaagcctcacaagtgtccgcactgctcgaaaactttcgctaatagctcatacttggcacagcatattagaattcatagtggcgcaaaaccttattcttgcaatttctgtgagaaatcatttcggcagctgagccatctgcagcagcatactcgcatacacacaggcgatcgtccttacaagtgcgcccaccccgggtgcgagaaggccttcactcagcttagtaacctacaatcccatagaaggcagcacaataaagataagccgttcaaatgccataactgccaccgggcttataccgatgccgcatctctggaagtgcacttatctacccatactgttaagcacgcgaaagtttatacctgtacaatttgcagtcgagcctatacttccgaaacttatttaatgaagcatatgaggaagcacaaccctcccgacctgcaacagcaggtccaggcagccgccgccgccgccgccgtggcgcaggcccaggcccaagcccaggcacaggctcaggcgcaggcccaggcacaggcccaggctcaagccagccaagcctcacaacagcagcagcagcagcagcaacagcagcagcagcagcagcagcagcctccaccgcactttcagagtcctggagccgccccgcagggaggaggggggggcgacagcaaccctaaccccccaccccagtgcagtttcgatcttaccccttacaagacagcagagcaccacaaggatatctgtctgaccgtcaccacctctaccatacaggttgagcacttggcctcttcttag

SEQ ID NO: 141408 - DNA, 1734 bp, synthetic construct
  misc_feature 1..1734: note = Description of Artificial Sequence: Synthetic coding sequence
  source 1..1734: mol_type = other DNA
atggaggagagccatttcaactccaacccttacttttggccttcgatccctaccgtttcgggtcaaattgagaatacaatgttcattaataagatgaaagaccagctcttgccagagaaggggtgcggtctggcaccgccccactatccaactctgttaacggtgccagcctccgtgtcacttccgtcaggaatttctatggacacagaatctaagtcggatcagcttaccccgcactcccaagccagtgtcacccagaatattacagtggtccctgtccctagcactggcctcatgacggccggggtgagctgctcgcagcgctggagaagggaggggtctcagagcagagggcccggcctggtcatcacctcaccctcgggctccctggtgacaaccgcatcgagtgctcagacctttcccattagcgcaccgatgatagtctctgccctgccccccggatcacaagccttacaagtggtccctgacctctcaaagaaagtggcctccacactaacggaggaaggtggaggcggtggtgggggcggaggttcagtcgctccaaagccaccaaggggcaggaaaaaaaagcggatgctcgaaagcggactccccgagatgaacgacccgtacgtgctgtcaccagaggatgatgatgatcaccagaaagatggcaaaacctaccgatgcaggatgtgtagcctgaccttttatagtaaaagtgaaatgcagatccacagtaagagccacactgagacgaagccgcacaagtgtccccattgttccaagacctttgcaaacagttcttacctggcccagcacatcaggatacactctggcgcgaagccatacagttgcaacttctgcgagaagtcgttccgacagctgagccacctgcaacaacacacaaggattcattccaaaatgcataccgagacaatcaaacctcacaagtgcccacattgcagcaagacctttgccaatacgtcatacctcgcacagcacttacggattcattccggggcaaaaccgtataattgttcttattgccagaaggccttccgccaattgagtcatctgcagcaacacacacgtatccacacaggggacagaccttacaagtgcgcgcaccccgggtgtgaaaaagctttcacacaactgtctaacctgcagagtcacagacggcagcacaataaggacaagccctttaagtgtcataactgccacagagcctacaccgacgctgccagtctcgaggtccatctcagcacccacaccgtcaaacatgccaaggtgtatacttgcactatctgttcacgggcatacaccagcgagacatatctcatgaaacacatgaggaagcacaacccgcccgaccttcaacaacaggtgcaggcagccgctgccgccgccgcagtcgcccaggcccaggcccaggcccaggcacaggcacaggctcaagcacaagcacaggcacaggcccaagcttcccaggcttcacagcagcagcaacagcagcagcaacagcagcagcagcaacagcagcaaccccccccgcacttccagtcgccaggtgctgccccccagggcggcgggggaggagattcgaatcctaaccccccaccacagtgttcctttgatctcaccccgtataagactgctgaacaccataaggacatctgccttaccgtgacgacctctacaattcaggtggaacatctcgcctcctcttag

SEQ ID NO: 141409 - DNA, 1551 bp, synthetic construct
  misc_feature 1..1551: note = Description of Artificial Sequence: Synthetic coding sequence
  source 1..1551: mol_type = other DNA
atggaggaatctcacttcaatagcaatccatacttctggccctccatccctacagtgtcaggacagattgagaacaccatgtttataaacaagatgaaggaccagctgctgcctgaaaaagggtgcggcctggctcctccccattatcccacactgttgaccgttccggcctcagtttccctgccctcaggcatttcgatggacaccgaaagtaagtccgatcagctgacaccacattctcaggcatctgttacacaaaatattaccgtagtcccggtgccaagtacagggttgatgaccgcaggagtgtcatgttcgcaacggtggcgccgtgaaggttcccagagcagggggcccggcctggtgattacgtccccttctggctcgttagttacaactgcgtccagcgctcagacgttcccaatctctgccccaatgatagtgagtgcccttccaccagggagtcaggccttacaggtggttccagacctttccaaaaaggtagccagcaccttgaccgaagagggaggtgggggcggcggtggcggaggatcagtcgctcccaaaccgcccagaggcaggaagaagaaaaggatgctggaatccggactcccagagatgaatgacccatacgtgttgtcacccgaggacgatgacgaccaccagaaggacggcaagacttataggtgtcgtatgtgctcactaaccttctactccaaaagtgaaatgcagattcattctaaaagtcatactgagaccaaaccccacaaatgtccccattgctccaagactttcgcgaattcctcatacctggcccaacatatacggattcattctggtgccaaaccgtattcctgtaacttttgtgagaagagctttcgtcaactcagccacttgcagcagcacactaggatacacacaggagacaggccttacaaatgcgctcaccccggttgtgagaaggccttcacgcagctgtctaatctccaatctcacagacggcaacacaacaaagacaagccttttaaatgccacaactgtcaccgcgcttatacagacgctgcaagcttagaagtgcatctgtcaactcacaccgttaaacatgccaaagtgtacacctgcacgatctgcagccgcgcctacacaagtgagacatatttgatgaaacacatgcgtaaacacaaccccccggatcttcaacaacaggttcaggcagccgcggctgccgctgccgtggcacaggcccaagcccaggcccaggcccaggcccaggcccaggctcaggcccaagctcaggcccaggcctcccaggccagccaacagcagcagcaacagcagcagcagcaacaacagcaacagcagcagccacctccgcacttccaatcccccggcgcagcaccccagggcggcggggggggtgatagcaaccccaatccccccccacagtgctcatttgacctgacaccctataaaaccgccgaacatcacaaagatatctgcctgacggtgaccacgagtaccatccaagtcgagcatcttgccagttcctag

SEQ ID NO: 141410 - DNA, 1551 bp, synthetic construct
  misc_feature 1..1551: note = Description of Artificial Sequence: Synthetic coding sequence
  source 1..1551: mol_type = other DNA
atggaagagtcgcactttaactcaaacccctatttctggcccagcatcccgaccgtgtcagggcaaatcgagaacacgatgtttataaataagatgaaggaccagttgcttccagagaagggatgtggtcttgccccaccacattaccctaccctcttgacagtgccggcaagtgtatctctcccatccggcatctcaatggatacggagagcaaatctgaccaactaacaccacatagccaggcctctgtcacccagaatattaccgtcgtgccagtcccatctactgggctaatgaccgctggcgtgagctgcagccagagatggagacgtgaaggctcccagagcaggggccctggcctagtgatcacgtctccatcaggatcgctggtgactacagcctcaagcgctcagacctttcctattagtgcccccatgatagtctctgccttgccgccaggatcacaggcgctacaggtagtgccggacttgagcaaaaaggttgctagtactctaaccgaagagggaggcggaggtggaggcgggggagggtctgtggcccctaagccccctaggggaaggaagaagaaaaggatgctggaatccggccttcctgaaatgaatgatccgtacgtgctgtcaccggaagatgacgatgaccatcagaaggacgggaagacgtatcgttgtcgaatgtgtagcctcacattctactctaagagcgaaatgcagatacactcaaagagccacactgaaactaaaccccacaagtgtcctcactgcagtaaaacgttcgctaattcttcctacctggcccagcatattaggatccatagcggcgcgaagccctattcttgcaatttttgcgagaagagctttcggcaactctcccatcttcagcagcataccaggatccacacgggggatagaccatacaagtgcgcacatcccggttgtgagaaggcctttacacagttaagtaacctgcagtctcatcgccgtcagcataataaggacaagccctttaagtgtcataattgtcaccgggcttacacagacgccgccagccttgaggtccacctgagtactcacacagtgaaacatgctaaggtctatacttgcactatctgttcgagagcatatacgagcgaaacttacctgatgaaacatatgagaaaacacaatccccccgatctgcagcaacaggtgcaggctgccgctgctgctgcagccgtggcgcaggcccaggcccaggcccaggctcaagcacaagcgcaggctcaggcacaggcacaagcccaagcttcgcaggccagccagcagcagcagcagcagcagcaacaacaacagcagcagcaacagcaaccgcctccccattttcagtcccctggcgcggctcctcagggtggaggcgggggcgacagtaatcctaaccctcctccccagtgcagcttcgacttgacaccctacaagaccgccgagcaccacaaggacatttgcctgaccgttaccacctctacaatccaggtagaacatttggcatctagctag

SEQ ID NO: 141411 - DNA, 1734 bp, synthetic construct
  misc_feature 1..1734: note = Description of Artificial Sequence: Synthetic coding sequence
  source 1..1734: mol_type = other DNA
atggaagagtcccacttcaactccaatccctacttctggccgtccatccctaccgtatccgggcagatcgagaacacgatgtttattaacaagatgaaggaccagctcctccccgagaagggttgtggattagctcctcctcactatccgaccctactgacagtgccagccagtgtgagcctgccgagcggtatctccatggatacagaatccaagagtgaccagctgactccccatagccaggcatcagtgactcaaaatattactgtcgtccctgtgccttctacaggcttgatgactgcaggagtaagctgctctcagcgatggagacgggagggctcccagtctcgcggcccaggcctggtaattacctctcctagtggaagcttagtaacaaccgcaagcagtgcacagacctttccaattagtgctcctatgatcgtctccgccctgcctcccgggagccaggcactgcaagttgtgccagacctttctaaaaaggtggcttccaccctcaccgaggagggcggtggaggtggcggggggggtgggtccgtggccccaaagcccccaaggggacgtaaaaagaaaaggatgttggaatccggccttccggagatgaacgacccttacgtgctttcccctgaggatgacgacgaccatcagaaggatggaaaaacctatcggtgtcgcatgtgttctctaaccttctacagcaagtccgagatgcagatccacagcaagtcacataccgaaacgaaaccccataaatgcccacattgcagtaagactttcgccaactcctcctatcttgcacaacatattcgaatccactctggcgcaaagccatactcttgcaatttttgcgaaaagagcttcagacagctgtcccatctccagcagcacactcgtattcactctaagatgcacaccgaaacaatcaaacctcataaatgtccccactgctctaaaacatttgcaaatactagctacctcgctcagcatctccgaatccactctggagccaagccgtataactgcagttattgtcagaaagcatttcgccaactgtcgcacctgcaacagcatacacggatccacacaggcgaccggccttacaaatgtgcccatcctggctgtgaaaaggcctttacccagctctcaaatctacagtctcataggagacagcataacaaagacaaaccctttaagtgccacaattgccaccgcgcttacactgacgcagcctcgctggaagtgcatctgagcactcacaccgttaaacacgcgaaggtgtacacttgtaccatctgctcacgcgcctacactagcgaaacctacctgatgaagcatatgagaaaacataaccctcccgatctgcagcagcaagtacaggccgctgccgcagccgccgccgtggcccaggcacaggcccaggcccaggcacaggcacaggcccaggcgcaagcccaggcccaagcacaggcgagtcaggcatcccagcagcaacagcagcagcagcagcaacagcagcagcagcagcagcaacctccacctcacttccagtccccaggtgctgcgcctcagggcggggggggcggggactccaatcctaacccccccccccaatgtagcttcgatctgaccccctacaaaaccgcggaacatcacaaagatatttgcctcaccgtgaccacctcaactattcaagtggaacacctagcatcatcatag

SEQ ID NO: 141412 - DNA, 1008 bp, synthetic construct
  misc_feature 1..1008: note = Description of Artificial Sequence: Synthetic coding sequence
  source 1..1008: mol_type = other DNA
atggaagaatctcatttcaactccaacccctatttctggccatccatccctacagtgagtggccaaatagaaaacaccatgttcattaataagatgaaggaccagttgttgcccgagaaggggtgtggattggccccaccccactacccaactctcctgacagttcccgccagcgtgtcactccccagtggaatatcaatggacacagagtctaagagtgatcagctaaccccacactcacaagcttcggtgactcagaacatcacggtggtgccagtgccatccactggcctgatgacagcaggtgtgtcttgctcacagcgatggcggcgggaaggcagccagtcccgggggcccggcttggttatcacctctccgagcgggagtctcgtcacaaccgcgagctcagcacagacatttcccataagcgcgcccatgatcgtttcggccctgcccccagggtcccaagctctgcaagtcgtacccgatctgtcaaagaaagtcgcatctactctcaccgaggaagggggaggcggcgggggaggtggcggttcagtagctcccaaacctccccggggcagaaaaaagaagagaatgttagagtctggtctgcctgaaatgaacgatccatatgttttgtctccagaagatgatgacgaccaccagaaagacggaaagacctacaggagtgaaggaaactgcggaacaggtaacgggcaatctctcggcctgatggattccgtgcctggctccactacaaacctcctgtgcgatcccgggtgtaggatgtgttctctcaccttctacagcaagagcgagatgcagattcattcaaagagccacacagaaactaaaccccataaatgtccacattgctcgaagacctttgccaatagtagctaccttgctcaacacattcgcattcatagcggggctaaaccatactcctgtaacttctgtgaaaagtcattccgacaactgtcacacctccaacagcacaccagatag

SEQ ID NO: 141413 - DNA, 834 bp, synthetic construct
  misc_feature 1..834: note = Description of Artificial Sequence: Synthetic coding sequence
  source 1..834: mol_type = other DNA
atggaggaatcccacttcaattccaacccttacttttggccctcgatccctaccgtgtcgggccagatagagaatacaatgttcatcaataaaatgaaagaccagctgttacccgagaaaggctgcggattagcaccgccacactaccccacattgcttaccgttcctgcgtctgtgtcgctgcctagcggcatcagtatggacacggagagtaagtctgatcagcttaccccacactcacaggcttcagtaactcagaatataaccgtagtccctgtgccgagtacgggtctcatgactgccgggcccgggttggtcataacctccccctctgggtcactggtaaccaccgcctcttccgcccaaacatttccaattagtgccccaatgatcgtttctgccctgcccccagggtcgcaggcccttcaggtggttcccgacctctcaaagaaggtagcgtcgaccctgacagaagaaggagggggcggcggaggtgggggtggctcagtggctccaaaacccccacggggccggaaaaagaaacgtatgttggagtcggggctccccgaaatgaatgacccctatgtgttgtccccagaagacgacgacgaccatcagaaggacggcaagacataccgatgtaggatgtgtagcctgaccttctactcaaagtcagaaatgcaaatccacagtaagtctcacacagagacaaaaccgcataagtgtccacattgcagcaagactttcgctaactcatcttatctcgctcagcacattcgaatccattccggcgcaaagccttacagttgtaatttttgtgaaaaaagcttctag

SEQ ID NO: 141414 - DNA, 1386 bp, synthetic construct
  misc_feature 1..1386: note = Description of Artificial Sequence: Synthetic coding sequence
  source 1..1386: mol_type = other DNA
atggaggagtcacacttcaactcaaacccttatttttggcccagcatccccacggtttccggtcagattgagaataccatgttcattaacaagatgaaggaccagctgctacctgaaaaaggctgtggactggccccaccccactaccctactctcctgactgtgcctgcctctgtcagcctgccatcagggatctccatggataccgagtccaaatcggatcagttaactccacatagccaagcatcagtgacacagaacattactgtggtaccagtgccatctacaggactgatgactgccgctctccaagtggttcccgacctatctaaaaaagtggcttcaaccctgaccgaggaaggtggcggaggcggcggaggtggcggctccgtggcgcctaaaccaccacgcggaagaaagaaaaagcgaatgctggagtctgggctccctgaaatgaacgatccctacgtgctgtcccctgaagacgacgacgaccaccaaaaggacgggaagacctacagatgtaggatgtgttccctgactttttacagcaaatcagagatgcaaatccattcaaagagtcacacggagactaagcctcataaatgcccccactgctcaaaaactttcgccaatagcagctatctggctcaacatatccggatacactctggagcaaaaccgtattcttgcaacttttgtgaaaaaagttttcgccagttgtcgcatctgcagcagcacaccaggatccacaccggggaccgaccttataagtgcgcccatcctggctgtgagaaggcattcacgcagctttccaacctacaatcccacagaagacagcacaacaaagacaaacctttcaagtgccacaactgccatcgcgcttacaccgacgccgcctctcttgaggtgcacttgtctacacacacagtgaagcacgccaaagtctacacctgcacaatttgctcacgggcctacacatcagaaacgtaccttatgaaacatatgcgtaagcataacccacccgacctccaacagcaggtgcaggccgccgctgcagctgccgcagttgctcaggcacaagcccaggcacaggcccaggcccaggcccaggcacaggctcaagcacaggcccaggcatctcaggcctcccagcagcaacagcagcaacaacagcagcagcagcagcagcagcagcagcccccacctcatttccagtcaccaggtgctgccccgcagggaggtggtggtggcgattcaaatccgaatcccccgccacagtgcagctttgacctgactccttacaaaacagctgaacatcacaaggacatctgcttaaccgtgaccacctccactattcaggtcgaacatctcgccagcagttag

SEQ ID NO: 141415 - DNA, 1161 bp, synthetic construct
  misc_feature 1..1161: note = Description of Artificial Sequence: Synthetic coding sequence
  source 1..1161: mol_type = other DNA
atgatcctcgggtctctaagcagagccggaccacttccgcttctgcgccagcccccgattatgcagccacccctcgaccttaaacagattctaccatttccactcgaacctgcccctacgctgggcctgttcagcaactactccactatggatcccgttcagaaagccgtcctgtcccacaccttcggcggcccgctcctgaagacaaagcgtcccgttatctcatgcaatatctgccagatccgcttcaactcccaatcgcaagctgaagcgcactataagggtaaccgtcatgcacggcgcgtaaagggtatagaggctgctaagactcggggccgtgagcccggtgttagggaacccggcgaccccgcccctcctgggtccactcccacgaacggcgatggagtagccccccgtcccgtttcgatggaaaatgggttaggaccagcacccggatccccagaaaaacaacctggttccccttctcccccttctatccccgagaccggccaaggagttacaaagggagaaggtgggactcctgcgcccgcctcactgccgggcgggtccaaagaagaagaagagaaggctaaaagactgctgtactgcgccttgtgcaaagtagcagtgaacagcctgagccagctggaagcccataataagggtaccaagcacaaaaccatcctggaggctaggagcgggctcggcccaatcaaggcctatccgagacttggtcctccaactcctggtgagcccgaggccccagctcaagatcgcacatttcactgtgaaatatgcaacgtcaaggtcaacagtgaggtgcaattaaaacagcacataagtagccgacgacacagagacggagtagcgggaaagcccaaccccctgcttagtaggcataagaagagccgaggggcaggggagttagctggcaccctgactttctccaaggagttgccgaaatcattggcaggcggtttgctgccctctcctcttgccgtagccgctgtgatggcggctgccgctggcagcccgctttccttgaggcctgcaccagccgctccccttctgcagggtcccccaattactcacccccttctgcaccccgctcctgggccgatccggacagcccacggacctattctctttagcccgtactag

SEQ ID NO: 141416 - DNA, 918 bp, synthetic construct
  misc_feature 1..918: note = Description of Artificial Sequence: Synthetic coding sequence
  source 1..918: mol_type = other DNA
atgatccttgggagtctgagcagagcaggtccactccctctcctccggcaaccaccgatcatgcaacccccccttgacttgaagcagatcctgccatttcccctcgagcccgccccgacactgggactgtttagcaactatagcaccatggatcccgtccagaaagccgttctgagccacactttcggaggaccccttctcaaaacaaagcggcccgtaatcagctgcaacatttgccagattaggtttaatagtcagtcacaagccgaagcccactacaagggcaatcggcatgcccggcgcgttaaggggatagaagccgcgaaaacccgtgggagggagcccggtgtgagggagcccggcgatcccgcccccccagggagtaccccaaccaatggtgacggcgtcgcacctcgaccaggcacaaaacataagacaatattggaagccagatccggcttaggcccaataaaggcctatccgcgcctgggacctcctaccccaggggagcctgaggctcccgcacaggatcgcacctttcattgcgaaatttgtaatgttaaagttaatagtgaagtgcagttgaaacaacatatctccagtcgccgacatcgtgacggcgtggcgggaaaacctaacccgctgttgtcaaggcacaagaaatcacgcggtgctggcgaattagccggcaccctgacattctccaaggagctgccgaagtccctagcaggcggacttttgccctcacccctggccgtcgccgccgtaatggccgccgccgccggaagcccactgagcctgaggccagcaccagctgcccccctcttgcaaggccctcctattacacatccgttgctccacccagcacctggcccaatccgcactgctcacggcccaatattgtttagtccatattag

SEQ ID NO: 141417 - DNA, 1101 bp, synthetic construct
  misc_feature 1..1101: note = Description of Artificial Sequence: Synthetic coding sequence
  source 1..1101: mol_type = other DNA
atgcagccaccgttggacctaaagcagatcctgccattccctctcgaacctgcacctacgttaggcctgtttagtaattactctacgatggacccggtccagaaggccgtcttatcgcacaccttcggcgggcccctgctcaagaccaaaagaccagttatctcttgtaatatatgtcagattagattcaacagccagtctcaggccgaggcccattataagggtaaccggcacgctagacgggtaaaaggtatcgaggcagctaagacccgaggacgtgaacctggggttcgcgaaccaggcgaccccgccccacctggttccacccctaccaatggtgacggcgtggccccgcgcccagtatcgatggagaatggtttgggccctgcccctggctctcctgaaaagcagcccgggtctccatcccccccaagcataccagaaaccggccaaggagtaaccaaaggggagggaggcaccccagctcctgccagtctgcctggcggaagtaaagaagaagaagaaaaagcaaagagactgttgtattgtgccctctgcaaggtcgccgtgaattcactgtctcaattggaagcccacaacaaaggaaccaaacataaaaccatccttgaagctaggagcggcctagggccaatcaaggcctacccaaggcttggcccacccacacctggagagccagaggcccccgcccaggaccgcacatttcattgtgaaatctgcaatgtgaaagtcaattctgaagtgcaactgaaacaacacataagtagccggagacatcgggacggagtcgccgggaaacccaaccctttgctgtctcgccacaaaaaaagcagaggagctggtgagcttgctggtactctaacattctctaaggaactgccgaagagcctcgcaggtggtttgctgcccagtccactggcagtggctgcagttatggcggctgccgccggttcccccctgtcactgagaccagcccctgctgctccactcctgcaggggccccctattacgcaccccctgctgcacccagctcctgggccaattaggaccgctcatggtcccatcctgttctctccctattag

SEQ ID NO: 141418 - DNA, 699 bp, synthetic construct
  misc_feature 1..699: note = Description of Artificial Sequence: Synthetic coding sequence
  source 1..699: mol_type = other DNA
atgcagccgcccctggatctaaaacagatattgcccttcccactcgaaccagcccccactctcggcttgttttcaaactatagcactatggaccctgttcagaaggccgtgttgtctcataccttcggaggcccgctgcttaagaccaaacggccggtgattagttgtaatatctgccagatacggttcaacagccagtctcaagctgaggctcattacaagggcaataggcacgcccgcagggtgaaaggaatcgaagcagctaagaccagggggagggaacctggcgtgcgcgagccgggggacccggcaccaccgggatctacgcctaccaatggggatggtgttgctcccaggcctgtttctatggagaatggcctcgggcccgccccaggatccccagaaaaacagcccggaagtccgagcccgccaagtattcccgagactggccagggtgtaacaaagggggaaggaggaacccccgccccagccagtctgcccggcgggtccaaggaggaggaggagaaagcaaagaggctgctgtattgcgccctgtgcaaggtggccgttaactcgctgtcacagctggaggcacataacaaaggcacaaaacataagaccattctggaggcccgaagcggcctgggcccaattaaggcttatcctaggcttggcccgcccacgcctggtgaaccctag

SEQ ID NO: 141419 - DNA, 1101 bp, synthetic construct
  misc_feature 1..1101: note = Description of Artificial Sequence: Synthetic coding sequence
  source 1..1101: mol_type = other DNA
atgcagccaccactcgacctaaagcagattttgcccttcccgctggaacccgcaccaactctcgggttgttctctaactacagtaccatggaccccgtgcagaaggccgtattgagccacacatttggggggccattgcttaagaccaagaggccggtgatttcatgcaacatctgccaaatccgcttcaatagccagtcccaggccgaggcccactataaaggaaaccgccacgcccgaagggtgaaagggatcgaggctgccaaaaccagaggcagggaaccaggtgtgcgcgagcctggggaccctgcccctcccgggtcaacccctactaatggagatggcgtggcgcctagacccgtcagcatggaaaatggcctcgggcctgcaccgggaagccccgaaaagcagcccggttccccaagcccaccctctattcctgagacagggcaaggcgttaccaaaggggagggcggtacacccgcaccagcctcattacccggaggttccaaagaggaggaagaaaaggcaaagcggcttctttactgtgccttatgcaaggtggccgtcaacagtctatcccagctggaggcacacaacaaaggaaccaaacacaaaaccatcctggaggctaggtccgggctgggtccgattaaggcttaccctagacttggccccccgacccccggtgagcccgaagccccagcccaagatcgaacttttcactgcgaaatctgtaacgtgaaagtgaactctgaggtgcagcttaagcagcatatctcctctaggcggcatcgtgacggagttgccgggaagcccaatccattattgtctcggcataagaagtcccggggagccggcgagttggcaggtaccctcacattcagcaaagagctgccaaaatctttagctggtggactgttaccctcgcctcttgccgtcgccgcagtgatggctgctgccgctggtagccccctttccttgaggcccgcaccagccgcacctttactgcagggccctccaataacacatccactgctgcatcctgcccctgggccgataaggactgctcatggaccaatcctcttcagcccatactag

SEQ ID NO: 141420 - DNA, 498 bp, synthetic construct
  misc_feature 1..498: note = Description of Artificial Sequence: Synthetic coding sequence
  source 1..498: mol_type = other DNA
atgcagccccccttggatcttaagcagatcttgccctttccattggagcccgcccccaccttggggctattctccaactactccaccatggacccagttcagaaggccgtgctctcacatactttcggcggccctctactaaaaaccaaacgcccagtcatcagctgcaacatctgtcagataagattcaattctcaaagccaagccgaggcacattacaaagggaacaggcatgcgagaagggtaaaagggatcgaggctgcgaagacaagaggccgcgagcctggtgtgagagaaccaggcgatccagcccctcccggatctactccaacgaatggagacggcgtggcaccccggccagtgtctatggagaatggactggggcccgcccctggttctcccgagaaacaaccaggttcgcccagccctccgagcatacctgagacaggccagggcgtcactaagggagaaggagggaccccggcacctgcaagctag

SEQ ID NO: 141421 - DNA, 438 bp, synthetic construct
  misc_feature 1..438: note = Description of Artificial Sequence: Synthetic coding sequence
  source 1..438: mol_type = other DNA
atgcagcctcctctggatctgaagcagattctccccttccctcttgaaccagcccccaccctgggtcttttttcaaactacagtactatggacccagtgcagaaagcagtgttgtcccatacatttggcggacccctgctcaaaactaagagacctgtgattagctgcaacatttgtcagattcgatttaactctcagagccaggctgaggcccactacaaagggaatagacacgcccgccgggtcaaaggcattgaggccgcaaagactagaggacgcgagcccggagtcagggagcccggcgaccccgccccacccggctctacccctaccaatggggacggcgtggcacctagaccagttagcatggagaacggtcttggtccagctccggggtcgcccgagaagcaacccggcagcccgagccccccaagctag

SEQ ID NO: 141422 - DNA, 1101 bp, synthetic construct
  misc_feature 1..1101: note = Description of Artificial Sequence: Synthetic coding sequence
  source 1..1101: mol_type = other DNA
atgcagcccccactcgatcttaaacagatcctacccttcccgctggagccagcaccaaccctcggcttgtttagcaattactctaccatggatcctgtccagaaagctgtgctcagccataccttcgggggcccattgttaaaaaccaagaggccagtgatctcttgtaacatctgccaaatacgtttcaattctcagagccaggccgaggctcactataaggggaaccgtcacgccagacgcgtgaagggaatcgaggccgccaaaactagaggcagagagcctggagtcagagaaccgggagacccagccccccctggttccacccccactaacggagatggcgttgccccccgccctgttagtatggagaatgggctcggacccgcccctggaagccccgagaaacagcccgggtccccttcaccaccctcaatcccagaaactggtcagggggtaaccaaaggtgaaggtggcacccccgccccagcctcactgcctggagggagcaaggaagaagaagagaaagcaaagcggctgttgtactgtgccctctgcaaggtagctgttaattcactgtcacagttagaggctcacaacaaagggacaaagcataagacaattctggaggctcggagcgggctgggcccgatcaaggcataccccagacttgggcctccaacaccgggcgagcccgaggccccagcccaagacaggacttttcattgtgagatctgcaacgtgaaagtgaactcggaggtccagctcaagcaacatatcagcagcagacgccatcgcgacggcgttgccggtaagcctaaccccctgttgagtagacacaaaaaaagcaggggagccggcgaacttgccggcacattgacctttagcaaagagctgcctaaatcactggccggaggcctgctgcctagccccctggctgtcgcagccgtcatggccgccgctgcgggctctccactgtcgcttcgcccagcaccagccgctccccttctgcaggggcctcccattacacatccgttgctgcacccagccccaggcccaatccggacagcgcatggacctattttgttctcaccgtactag

SEQ ID NO: 141423 - DNA, 858 bp, synthetic construct
  misc_feature 1..858: note = Description of Artificial Sequence: Synthetic coding sequence
  source 1..858: mol_type = other DNA
atgcagccccccttggacctgaagcaaattctgccatttcctctggaaccagctccgacattgggccttttctcgaactacagtaccatggatcccgtgcagaaagccgttctctcacacactttcggcggaccactgctgaagaccaagagacccgtgatctcttgtaatatctgtcaaattcgattcaattctcagtcccaagcggaagctcattataaaggtaatcgtcacgccagacgtgtcaagggaattgaagccgcgaaaactcgaggccgggaacccggggtccgagagcctggggacccagccccccctggcagtactcccaccaacggcgatggagtcgccccgcggcccggaaccaagcacaagacgattttagaagcccgctctgggctggggccaattaaagcttatcctagactcggtccacctacccctggggagccagaagcaccagcccaggacagaacatttcattgcgagatttgcaatgttaaggtcaactccgaggttcagctgaagcagcatatctcatccaggcggcacagagatggggtcgctggtaagccaaatccgctacttagtcgtcacaagaagtcacggggtgctggagaattggctgggacgctcacgttcagcaaagaattaccaaagagcctcgccggcggcctacttccctctcccctcgcagtcgccgcagttatggccgccgccgcaggctcacctctctccctgcggcccgcccccgccgccccactccttcaggggccacctattactcatccactacttcatccagcccctgggcccatccgcactgcccacgggccaatactgttcagcccatattag

SEQ ID NO: 141424 - DNA, 1110 bp, synthetic construct
  misc_feature 1..1110: note = Description of Artificial Sequence: Synthetic coding sequence
  source 1..1110: mol_type = other DNA
atgatgcaaccatctttggacattaaacccttcatgtcattccctgtcgattcatccagcgcagtgggactcttcccaaacttcaacacaatggacccggtacagaaagctgtcataaaccatacgttcggagtcagtatccctcctaaaaaaaagcaggtgatctcctgcaacgtgtgccagctgcggttcaactctgacagccaggcagaggcccattataaagggtccaaacatgccaaaaaggtgaaggcattagacgcgaccaaaaacaagcctaaaatggtgcctagcaaggattcggctaaagcaaatccttcttgcagcataactccaatcacaggaaacaacagtgataaaagtgaagataagggaaagctcaaagccagctccagctctcagccttctagttctgaatcagggtcctttctgttaaagagcgggactacacctctgccacctggagccgccaccagccctagcaagtccaccaatggagcgccaggcaccgttgttgaatccgaagaggaaaaagcaaagaagctgctgtattgtagcctctgcaaggtcgcggtgaacagtttatcccagctggaggcccacaacacagggtccaagcacaaaactatggtggaggccaggaatggggcgggacccattaagagctaccctcgcccggggtcgcgccttaagatgcagaacggaagcaagggctctgggctgcagaacaagacctttcactgcgaaatatgcgacgttcatgtgaattcagagattcagctcaaacagcacatcagcagcaggcggcataaggacagagttgcaggcaagcctctgaaacctaaatactcaccatacaacaaattacaacgctcacctagtatcctagctgccaagctagcctttcaaaaagacatgatgaaaccactggctccagccttcctctcttcgcctttggccgccgctgcggccgtttcatctgcactgagtctgccaccccgacctagtgcttcccttttccaagcgcccgccatcccccctgccctgctccggcccggacacggccccatccgggctactccagcttctatcctgttcgctccgtattag

SEQ ID NO: 141425 - DNA, 1188 bp, synthetic construct
  misc_feature 1..1188: note = Description of Artificial Sequence: Synthetic coding sequence
  source 1..1188: mol_type = other DNA
atgtggtcaggcctcccttccagaggcagtacgtgccacacaacaacccttccggctctggtcagaacacccacactgatgatgcagcccagccttgatattaagcctttcatgtcgttccccgtcgactcctccagcgcagtgggactgtttcccaacttcaacaccatggatcctgtgcaaaaggccgtaattaaccacacattcggcgtgagcatacctcccaagaagaaacaagtaatctcctgtaacgtatgccagctgcgattcaactcagacagccaggctgaggcccattacaaaggtagcaaacatgccaagaaggtgaaagcactggacgccacgaaaaataaacctaagatggtcccaagtaaagactccgcaaaggctaatccatcttgctccattactcccatcactgggaacaattccgacaagtcagaggacaagggaaagttgaaagcctctagttcctcccaaccttcgagtagtgagtccggatcatttcttctgaagtccggaacaactcctttgcccccaggagccgctacgagcccatccaaatcaaccaacggcgcaccaggcaccgtagtcgagtctgaggaagaaaaggcgaagaagctgttatactgcagcctgtgcaaggtagcagtgaactcactgagccagctggaggctcacaatacagggagcaaacacaagacaatggtcgaagcacggaatggagcagggcctataaaatcgtatccacgaccaggctctagactcaagatgcaaaacggttctaaaggatccggcctgcaaaataagaccttccactgcgagatatgcgacgtgcacgttaactctgaaattcagctcaaacagcacatctctagccggcgtcataaggatagagtggcaggcaaacccttgaaacccaagtatagcccttataacaaactccagcgcagcccgtctattttggcagccaagctggccttccagaaggacatgatgaagcccttggcacccgcctttctgagtagccccctcgcggcggctgccgccgtgagttctgcacttagcctgccgcctagaccctctgcttccctttttcaagccccggctattccccctgccctcctgagaccaggtcacggccctattcgtgccacccccgcatctatcctgttcgcgccatattag

SEQ ID NO: 141426 - DNA, 1110 bp, synthetic construct
  misc_feature 1..1110: note = Description of Artificial Sequence: Synthetic coding sequence
  source 1..1110: mol_type = other DNA
atgatgcagccgagtttggatataaagcctttcatgtcctttcctgttgacagctcaagtgcagtcggcctcttccctaattttaacaccatggaccccgtgcaaaaggccgttattaaccacacgtttggggtttccattccaccgaagaaaaaacaggtgatcagttgtaatgtgtgtcaacttcggttcaatagcgattcccaggcggaggcgcattacaagggatccaagcatgccaagaaggtcaaggccctggacgcaactaaaaacaaaccaaaaatggtgccgtcgaaagactcggccaaggctaatccctcctgcagtatcacccccatcacaggaaataatagtgataagtcagaggacaagggaaagctgaaggcctctagctctagccagcctagtagctctgagtcaggctccttccttctgaagtccggcacaaccccgttgccacctggcgccgccacctctccttctaagtccacaaatggcgcaccaggcactgtcgtagagagtgaagaggaaaaagcgaagaagcttttatactgttctctttgcaaggtggctgtcaactctctttcccagctcgaggctcataataccggcagcaaacacaaaacaatggtcgaggccagaaatggggcaggacccatcaagtcttaccccagaccaggctcgagactgaagatgcagaacggatccaagggctctggcctgcagaataaaactttccactgtgaaatttgcgacgtccatgttaactcggaaattcaactcaagcagcacatatcaagcaggcggcacaaagatagggtggctggcaagccacttaaaccgaaatatagtccttacaacaaactccagcgctcacccagcattctggccgccaagctggctttccagaaggacatgatgaaacccctggccccggcattcttatcaagtccgcttgcagccgcagctgctgtctcttcagcactgtcacttcctcccaggccttccgcctctctgtttcaagcccccgccatccccccagccctcctgcgaccgggacacgggcctattagagctacacccgcctcgattctcttcgcgccctattag

SEQ ID NO: 141427 - DNA, 1416 bp, synthetic construct
  misc_feature 1..1416: note = Description of Artificial Sequence: Synthetic coding sequence
  source 1..1416: mol_type = other DNA
atgaacatggctaacttccttcgaggttttgaagaaaagggcattaaaaatgatcggcctgaggatcaactcagcaaagagaaaaaaaaaatccttttttcattttgcgaggtatgcaatattcaactgaactccgccgcccaggctcaggtccacagcaatggcaagtcccatagaaagcgcgtcaagcaattgagtgacggccagcctccccctcccgcacaagcatcaccttcttctaacagcagcactggatccacctgtcacaccaccacactgcctgcgttagtgcgcactcctaccctaatgatgcagccaagcctggatatcaaaccgtttatgagcttcccagtggactcctcgtccgccgtggggctcttcccaaacttcaacactatggacccagtgcagaaagccgttatcaatcacacctttggcgtgagcatcccacctaagaagaaacaggtcatcagctgcaacgtgtgtcaacttagattcaattctgacagtcaggccgaagctcattacaaggggtctaaacacgcaaagaaggtgaaggccttggacgctaccaagaataagcccaaaatggtcccaagcaaggattccgccaaagcaaatccctcgtgctcaattaccccaattactgggaacaacagcgacaaatcagaagacaaaggcaagctgaaggcctcctcctccagtcagcccagctcatccgagtccggatccttcctcctcaaaagcggtacaacccccctgccaccaggggccgcgacatccccctccaaatctaccaatggtgcaccgggaactgtcgtagaatctgaggaggagaaagccaaaaagctgctctactgctccttatgcaaagtggcagtgaatagtctttctcaactggaggcccataacaccgggagcaaacacaagaccatggtcgaggctcgcaatggggccggccccattaagtcctacccgcgtcccggctctcgactgaaaatgcagaatggatctaaaggttctggactgcaaaacaagacctttcattgtgaaatctgtgatgtccatgtgaactcagagattcagctgaagcaacatatctcgtcccggcgtcataaggacagagtggccggcaagccattgaagcctaagtacagtccctacaataaattgcagagaagccccagtatcttagcggctaaactggcatttcagaaagatatgatgaagcccctcgcccctgcctttctgtcatctcccctcgccgccgcagcggccgtgtctagcgctttgtctcttccgcctaggcccagcgcctccctgtttcaggcacctgctatccctcctgccttgcttaggcccggccacgggcccatcagggcgacgcctgccagcattctcttcgcaccctattag

SEQ ID NO: 141428 - DNA, 96 bp, synthetic construct
  misc_feature 1..96: note = Description of Artificial Sequence: Synthetic coding sequence
  source 1..96: mol_type = other DNA
atgaatatggccaactttctgagagggtttgaagagaaggggatcaaaaatgaccggccagaagatcagctatctaaggagaagaagaagatttag

SEQ ID NO: 141429 - DNA, 417 bp, synthetic construct
  misc_feature 1..417: note = Description of Artificial Sequence: Synthetic coding sequence
  source 1..417: mol_type = other DNA
atgttagggagtacctgtcataccacgaccctccctgcccttgtccggacaccaaccctcatgatgcagccctcactggatatcaagccttttatgagctttcctgtcgattcatcttctgcagtggggctgttccctaattttaataccaaaaggagaggcctgttcgagactaacaagttctgccagatggacccagtgcagaaggccgtgattaatcacaccttcggtgtgagcattcctcccaagaagaaacaggtcattagttgtaatgtctgccagttgaggtttaatagcgatagccaggccgaggcgcactataagggttcaaaacacgccaagaaggtcaaggccttggatgccactaagaataaacctaagatggtgcctagtaaggactcagccaaggcaaactag

SEQ ID NO: 141430 - DNA, 228 bp, synthetic construct
  misc_feature 1..228: note = Description of Artificial Sequence: Synthetic coding sequence
  source 1..228: mol_type = other DNA
atgaacatggcaaactttctacgcggcttcgaggaaaaagggataaaaaacgacaggcctgaagatcagctttcaaaggagaagaaaaagatactgtttagcttctgtgaggtctgtaacattcagttaaacagcgctgcccaggcccaagtgcactcgaatgggaaaagccaccgcaagcgcgtcaagcaactctcagacggacagcccccacccccagctcagtag

SEQ ID NO: 141431 - DNA, 792 bp, synthetic construct
  misc_feature 1..792: note = Description of Artificial Sequence: Synthetic coding sequence
  source 1..792: mol_type = other DNA
atgatgcaaccttccctagacatcaaacctttcatgagtttccccgtggattcatctagtgccgtcgggctgttccctaactttaacaccatggatccggtgcaaaaggctgtcattaaccacacttttggcgtctcaataccgcccaaaaagaaacaggtgattagctgcaatgtgtgtcagctgagattcaattccgattctcaggccgaggcccactataaaggctctaagcatgccaagaaggtgaaagcactggatgccaccaaaaacaaaccaaagatggtaccatccaaggactccgcaaaagccaacccctcttgttctattactccaatcactggtaataacagcgacaaatctgaggataaaggcaaactaaaagcatcctcctccagccaacccagttcatcagagtcgggctcctttcttctgaagagcgggaccacgccgttaccacctggtgcagcaaccagcccttccaagtccacaaatggagctcccggcaccgtcgtcgaaagcgaggaagagaaggccaagaaactgctctattgcagcctctgcaaagtcgccgtcaactccctctcccagctggaggctcacaacacgggctcgaagcacaagacaatggtagaggccaggaacggcgctggccccattaaatcttatcccaggccaggaagcaggctcaagatgcagaatggttcgaagggttctgggctgcagaacaagaccttccattgcgaaatttgtgatgtccacgtgaattccgagatccagttgaagcaatag

SEQ ID NO: 141432 - DNA, 1002 bp, synthetic construct
  misc_feature 1..1002: note = Description of Artificial Sequence: Synthetic coding sequence
  source 1..1002: mol_type = other DNA
atgtcggctaaactcgggaagagtagttcacttctaactcagacgagcgaagagtgtaacggcatattgacggaaaaaatggaagaggaagaacagacatgtgaccctgatagcagcctgcattggtcaagttcatattccccagaaacattcaggcagcagtttcgacaattcggttatcaggactctcctggccctcatgaagctctgtccagactctgggagttatgccatctctggcttaggccggaggtgcacaccaaagaacagattctggagttgcttgtcctggagcagttcctggctatcctacctaaagagctgcaagcctgggttcaaaaacatcaccctgagaatggcgaggaaaccgtgacaatgcttgaggatgttgagcgcgaattggacggcccaaagcagattttcttcggcagaagaaaggatatgattgcggaaaagttagcaccctccgagattaccgaggaactgccatcttcccaactcatgccagtgaagaaacagttgcagggagctagctgggaacttcagtctcttagacctcatgacgaagatatcaagaccaccaacgtaaaatccgcatctcgccagaaaacatctctgggaatcgaactgcactgcaatgtgtctaatattctgcacatgaacggatcacaatcttcgacctacagggggacctacgaacaagacgggcgcttcgaaaagcggcagggtaatccaagctggaaaaagcagcagaaatgcgacgaatgcggaaaaatcttttctcagagcagcgccctgatcctgcaccagcgcatccacagtggaaaaaagccatatgcatgcgatgagtgtgccaaggcattctcccggtccgctattttgatccagcaccggaggacccacactgattctaagtacgaacacgctatcgctgaggcgcaaaaaaacatgtatttcaagacccgcctcaaatgtcccagaagcctgtccggtggtcgatag

SEQ ID NO: 141433 - DNA, 1008 bp, synthetic construct
  misc_feature 1..1008: note = Description of Artificial Sequence: Synthetic coding sequence
  source 1..1008: mol_type = other DNA
atgtctgcaaaactcgggaagtcaagttcactgctcactcaaacttccgaagagtgcaacggaatactgacagaaaaaatggaggaggaggagcagacctgcgatccagatagtagtctgcactggtccagcagttattcaccggagacctttcgtcagcaattccgacagtttgggtatcaagattcaccaggtccacacgaagccctttctcgcctatgggagctgtgccatctctggctccgcccggaagtccatacaaaagagcagatactggaactgcttgtgctggaacagttcctggctatcctccccaaagaattgcaggcatgggtccagaagcatcaccccgagaacggcgaagagacggtgacgatgctggaggatgtggagcgcgagctcgatgggcccaaacaaattttctttgggcgaaggaaggatatgattgcggagaaattggccccctcagaaataactgaggaattgccgtcttcacagctgatgccagtcaaaaagcagttacagggagcaagctgggagctgcagagcttacgcccccacgatgaagatattaagacaacgaacgtcaagtcagcatccagacagaagacaagtctgggtatagagttgcattgtaatgtgagtaacatactgcacatgaacgggtctcaatcctccacgtacagaggcacctatgagcaagatggaaggttcgaaaagcgtcaaggaaatccttcctggaaaaagcagcaaaaatgtgatgagtgtggaaagattttttcccaatcttctgccctcatcttacaccagaggatccactcgggtaagaagccatacgcttgcgacgagtgtgcgaaggccttctctaggtctgccattctgatccagcaccgccgcacgcacaccggagagaagccgtacaagtgccatgattgcgggaaggcttttagtcagagttcaaacctgttcaggcaccgtaagaggcatatcaggaagaaagtgccatag

SEQ ID NO: 141434 - DNA, 828 bp, synthetic construct
  misc_feature 1..828: note = Description of Artificial Sequence: Synthetic coding sequence
  source 1..828: mol_type = other DNA
atggctgtcgaaagcggcgttataagtactctcattccgcaagatccacccgaacaggaattaattttggtgaaggtggaggataatttttcatgggatgagaagttcaaacaaaatggctctacacagtcttgccaagagctgttcaggcagcagttcagaaagttttgttaccaggaaactcctggcccccgggaagccctatcaaggctgcaggaactctgttatcaatggctcatgcccgagttgcatacaaaggagcagatcctcgaactgctcgtcctggagcagttcctgagtatattgcctgaagagctgcaaatctgggtccagcaacacaatccagagtccggagaggaagcagtaaccttgctggaggatctggaaagggagttcgatgatcccggtcaacaggtccctgcatcaccacagggacctgctgtgccttggaaggaccttacttgcctgcgtgcatctcaggagtctacggatattcatctacagccactgaagacacagctgaaatcctggaagccatgcctttcccctaaatctgattgtgagaatagcgagacagccacaaaggaagggatctccgaagagaaatctcaggggctcccacaggagccgtcgttccgaggtatcaagctgtccagaccacctaaggcctcttcggctatacggtgggagtgtgtgtccccggggtcatttccgggggatatcatagccgccgaagccacgcatagtaccatttcttgcttcgccataaatactctgcctgccaccattctgccctcaaaaaacgtcaataggaaatacttctcctag

SEQ ID NO: 141435 - DNA, 1605 bp, synthetic construct
  misc_feature 1..1605: note = Description of Artificial Sequence: Synthetic coding sequence
  source 1..1605: mol_type = other DNA
atggctgtcgagtccggagtcataagcaccctgatcccgcaggacccccccgaacaagagctgatcctggttaaggttgaggataactttagctgggacgagaaatttaagcaaaacggctcgacccagtcttgtcaggagctgttcaggcagcagttccgcaagttctgctaccaggaaacccccggaccacgagaggctctgtcaagactccaagaactgtgctaccagtggctgatgccagaacttcacacaaaagagcagatcttagaactcctggtcctcgagcaatttctcagcatcttgccagaagagcttcaaatttgggtgcaacaacataacccggaatccggagaggaggcggtcactctcttggaagacttagaacgcgagttcgatgatccagggcagcaggtccccgcatcacctcaggggcccgccgtcccctggaaggatcttacttgtctccgggccagccaggagtcaaccgatatccacttgcaaccactcaaaacccagcttaaatcctggaagccttgcctgtctcctaagagcgactgcgaaaactcggagaccgctacaaaagagggcataagtgaggagaaaagccaagggctgccgcaggagcccagtttcagggggatatctgagcacgagagtaacctcgtgtggaaacaaggctccgccacaggggagaagctgaggagcccctcccagggaggaagtttttcacaagtcatttttaccaataaaagtttgggaaagagagacctatatgatgaagccgagcgctgcctcatattgactacagacagcattatgtgccaaaaggtacctccagaggagagaccctatagatgtgatgtctgtggacatagcttcaagcaacactcaagcctgactcaacaccagaggattcataccggggaaaaaccctataagtgtaatcagtgtggcaaggctttctctctccgctcctacctcattatacatcaacgaattcattccggagagaaggcatatgagtgtagcgaatgtggtaaagcgtttaatcaatcttccgccctgatacggcacagaaagattcacaccggtgaaaaggcctgtaaatgcaatgaatgcggcaaagctttttcccaaagttcttatctgataatccatcagcgtatccatacaggcgagaaaccctacgaatgcaatgaatgcggaaaaacgttctcccaaagcagtaagctgatcagacaccagcggattcacaccggtgagagaccttacgaatgcaatgagtgcgggaaggcctttaggcagtcctccgaattaatcacccaccagcgcatccattccggagagaaaccttatgagtgctctgaatgcggcaaagccttctcactgtcctctaatctgatcagacaccagaggattcattcaggcgaagaaccataccagtgcaatgagtgcggtaaaacttttaagcggtcgagtgcacttgtgcagcaccagcggatccacagtggagacgaggcatacatctgtaacgagtgtgggaaagcctttcgacaccgtagcgttctgatgcggcaccagcgggtgcacacaattaagtag

SEQ ID NO: 141436 - DNA, 738 bp, synthetic construct
  misc_feature 1..738: note = Description of Artificial Sequence: Synthetic coding sequence
  source 1..738: mol_type = other DNA
atggccgtggaatctggcgttatttccacgctgatccctcaagatcctccagagcaggagctgatacttgttaaagtggaggataacttttcttgggatgaaaaattcaaacaaaatggaagcacccaaagttgccaagagctctttcggcaacaatttcgtaagttctgctatcaggagactccgggccctagggaagctctctcgcgcctgcaggagctgtgttaccagtggctcatgcccgaactgcatactaaagagcaaatcctcgagctcctggtgctcgaacaatttctgagcatcctgcctgaggagctgcagatctgggtacagcagcataaccccgagtccggggaagaggcagtgacgttgctggaggatctcgagagagagttcgatgatccagggcagcaggtgccagcatctccacagggtcctgcggtgccatggaaggacctcacctgtctcagagcctcacaggaatccaccgatatccacctgcagccactcaaaacccagttaaagtcatggaaaccttgcctgtcacctaaatcagagttatccaggcctcccaaagcatccagtgccatccgctgggagtgtgtgagcccaggctcctttcctggagatatcatagcagccgaggctacccactccaccataagctgcttcgcgatcaataccctccctgctacaatcctcccctctaaaaacgtgaacagaaaatatttttcgtag

SEQ ID NO: 141437 - DNA, 2340 bp, synthetic construct
  misc_feature 1..2340: note = Description of Artificial Sequence: Synthetic coding sequence
  source 1..2340: mol_type = other DNA
atggctgccaatggcgatagtcctccctggagccccgccctcgctgccgaagggagggggtcgtcatgcgaggccagcgtctcctttgaggatgtgacagtggatttctctaaggaggaatggcagcacttggaccccgctcagcgcagactgtactgggacgttactctagaaaattactctcacctcttgtctgtgggctatcagatcccaaaatccgaagcggcatttaaactggagcagggggagggtccctggatgctggaaggcgaagcaccccatcagagctgtagtggcgaggccatcggcaaaatgcagcagcagggcattccaggtggcatattcttccactgtgagcgatttgatcagccaattggagaggactcactttgtagcattttggaggaattgtggcaggacaatgaccaactggaacagcggcaggaaaaccagaataacctactctcgcacgtcaaggtgctcattaaagagcgaggatacgagcataaaaatatagagaaaattattcacgttactaccaagctggtgccttccatcaagcggctgcacaattgtgacacgatcctaaaacacactctcaattcccacaatcataaccggaacagcgcaacgaagaacctggggaaaatattcggcaacgggaacaactttccgcattctccctcgagcacaaagaacgaaaatgcaaagaccggtgcaaattcgtgtgaacacgaccactacgaaaagcacctgagccacaaacaggccccaacccatcaccagaaaatccaccccgaggagaagctctacgtctgtaccgagtgtgtaatgggctttactcaaaagtcgcatctttttgagcaccagcgcatccacgctggtgagaaaagtcgggaatgtgacaaatctaataaagtgttccctcagaaaccccaggtggacgtgcaccccagcgtgtacacaggtgaaaaaccttatctgtgtactcaatgcggcaaggtcttcacgctgaagtctaacctgatcacacatcagaaaattcataccggacagaaaccatacaagtgttcagaatgtggaaaggcattttttcagcgaagtgatctgttccgtcatcttcgcattcacaccggagaaaagccctatgagtgttccgagtgtggcaaaggattctctcaaaacagtgatctctctattcaccaaaagactcacacaggcgagaaacattacgagtgcaacgagtgcggcaaagcgttcacccgaaaatccgctctgcggatgcaccaacggatccatactggggaaaaaccctacgtgtgcgccgactgtggcaaggccttcattcagaagtcgcactttaacactcaccagaggattcacacaggagagaagccgtacgaatgttccgactgcggtaagtcctttacaaagaaaagccagttgcatgtgcaccagaggatccacacgggcgaaaagccatacatttgcaccgagtgtggaaaagtcttcacccaccgtactaacctcacaacccaccagaagacgcataccggcgagaagccttacatgtgcgctgagtgtggaaaagcgtttaccgaccaatccaacctgattaaacaccagaaaacgcataccggagaaaaaccctataagtgcaatggttgtggcaaggcgttcatctggaagagtcggctcaaaattcaccagaagtcccacattggcgaacgccattacgaatgtaaagactgcggaaaagcgttcatccagaagagcacgctaagcgtgcaccagcgaattcatacaggtgaaaaaccatacgtgtgccctgaatgtggcaaagccttcatccaaaaatcacactttatcgcacatcaccggattcacacgggagagaaaccctacgagtgctccgattgtggaaaatgtttcactaagaagtcccagctccgggtgcaccagaaaattcacaccggggagaaaccaaacatatgcgcggaatgcggcaaggcgtttactgacaggtcgaacctaattactcatcagaagattcatacgagggaaaaaccttacgaatgtggcgattgcggaaaaactttcacgtggaaaagcaggttgaatatccaccagaagtcacacaccggcgagcgccattacgagtgctctaaatgcggaaaagccttcatccaaaaggccactctgtccatgcatcagatcatacacaccggcaagaagccgtatgcatgtacagagtgtcagaaagcttttactgaccgctccaacttgataaaacatcaaaagatgcatagcggggagaaaaggtacaaagctagcgactag

SEQ ID NO: 141438 - DNA, 2340 bp, synthetic construct
  misc_feature 1..2340: note = Description of Artificial Sequence: Synthetic coding sequence
  source 1..2340: mol_type = other DNA
atggctgctaatggggactcccccccatggagccccgctctggccgccgaagggcgcggttcctcttgtgaggcctcagtgtctttcgaagacgttactgtagatttctcgaaggaagaatggcagcaccttgacccagcccagcgacgactctactgggatgttaccctggagaattatagccacctcttatctgtgggctaccagattcccaaatcagaggccgccttcaaactcgagcagggtgaggggccctggatgctggaaggcgaagctcctcatcagtcttgcagtggagaagctatcgggaagatgcaacagcagggtatacccgggggaatcttcttccactgcgaaagattcgaccagcccataggggaagactcattgtgttccattctggaggaattgtggcaagacaatgaccagttagagcagaggcaggaaaaccaaaacaatcttctcagtcatgtgaaagtattaatcaaagagcgcggttacgaacataaaaacattgaaaagatcatccacgttacaaccaagctggtgcccagtataaagcggctgcacaattgcgataccatactgaagcacacactcaacagccacaaccacaaccgtaactccgccacgaagaatctgggtaagatctttggcaatgggaataacttcccccactcgcctagttccactaagaacgagaacgctaaaacaggtgccaactcctgcgagcacgatcactacgagaagcatctctcccacaagcaggctccaacacatcaccaaaagatccatcctgaagagaaactctatgtatgcaccgagtgcgtgatgggattcacccagaaatctcatctgtttgaacatcaaagaatccacgcgggagagaagtccagagagtgcgataagagcaacaaggtctttcctcagaagccacaggttgatgttcacccatccgtatatactggagagaaaccttacctttgtacacagtgtggaaaggtttttacgctgaagagcaacctcatcacccaccagaagatacacactggacagaagccctacaaatgcagtgagtgcgggaaggccttcttccagagaagcgacctctttagacatctgcgcatacataccggagaaaagccatacgaatgctcagagtgcggcaaggggtttagccagaatagcgacctgtccattcaccagaagacccacactggggagaaacactatgaatgcaacgagtgcggtaaggcattcactcggaaaagtgccctaaggatgcatcagagaatacatactggggagaaaccctatgtctgcgctgattgtggcaaggcattcattcaaaagtcccacttcaatactcatcagcgtatccacaccggagaaaaaccctatgagtgtagtgactgcgggaagagctttactaagaaaagccagctacatgtgcaccagagaatccatacaggcgaaaaaccctatatctgcaccgagtgtgggaaggtgttcacacacagaaccaacctgacgactcatcagaaaacacataccggggaaaaaccctatatgtgtgctgagtgtggtaaggcctttacagaccaatccaacctgataaagcatcagaaaactcacacaggagagaagccctataagtgcaatggctgcgggaaggccttcatctggaaatcacggctcaaaatccaccagaagtcccatataggggagcgccactacgagtgcaaggattgcggcaaggcattcatccagaagtccacactttctgtccaccagaggatacataccggagaaaaaccttatgtgtgtccggagtgtggaaaagcttttattcagaaatcacacttcattgcccatcaccgcatccacaccggtgagaaaccatatgagtgcagcgattgcgggaaatgcttcacgaaaaagtcacagctgagggtccaccaaaagattcacactggagagaaacccaatatttgcgccgaatgcggcaaggcgtttacggataggtcgaacctcatcactcaccagaaaatccacaccagagagaaaccctacgagtgcggcgattgcggaaagacatttacttggaagtctagattaaacatccatcaaaaatcgcacaccggggagagacattatgagtgctctaagtgtgggaaagcattcatacagaaagcaacactctctatgcatcagattattcacaccggaaagaaaccatacgcttgtacggagtgccagaaggccttcacggacagaagcaacttgatcaaacaccagaaaatgcattcaggcgaaaagagatataaagccagcgactag

SEQ ID NO: 141439 - DNA, 2370 bp, synthetic construct
  misc_feature 1..2370: note = Description of Artificial Sequence: Synthetic coding sequence
  source 1..2370: mol_type = other DNA
atgggaactttgcctcacgggccgcgcccgtggctgcagcgggatgtggccgctcacgtgtctgcagatcatgctgccctgaattctatcgtgtctcttcaggcaagcgtgtcgttcgaggatgtaaccgtggatttttcaaaggaggagtggcagcacctggacccggctcagcgacgtctgtattgggatgtaactctggagaactactcacatctgctgagtgttggctaccaaattccaaagtcagaggccgcatttaagttagagcagggagaggggccatggatgctggagggcgaagctccccatcagagctgcagcggtgaagctatcgggaaaatgcagcaacaagggataccaggcgggattttcttccactgcgagaggttcgatcagccaatcggggaagactctctgtgttccatcttagaagaactgtggcaggacaatgatcagctcgagcaaaggcaggaaaatcagaacaatctgctatctcacgtgaaggtcctcataaaggagagaggttacgaacacaagaatattgaaaagataattcatgtaacaacaaagctcgtgccgtcaataaagcgcctccacaattgcgatacaatcctcaagcacacattgaactcccataaccacaatcgcaatagcgccactaaaaacttaggtaagatattcggcaatggcaacaactttcctcattcgccgtctagcacaaaaaacgaaaatgctaaaaccggagctaactcatgtgaacatgaccattacgaaaagcacctgtctcacaaacaagcccccacccaccatcaaaaaattcaccctgaggagaagctgtatgtgtgtaccgaatgcgtgatggggtttacacaaaaaagccacctgtttgagcaccaacggatccatgccggagaaaagagcagagagtgtgacaaatcaaacaaagtctttccccagaaaccacaggtagacgtccaccccagcgtctacaccggtgagaaaccctacctttgcacgcagtgtggcaaagtcttcacgctaaaaagtaacctgattacacaccaaaagattcacaccggccagaaaccatataagtgctccgagtgtggtaaggctttcttccagagaagcgaccttttccgccaccttcgcattcacaccggggaaaagccgtatgaatgtagtgagtgcggaaagggatttagtcagaactcagaccttagcattcaccagaaaacccacaccggggagaaacactacgagtgcaatgaatgtggcaaggcttttactcgcaagtcagcactgaggatgcatcagaggatccatacaggcgagaaaccttatgtgtgcgccgactgcggtaaggctttcatccagaagtcacacttcaatacccaccagagaatccacactggggagaaaccatatgagtgtagcgattgcgggaagtcctttaccaagaagtcccagcttcacgttcaccagaggattcacactggcgaaaagccatacatctgtactgagtgcggtaaggtgttcactcaccgcacaaacctgacaactcatcagaaaacacacacaggcgagaaaccatatatgtgtgctgaatgtgggaaggcctttacggaccagtctaacctgataaaacatcagaaaacgcacacaggtgaaaaaccttacaaatgcaacggttgtgggaaggctttcatttggaagagtcggcttaaaattcatcagaagtcccacattggggagagacactatgaatgcaaggattgcggcaaagccttcatccagaagagtactttatcagtacatcagcgcatccatacgggcgaaaagccctacgtttgcccagagtgtggaaaggcatttatccagaagtcacatttcattgcacaccacagaatccacactggcgagaagccctacgagtgctccgactgtggtaagtgcttcacaaagaaaagccagctgcgggtacaccagaaaatccacactggcgagaaaccaaatatttgtgccgagtgtggaaaggcctttaccgaccgctcgaatctcattacccatcagaaaatccatactcgcgagaaaccatacgagtgtggtgactgtggtaaaacatttacctggaagtctcgacttaatatccaccagaagtctcatacgggagaacgccattacgagtgctccaagtgtgggaaggcttttattcagaaggccaccctgtccatgcaccagataatacacaccgggaagaaaccatatgcatgcacagagtgtcaaaaagcgttcacagacaggtcaaacctcatcaagcaccagaagatgcattcaggcgagaagcggtataaagcatcagactag

SEQ ID NO: 141440 - DNA, 537 bp, synthetic construct
  misc_feature 1..537: note = Description of Artificial Sequence: Synthetic coding sequence
  source 1..537: mol_type = other DNA
atgggtactcttccacatggtccacggccttggcttcagcgggatgtcgctgcgcacgtttcagctgatcacgcagccctaaatagtattgtttcgctgcaggctagcgtaagctttgaagatgtaacagtggactttagtaaagaggagtggcagcacctggaccctgcacagaggaggctctattgggatgtcacgctggagaattactctcacctcctcagcgtgggataccagattccaaagtccgaggccgcatttaaattggaacagggagagggcccctggatgctcgaaggcgaggctccgcaccagtcttgtagtggcgaggccattggcaagatgcagcagcagggtattcccgggggcattttctttcactgcgagagattcgaccaaccgattggagaggatagcttgtgctctatcctagaggagctttggcaggataacgaccagctggagcagagacaggagaaccagaacaacttgctctcacacgtaaaggtgctgatcaaggagcgggggtacgagtag

SEQ ID NO: 141441 - DNA, 3855 bp, synthetic construct
  misc_feature 1..3855: note = Description of Artificial Sequence: Synthetic coding sequence
  source 1..3855: mol_type = other DNA
atgcacaagaagcgggtggaagaaggcgaggcatcggacttctcactggcctgggatagtagcgtgactgccgccgggggtctggaaggtgaacctgagtgtgatcagaaaacatccagggcccttgaagacaggaattctgttactagccaagaagaacggaacgaggacgatgaggacatggaagacgagtccatctatacatgcgaccactgccagcaggattttgagagtctcgccgacttaacagatcacagggcccaccggtgtcctggtgatggcgatgatgatccccagctgtcttgggtggcaagttccccatcaagcaaggacgtcgcttccccaacacagatgataggtgacggatgtgatctgggtctaggcgaggaggagggtggcaccgggcttccttatccctgccagttttgtgacaagagtttcatccggctatcatacctgaagcgccacgaacagattcattccgataagctaccgtttaagtgtacttattgctcacgactgttcaagcataagagaagccgtgaccgtcacatcaagcttcatacaggagacaagaaatatcattgccatgaatgcgaagcagcttttagccgctctgatcatttaaagatccacttaaagacccactctagctctaagccattcaaatgtaccgtgtgtaaacgcggattctcctccacttcctccctgcagagccatatgcaggctcacaaaaagaacaaagagcacctcgctaagtcagagaaggaagcaaagaaagatgactttatgtgcgactattgtgaagatacattctctcagaccgaagaactcgagaaacacgtcctgacaagacacccgcaactcagcgagaaggcagatctgcagtgcattcactgccctgaggtttttgtggatgagaatacgttactggctcatattcatcaagcacacgctaatcagaaacacaagtgccctatgtgtcccgaacagttctcttccgtggagggggtttactgccacctcgactctcatcgacaaccagacagcagcaaccatagcgtcagtcccgaccccgttctgggcagcgtggcgtctatgagcagtgcaacacccgattcaagtgccagcgtggagagaggctccacccccgattcaaccctgaagcccttgcgagggcagaagaaaatgcgcgatgacggccagggctggaccaaggtggtgtacagttgtccctattgttccaaaagggattttaattcccttgcagtgttggaaatccaccttaagactatccatgcagacaaaccacagcagagtcatacctgccagatctgcctggacagtatgccgaccctgtataatctgaatgagcatgtgaggaaattgcacaaaaaccacgcataccctgtgatgcagttcggaaacatttccgcttttcattgcaattattgtcccgaaatgttcgctgatattaactcactccaggagcatatcagagtctcacactgtggaccgaacgcaaacccctcagacggtaacaatgcattcttctgtaatcaatgctctatgggcttcttgactgagtctagcttgactgagcatatccagcaggctcactgctctgtaggctcagctaagctcgaatcccccgtggttcagcccactcagagttttatggaggtctactcgtgcccatactgtactaactcccccatattcggatctatcttgaagttaaccaagcatatcaaggagaatcataaaaatatccccctggcccacagtaagaaatcgaaggccgaacagtccccagtgtcctccgacgttgaagttagctcacctaaacggcagcggctcagcgcatccgcaaactccataagcaacggtgagtatccctgcaaccaatgcgacctaaaattctctaattttgagtcattccagacacacttaaaactccatctggagctgttgctccgaaagcaagcatgtccacagtgcaaggaagacttcgatagtcaggagagcttgctgcagcatttgacggtccattatatgaccacatcgacacactacgtctgtgaaagttgcgacaaacaattcagtagcgttgatgatctgcagaagcacttgttggacatgcacaccttcgtcctttatcattgcacactgtgccaggaagtttttgatagcaaggtgtccattcaggtacacctggccgtgaaacacagcaatgaaaaaaagatgtatcggtgtaccgcctgcaattgggatttccgtaaggaggccgacttgcaggtgcacgtaaagcacagccacttgggaaatccagctaaagcacataagtgcattttttgcggggagacctttagcacagaggtggagctgcagtgccacatcacgactcacagcaagaagtataactgcaaattctgcagcaaggccttccacgcgataattcttctggagaaacatttacgggaaaagcactgtgtattcgacgccgccactgaaaatggaaccgcgaacggtgtgcccccgatggcgacgaaaaaggccgaacctgctgatctgcagggcatgctgctgaagaatcctgaagcacctaactctcatgaggcttcagaggacgatgtggatgcctcggagcccatgtatggttgtgacatctgcggagctgcctacacaatggaggttttgctccagaaccatcgacttagagaccataacattaggccgggggaagacgatgggtcccgtaaaaaagccgagttcataaaaggcagtcataaatgtaacgtgtgtagcagaactttcttttccgaaaacggattgagagagcaccttcaaacacatcgcggacctgcgaagcactacatgtgcccaatttgtggtgagcgttttccaagtttattgacattgacggaacacaaagtcacccattcaaaatctctggacacaggaacctgcaggatttgcaagatgccactccaatccgaagaagagttcattgagcattgtcagatgcaccccgatctgcggaattccctcaccggcttccggtgtgttgtttgtatgcagaccgtcacctccacactagagctcaagatacacggtacgttccatatgcagaagctggcaggatcttctgctgcctcatcccctaatggccaggggcttcaaaaactctacaaatgtgcactttgcttgaaggagttcagatctaagcaggacctggttaagttggacgtgaacggactgccctacggcctgtgtgccgggtgcatggcccggagcgcaaacgggcaggtcggaggtctggcgcccccagagcccgccgacagaccatgtgccggcctcagatgcccagaatgtagcgttaagtttgagtctgccgaggacctcgagagccacatgcaggtggaccacagagatttgacccctgaaacatcaggccctcggaaaggcactcagacctcacctgtaccgaggaagaaaacctaccaatgcattaagtgtcagatgaccttcgagaatgaaagggaaattcagatacacgtggctaaccacatgatcgaggagggtatcaaccacgaatgtaaactgtgtaaccaaatgttcgattcaccggctaaactcctctgtcacttaatagagcattccttcgaaggcatggggggcacattcaaatgtcctgtctgttttacagtgtttgtgcaggctaataaattacagcagcacatatttgcggtgcacggccaagaggacaaaatttatgattgcagccaatgtcctcagaagttttttttccagacggagttacaaaaccacactatgtcacagcacgcccagtag

SEQ ID NO: 141442 - DNA, 3504 bp, synthetic construct
  misc_feature 1..3504: note = Description of Artificial Sequence: Synthetic coding sequence
  source 1..3504: mol_type = other DNA
atgatcggtgatgggtgtgacctcggtcttggcgaggaggaagggggtactggactgccctatccttgccagttctgcgataagtcctttatccggctgtcgtacctaaagcggcacgaacagatacacagcgataagctgccttttaaatgtacttactgttcaaggctgttcaagcataaacggtccagggaccgccatataaaacttcatactggcgataaaaagtaccattgccacgaatgtgaagccgccttttctcggagcgaccatctgaaaatacacctgaaaacccatagcagctctaagcccttcaagtgcaccgtttgtaaacggggcttctcttctacctccagtctgcaaagccatatgcaggcccataaaaagaataaagagcacctggccaaaagcgaaaaagaagcgaagaaggatgactttatgtgcgattattgcgaagacacatttagccagactgaggagttggaaaaacacgtcctgactcgccaccctcagctttcagaaaaagccgacttgcagtgcatccattgcccagaagtgttcgtggacgaaaacactttgcttgcccacattcaccaggcgcatgcaaaccagaagcacaaatgccctatgtgtcccgagcaattctcaagcgttgagggcgtgtattgccacctggactcacaccgtcagcccgattctagcaaccactcagtgtcccccgatcctgtgctgggcagtgtcgcctcaatgtcatccgccactccagattcaagcgctagcgttgagcggggctcaacgccagactcaaccctgaaaccattgagagggcagaagaagatgcgggatgatggccagggctggacgaaagtcgtctattcttgtccttattgcagcaaaagagatttcaattccttggctgtgctcgaaattcatctcaagacaattcatgcagataagcctcagcagtcgcacacttgccagatttgcctggatagcatgcccacactgtacaatctgaatgaacacgtaagaaagctccataagaaccatgcatatccagtgatgcaatttgggaacatttccgcttttcattgtaactactgtcccgagatgttcgcagacataaacagtctgcaggaacatatcagagtgtctcattgcggccctaacgcaaatcctagcgatgggaacaacgcattcttctgtaaccagtgtagtatgggtttcctgacagaaagcagtttgaccgaacatattcagcaggcgcattgtagtgtgggatctgccaagttggagtcacccgtcgtccagccgacacagtcttttatggaggtctactcttgtccatactgtacaaattctcctatctttggatccattctcaagctgaccaaacatatcaaagagaatcacaagaatatccctctcgctcactcaaaaaaatcgaaagccgagcagtcaccagtgtctagcgatgttgaggtaagctctcccaagaggcagcgcttgtctgcgtccgctaattctattagtaatggagaatacccgtgtaaccagtgcgacttgaagtttagcaactttgaatcctttcagacccacctgaagctacacctggaattgctgttgagaaagcaagcatgtcctcagtgcaaggaggatttcgactcacaggagtccttgctgcaacacctgacagttcactacatgacaacttctacgcactatgtgtgcgagtcgtgtgacaagcagttctcatccgtcgatgacctacaaaaacacctcctcgacatgcacacattcgtgctctatcactgcacactttgtcaggaggtatttgactctaaggtgtctatccaggtgcatcttgcagtcaaacatagcaacgagaaaaagatgtatcgatgcaccgcgtgtaattgggactttcgtaaggaggctgatctccaggtgcacgttaagcatagccacctgggcaatccggctaaggcccataaatgtattttctgtggggaaaccttttctactgaagtggagctacagtgtcatatcactacccactcaaagaagtacaactgtaagttctgttcaaaagcgttccatgctatcatcctgctcgagaagcacctcagggagaaacactgtgtattcgacgcagcgacagagaatgggactgccaacggtgtacctccaatggcaacgaagaaggccgagccagcagatctgcaggggatgttgctgaaaaaccctgaagcccccaactctcacgaggcaagcgaagacgacgtcgacgctagcgaacccatgtacggctgtgatatctgcggcgcggcatacactatggaggttcttttacaaaatcaccgtcttcgtgaccataatattcggcctggggaggatgacggaagcaggaaaaaagcggagttcatcaaggggtcacacaaatgcaatgtgtgttcacgcacattcttttcagaaaacggtcttcgtgaacacctgcaaacccaccgtggacccgccaagcattacatgtgtcctatatgcggggagcgttttccatccctacttacactcaccgaacacaaagtcactcactccaaatcactggatacaggcacatgccgtatttgcaagatgcccctccagagtgaggaagagtttatagaacattgtcagatgcatcccgatctccgcaactcactaactgggttcagatgtgtggtgtgtatgcagactgtgaccagcacccttgagctaaaaatccacggcacgttccatatgcaaaaactggcagggtccagcgctgcgtcgtcacccaatggacaaggattgcaaaaactatacaagtgcgccctgtgcttgaaggaattccgcagtaaacaggatttggtcaaactagacgtgaatggcctaccgtatgggctgtgcgctggttgcatggctaggtcagctaatggccaggtcggcggacttgctccacccgagccggcagaccgaccctgtgccggactgagatgcccagagtgttccgtcaagtttgagagtgctgaggacctcgagagccacatgcaggtagaccaccgcgatttgacccccgaaacttccggtccacgaaaagggacccagacaagcccagtaccccggaagaagacataccagtgcattaaatgccagatgacctttgagaatgagcgcgaaattcagatccacgttgcgaaccacatgatcgaagagggtataaaccacgaatgtaaactgtgtaatcagatgttcgacagccccgcaaaattgctgtgccatctgatcgaacactccttcgaaggcatgggaggaacgtttaaatgtccggtttgctttaccgtgtttgtacaggccaacaaacttcagcaacacatctttgccgtgcacggtcaagaagataaaatctatgactgttcccagtgcccacagaagttttttttccaaactgagctccagaaccataccatgagccagcacgcacaatag

SEQ ID NO: 141443 - DNA, 3855 bp, synthetic construct
  misc_feature 1..3855: note = Description of Artificial Sequence: Synthetic coding sequence
  source 1..3855: mol_type = other DNA
atgcacaaaaaacgggtggaagagggcgaagcttcagacttcagcctggcctgggattccagcgtgacggcagccgggggcttagagggggagcctgagtgtgatcaaaagacctcccgggccctggaggatcggaactctgtcacctcccaggaagagagaaatgaagatgacgaagacatggaggatgagtccatttacacatgtgatcattgccagcaagactttgaatcccttgcggacctgactgatcatcgcgcccacaggtgtccgggtgatggtgatgacgaccctcagctgtcttgggtggcttcttccccttcgagcaaagacgtggcctcgccgactcagatgataggggacggatgtgacctgggcctcggggaggaagaaggtgggaccggtctgccttacccttgccagttctgcgataaatctttcatcagactgagctatttgaaaagacacgagcagattcacagtgacaaactgcccttcaagtgcacttactgctcacggctctttaagcataagcgtagtcgtgacagacacatcaagcttcacacaggagataaaaagtatcattgtcatgagtgtgaggccgctttttctcgcagcgaccatctgaagatccacctcaaaacacacagtagttccaagccctttaaatgcactgtttgtaaaaggggcttctcctcaaccagcagccttcaatcacacatgcaggcccacaaaaagaataaggaacacctggccaagtcagagaaagaagcaaaaaaagacgacttcatgtgtgactattgtgaagacacattttcgcaaaccgaagagctggaaaagcacgtgctcaccaggcatcctcagctgagcgaaaaagccgatctgcaatgtattcattgccctgaggtgttcgtggacgagaacaccctgttggcccatattcaccaggctcacgccaatcagaaacacaagtgtcccatgtgtcctgagcaatttagttccgtagagggagtctattgtcaccttgacagccacagacagcccgactcatccaaccactctgtaagccctgatcccgtgcttgggagtgtagcctcaatgtcctccgccacgcctgatagctccgcgtcagtcgaacgtggttcaacacccgactccactctgaagccactccgtggtcagaagaagatgcgcgacgacggacagggttggactaaagttgtctactcatgcccttattgtagcaagcgtgattttaattcactcgccgtgctggagattcacctgaagaccattcatgccgataaaccacagcaaagccatacctgccagatctgccttgactcaatgcccacactgtacaacctgaacgagcacgtgagaaagctgcacaagaatcacgcatatcctgtaatgcagtttgggaacatttctgcgttccattgcaactattgtccagagatgtttgcagacatcaactccctgcaagaacacatacgcgtatcacattgcgggccgaacgccaaccccagtgacggcaataatgccttcttctgtaaccagtgcagcatggggttcctgactgaaagtagcctgactgagcacattcaacaggcacactgctcagttggctcagccaagctggagagccccgttgtgcaacctacccagtcctttatggaggtctatagctgcccttactgcacgaatagcccaattttcggcagcattctgaagctgacaaaacacatcaaagaaaatcacaaaaatatccccttggcccactcgaaaaaatccaaggccgagcaatcccccgtctcatcagacgtggaagtatctagtccgaagagacagcgactgtctgccagtgcaaactcaatttccaatggcgagtatccctgcaaccagtgcgacctcaaattttccaacttcgaaagcttccagacccatctcaagttacacctggaactcttgttacgcaaacaggcttgcccccagtgcaaggaagactttgactctcaagagtctctgcttcaacacctaacagttcactacatgactacttccacacattatgtgtgtgagtcatgtgataaacagttttcaagcgtcgatgacttacaaaagcacctgttggatatgcatacattcgtgctttaccattgtacgctatgccaggaggtattcgacagtaaagtcagcattcaggtgcacctggccgtaaagcacagcaatgagaaaaagatgtatcggtgcacagcctgtaattgggactttcgcaaagaagccgatctgcaggtacacgtgaagcattcccatttgggcaatcctgccaaggcacacaagtgcattttctgcggcgagaccttctcaacagaagtggagctccagtgccacatcacaacacatagtaaaaagtacaattgtaaattttgttcaaaggccttccacgctatcatcctgctcgagaaacatctcagagaaaagcactgcgtgtttgacgccgcgactgaaaacggaactgctaatggggtacctccaatggcaacaaagaaggctgagcccgctgacttacagggcatgttgctgaagaatcccgaggcccctaattcccatgaagcttcagaggacgacgtggacgctagcgagccaatgtatgggtgtgatatttgcggtgccgcttacactatggaggtgctgctacagaatcacagactgcgggaccacaatatccgccccggggaggatgacggcagccgtaagaaggccgaattcattaaagggtcccataagtgcaatgtgtgcagtcggaccttcttcagtgaaaatggtttgcgggagcatctccaaacacacaggggccccgcgaagcactacatgtgcccaatctgtggggaacggttccccagtctgcttaccctgactgagcacaaggtaactcacagtaagtctcttgataccggcacctgccgaatctgcaagatgcccctgcaatccgaggaggagttcattgagcattgtcagatgcatcctgaccttaggaatagtctgaccggcttccggtgcgtggtctgcatgcagaccgtgacaagtactctggagctgaaaatccatggcaccttccatatgcagaagctggctggctcatccgcagcctcatcccccaatggacagggacttcaaaaactatacaagtgtgcgctttgtctaaaggaattcagaagcaagcaagacttggtcaagctggacgtcaatgggctcccctatgggctatgcgctggatgcatggctagatctgcaaacgggcaggttggggggttagcacctcccgagcccgccgaccgtccttgcgcaggccttcggtgtccagagtgttcggtgaaattcgagtccgcggaagatctggaatctcatatgcaggtcgaccatcgggatcttacaccagagactagcggtccccgcaaaggtacgcagacatctcccgtgccccgtaaaaagacctatcagtgtatcaaatgccagatgactttcgaaaatgaaagggaaatccagatccacgtggccaatcacatgatcgaggagggaattaaccacgaatgcaagctgtgcaaccagatgttcgactcacccgcaaagctgctatgccacctgattgagcactcctttgagggaatgggtggaactttcaagtgtcccgtctgttttaccgtgtttgtgcaggccaacaaactgcagcaacacattttcgcagtgcacggacaggaggacaagatttatgactgctcgcaatgtcctcagaaattcttctttcagactgagctccaaaatcatacgatgtctcagcacgcccaatag

SEQ ID NO: 141444 - DNA, 2430 bp, synthetic construct
  misc_feature 1..2430: note = Description of Artificial Sequence: Synthetic coding sequence
  source 1..2430: mol_type = other DNA
atgggtccccttacctttatggatgtggccatagaattttgcctcgaagagtggcagtgtctcgacatagctcagcagaacctgtaccgtaacgtgatgttggagaactaccgtaatctcgtgttcctgggcattgcggtgtccaaacctgacttgattacatgcctcgaacaggagaaggagccatgggaaccaatgcgccggcacgaaatggtcgccaaaccacctgtaatgtgcagccacttcacccaagacttctggcccgagcaacacatcaaagacccttttcagaaggccactcttagaagatacaagaattgtgagcataagaacgtgcacctgaaaaaggatcataaatctgtagacgagtgcaaagttcaccgaggcggctataatggctttaaccaatgcctccccgccacccaaagcaagatttttctgttcgacaagtgtgtgaaagcctttcacaagttcagcaactctaatcggcacaaaattagccatacagagaagaagctttttaagtgcaaggaatgcgggaagtccttttgtatgctcccacatctggcacagcataaaatcatccacactagggtgaacttctgcaagtgcgagaagtgtggcaaggccttcaactgtccttcgatcataacaaagcacaaaagaattaatactggcgaaaagccttacacttgtgaagagtgtggcaaggtgtttaactggagttctagactgacaacgcacaagaagaattacacccggtataagctatacaagtgtgaagaatgtggtaaagcgtttaataaatcctctattctaacaacgcataagataataagaacaggggaaaaattttataaatgtaaggagtgcgcgaaggcgtttaatcagagctctaacctaacagagcataagaagattcacccaggggagaaaccgtacaaatgcgaagagtgtgggaaggcctttaattggcctagcactttgaccaaacacaagcgcattcacacaggcgaaaagccttacacctgcgaggaatgcggaaaagccttcaaccagttctctaatctgactacccacaaaagaatccataccgccgagaagttttacaaatgcactgagtgcggcgaggctttttccaggtcatcaaacctaactaagcacaaaaagatacataccgagaagaaaccttacaagtgtgaggagtgcggcaaagcatttaagtggtcgtccaagctcaccgaacacaaattaacacataccggcgagaagccatacaagtgcgaggaatgcgggaaagcctttaattggccctcgaccttgactaagcacaaccggattcacaccggggagaagccatataaatgcgaggtctgcggaaaagcgtttaaccagttctccaatctaaccactcacaaacggattcatactgcagagaaaccttataaatgcgaagaatgtggaaaagcattttcccggtcctccaacctcacaaagcacaagaagatccacatcgagaagaagccttacaaatgcgaggagtgtgggaaggcattcaagtggtcctccaaactgaccgagcataagatcacccacactggagagaaaccatataagtgcgaagaatgcggcaaagcctttaatcatttcagcattctgacaaaacataagcgcatacacacaggggaaaagccttataagtgtgaggaatgcgggaaggcattcacccaatcaagcaatctgaccactcacaagaaaatacacaccggcgagaagttttacaaatgcgaagaatgtggaaaggcattcacacagtccagcaatctgactacacataagaaaatccataccggaggcaagccctacaagtgtgaggagtgtggcaaagccttcaatcagtttagcacactaaccaagcacaagattatacataccgaagaaaagccttacaagtgcgaagagtgcgggaaggcctttaaatggtcctccacccttaccaagcacaaaatcatacataccggtgagaagccctacaagtgcgaggaatgtggcaaagcctttaagctgtcctccacactgagcacgcacaagatcatacacacaggagagaagccatacaagtgtgagaaatgtggcaaggcattcaatcgctcttccaaccttatcgaacataagaagattcacacaggtgaacagccctataagtgcgaggagtgtggcaaggcatttaactattctagtcacctgaacacccataaaagaatacacacgaaggaacagccttataaatgtaaagagtgtggaaaggctttcaaccagtactctaatcttacaacccacaataaaattcataccggcgagaaattgtacaagccagaagacgtaactgttattctgaccactccccagaccttcagtaatataaagtag

SEQ ID NO: 141445 - DNA, 2427 bp, synthetic construct
  misc_feature 1..2427: note = Description of Artificial Sequence: Synthetic coding sequence
  source 1..2427: mol_type = other DNA
ggcccgctgacctttatggatgtggcaatcgaattttgcctggaggagtggcaatgtcttgatattgcccagcagaacctgtataggaacgtgatgctcgaaaactacaggaacctggtattcctcgggatcgccgtgtctaagccagacctgattacctgtttggagcaggaaaaggagccatgggagcccatgcggcgacatgagatggttgctaagcccccggtcatgtgttcccatttcacgcaggacttctggcctgaacagcacattaaggatccatttcagaaggccaccttgaggaggtacaaaaactgcgaacacaaaaacgtacatctgaagaaggatcacaagtcagtcgatgagtgtaaagtccatcggggcggctataatggcttcaatcagtgcctccctgctactcaatctaaaatttttctgttcgacaaatgtgtgaaagcctttcataagttcagcaacagcaatcggcataagatcagccacaccgaaaaaaaactgtttaagtgtaaagagtgcgggaaatcattctgcatgctcccacacctcgcccagcacaaaattattcacacgcgagtaaatttctgcaaatgtgaaaagtgcgggaaagccttcaactgccctagtatcataactaaacataagcgtataaatactggcgaaaaaccctacacgtgtgaggagtgcggaaaggtctttaactggtcatctagactgaccactcacaaaaagaattatacacgctataagctctacaagtgtgaggagtgtggcaaggcatttaataaaagtagtatcttgaccacgcataagatcatcagaaccggagagaaattttacaagtgcaaagagtgcgctaaagcgtttaaccagtcgtccaatttgacagagcacaagaagatccatcccggagagaaaccttacaaatgtgaagaatgcggtaaagcattcaactggcccagtacactaacaaagcataagcggatccatactggggagaagccctacacgtgtgaggagtgtggcaaggcattcaaccagttctctaatctgacgacccataagcggatccacacggccgagaaattctataagtgtaccgagtgcggcgaggccttcagccgctccagcaatctgacaaagcataagaagatccacactgagaagaagccatacaagtgcgaggagtgcggcaaggccttcaagtggagttcaaaactgaccgaacacaagctgactcatactggagagaaaccctataagtgtgaggagtgtggtaaagctttcaattggccttccactctgaccaagcataatcgcatccacacaggagagaagccttacaaatgcgaagtgtgcgggaaggctttcaatcagttcagtaatcttaccacacataagcgcatacacactgctgaaaaaccctacaagtgcgaggagtgtgggaaggctttttccaggagttccaacctgaccaaacataagaagatccacatcgagaagaagccctacaagtgcgaggagtgtggaaaggccttcaagtggtccagcaagctgactgagcacaaaatcacacacaccggtgagaaaccatacaagtgcgaagaatgcggaaaggcttttaaccatttttcaatactcacaaaacacaagcggattcacaccggggaaaagccttataagtgcgaagagtgcggaaaagcatttacacagagttcgaacttgacaacccataaaaagatccacacaggtgagaaattttataagtgcgaggaatgtggtaaggcttttacccagagttcaaatttaacaactcataaaaagatacacacaggtggaaagccctataaatgtgaggagtgcgggaaagcattcaatcaattcagcacattgactaagcacaaaattattcacaccgaagaaaaaccctacaagtgtgaggagtgtggaaaggcctttaaatggtccagcaccctgactaagcacaaaatcattcacaccggtgaaaagccttataaatgcgaggagtgcggaaaagcatttaaactatctagcaccttatccacgcacaagatcatccacaccggggaaaagccttacaagtgtgaaaaatgcggaaaagcatttaatcgcagttctaacctgatcgagcacaaaaagatacataccggtgagcaaccttacaaatgcgaggagtgtggaaaagcatttaattattcaagtcacttaaatacacataaaaggatacataccaaagaacagccttacaaatgcaaggaatgcggtaaagcattcaaccagtacagtaacctgacgactcataataagattcacaccggtgagaaattgtataagcctgaagacgtgacggtgatcctgaccaccccccagaccttcagtaatattaaatag

SEQ ID NO: 141446 - DNA, 2412 bp, synthetic construct
  misc_feature 1..2412: note = Description of Artificial Sequence: Synthetic coding sequence
  source 1..2412: mol_type = other DNA
atggatgtggccatcgagttctgcctggaggagtggcagtgtctggatatagctcaacagaacctttataggaacgtcatgttggaaaactaccggaacctggtgtttctcggcatagccgtgtcaaaaccggatctcatcacctgccttgaacaggagaaagagccatgggagccgatgcggagacacgaaatggtggccaagccccccgtaatgtgcagtcactttacccaagatttctggcctgagcagcatatcaaggatccatttcagaaagcaactttaaggcgttacaagaactgtgagcataagaacgttcacctgaagaaagaccataagagcgtcgatgaatgtaaagttcatcggggaggatataacggcttcaaccagtgtctgcctgccacccagagtaaaatctttttgttcgataagtgcgtgaaagccttccataagttctcaaatagtaataggcacaagatatctcatacggaaaagaaactgttcaagtgcaaagagtgtggcaaatcattttgcatgctgccccacctggcccagcataaaatcatccataccagagtcaatttctgtaaatgtgagaaatgcgggaaagcgtttaattgcccaagtatcatcacaaagcacaaacggatcaacactggagagaagccgtacacgtgtgaagagtgcggtaaggtttttaactggtccagccgcctaaccacgcacaaaaaaaactacactcggtataagctgtacaagtgtgaggaatgcggcaaggccttcaacaagagctccattctcaccacacataagatcatcagaaccggcgagaagttctataaatgcaaagagtgcgccaaagccttcaaccagagctccaatcttactgagcacaagaagatccatcctggggagaagccctacaagtgcgaggaatgcgggaaggctttcaattggccttcaacacttactaagcacaaaagaatacacacaggggaaaagccctacacatgcgaggagtgcgggaaggctttcaatcaattttccaatttgactacacacaagagaatccatactgcagagaagttctacaaatgcaccgaatgtggcgaagccttttcaagaagctctaacttgactaaacacaagaagatccacaccgaaaaaaagccctataagtgcgaagaatgcggcaaggcgttcaagtggtctagcaagctgactgagcataaactcacccacactggtgagaaaccatacaaatgtgaagagtgtggcaaagcctttaactggcctagtacccttactaagcacaaccgcattcacacaggcgagaagccttataaatgtgaggtgtgcggcaaggctttcaaccagttttccaacctgactacacataaacgcatccatacagccgaaaagccatataaatgcgaagagtgcgggaaagccttcagtagatcttccaacctgaccaaacataaaaaaatacacatcgagaagaagccttacaagtgtgaagagtgcgggaaagctttcaagtggtcttcgaaactgacagagcacaagataactcatactggagagaagccctacaagtgtgaggagtgtggcaaggctttcaaccactttagtatcctgaccaaacacaaaagaattcacaccggggagaaaccttacaagtgtgaggagtgcggcaaggccttcacacagtccagcaacctgacaacacataagaaaatccacactggggagaagttctacaagtgtgaggagtgcggcaaagccttcacccagtccagtaacctcactacgcataaaaaaatccatacaggcggcaaaccttacaaatgcgaggagtgcgggaaggcctttaaccaattcagtaccctcaccaagcacaagattatccatactgaggagaagccttataaatgcgaggagtgtgggaaagcgtttaaatggtcgagcactctgacgaagcacaagatcattcacacgggagagaaaccatataagtgcgaggagtgcggaaaagcattcaagctgtcttccaccctgagcactcacaagattatacacacaggagaaaagccttacaaatgcgagaagtgtgggaaggctttcaacagatcttcgaacctgattgaacataaaaaaatccatacaggcgagcagccttacaagtgtgaagagtgcggaaaggcttttaactacagcagtcacctgaacactcacaaacgcatccataccaaagaacagccctataagtgcaaagaatgcggcaaagcattcaaccagtactctaacctaacaacacataataaaatacatacaggtgagaaattgtataagcctgaagatgtgaccgtcattttgactacaccacagacattctccaatataaaatag

SEQ ID NO: 141447 - DNA, 1713 bp, synthetic construct
  misc_feature 1..1713: note = Description of Artificial Sequence: Synthetic coding sequence
  source 1..1713: mol_type = other DNA
atggaaaacctgaagtccggcgtgtaccctctcaaggaggcaagtggctgtcccggcgccgaccgcaatctattagtctatagcttctacgagaagggcccgctgaccttccgcgatgtggcgatagagtttagtcttgaggagtggcaatgtttggacactgcccagcaagacctctaccggaaggtcatgcttgagaactacagaaatctcgtattccttgcaggtatcgctgtgagtaagcccgatctcatcacttgtttggaacaagggaaagaaccttggaatatgaagagacacgccatggtggatcaaccacctgtgacatacagtcacttcgcccaggatttatggcctgagcagggtatcaaggatagctttcaggaagtgattctccggcgttatggtaaatgtggacacgaagatctccagctgcggacagggtgcaaatcggttgacgagtgcaatctccacaaagaatgctacgatgagctcaaccaatgccttactacaacacagtccgagattttccaatatgataaatacgtgaacgtgttctataagtttagtaacccaaacatacagaagattagacacacagggaagaagccattcaagtgtaagaaatgtgataagagcttttgcatgctgctccatcttacccagcataagaggatccacattagagagaacagctatcaatgtgaagaatgtgggaaggtttttaattggttttctaccttgacaaggcaccggcgcatccatacaggggaaaaaccatataaatgtgaacagtgtggtaaagcgtttaagcagtcttccacactaacaacacataagatcatccacaccggggagaagccctaccgatgtgaggagtgcggcaagacttttaatagatcttcccacttgaccacccacaagcgtatccacaccggggagaagccatacaggtgcgaggaatgtggcagagctttcaatagaagcagccacttaacaacccacaagattattcacaccggagaaaaaccctataagtgcgaggagtgtggcaaggcttttaatcagagttcaaccctcactacacataaaattattcacgcgggggagaaaccctataagtgtgaggagtgtggcaaagccttctatagattcagctacttgactaaacataaaattatacacacaggcgaaaaattctacaaatgcgaggaatgtggcaagggatttaactggagctccaccctaacaaaacacaagcggattcacacaggcgagaaaccctacaagtgtgaacagtgtgggaaggctttcaacgaaagtagcaatcttactgcccacaaaatcattcacactggcgaaaagccgtataaatgcgaagaatgtggcaaggctttcaatcgatcgccgaaattgactgcacataaggtgattcactcgggggagaaaccttacaagtgcgaggagtgcggtaaggcgttcaaccagttctcaaacttaactaaacataagatcacacacatcggcgacacaagctacaaatatcttgaatgcgataaggctttttctcaatccagcacgttgactaagcacaaggtgatacataccggcgaaaagccatataattgcgaggagtacggcaaggcttttaatcagtcaagcaatctgatcgaacagtctaattcgtactggagggaaactttacagatgtag

SEQ ID NO: 141448 - DNA, 1413 bp, synthetic construct
  misc_feature 1..1413: note = Description of Artificial Sequence: Synthetic coding sequence
  source 1..1413: mol_type = other DNA
atggcagctaccctcttaatggccgggtcccaagcccctgttacttttgaagacatggccatgtacctgacgcgcgaggagtggcgtccactggacgccgcacagcgcgatctgtaccgggacgtgatgcaggaaaattacggcaacgttgtgtccctcgatttcgagataagaagtgaaaacgaagttaatcccaagcaagaaatcagtgaagacgtgcaatttggcacaacatcagaacgacccgccgaaaacgcagaggagaacccggagagtgaagaagggtttgaaagtggagatagaagcgaaaggcagtggggcgacctgactgctgaagagtgggtgtcttatccccttcagcccgtcaccgatttgctggttcataaagaagtgcacaccggcattcgttaccatatatgttcacactgtggtaaggcttttagtcaaatctctgatctgaaccgtcatcagaagacccataccggagaccgaccctacaagtgctatgaatgcggcaaagggttttcaagaagttcccacctgatacagcatcagcgaacccacacaggtgagaggccttatgactgtaatgagtgcggaaaaagcttcggccgatctagccatctgattcagcaccaaaccatccacacaggcgagaagcctcacaaatgtaacgagtgtgggaagtctttctgccgcttgagccatttgatacaacatcagcggacacatagtggggaaaagccatacgaatgcgaggagtgtggtaaatccttctcaagatcgtcccacctggcacagcatcagagaacgcataccggcgaaaaaccttatgaatgcaacgagtgtggaagaggcttctcggaaaggtcagacctgattaagcattacagagtgcatacgggcgaacgtccttacaagtgtgatgaatgtggcaagaatttctctcagaattccgatctagtccggcaccgtcgggcccacacaggcgaaaagccgtaccactgcaatgaatgcggcgaaaacttctcccggattagtcatctagtgcagcaccagagaacacacacgggagaaaagccttacgaatgcaacgcttgtggtaagtcattttctcgttcctcacacctgataacccatcagaagattcatactggggaaaaaccatacgagtgtaacgaatgttggcggagttttggggagcggtctgacctgattaagcaccagcgcacccacaccggcgagaaaccttacgagtgtgttcagtgcggtaaaggctttacacagtcttctaacttaattactcaccagagagtgcacactggtgaaaaaccttatgagtgcacagaatgcgagaagagcttctccaggtctagtgccttaattaagcacaaaagagtgcacactgactag

SEQ ID NO: 141449 - DNA, 1413 bp, synthetic construct
  misc_feature 1..1413: note = Description of Artificial Sequence: Synthetic coding sequence
  source 1..1413: mol_type = other DNA
atggccgcaaccctgcttatggcaggatctcaggctccagtgacattcgaggatatggctatgtacctgacccgagaggaatggcgtccacttgatgcggcacaaagggacctgtaccgcgacgtcatgcaggagaactacggcaatgtcgtgtcattggattttgagatcagatccgaaaacgaggttaatcccaagcaggaaatctcagaggatgttcaattcgggacaacttccgaacgccctgccgagaacgcggaggagaaccccgaatccgaagaaggtttcgagtctggggatcgctctgaacgtcaatggggcgatctcaccgctgaggaatgggtcagttatcctcttcagcccgtcacagacctcctagtgcacaaggaggtgcacactggcattaggtaccatatctgcagtcattgcgggaaggccttttcacagatatctgatctcaacaggcaccagaagacccacaccggggaccgtccttacaaatgctacgaatgcggaaagggtttctctcgcagttcacatctgattcagcatcaacgtacacacacgggggagcggccatacgattgtaacgaatgcgggaaaagtttcggcaggtcaagtcacctgatacagcatcagacaattcacacaggcgaaaagcctcataaatgtaacgagtgtggtaagagcttctgcaggctgagccacctgatccaacaccagcggacccatagcggcgagaaaccatacgagtgcgaggaatgcgggaagtccttctctaggtcctcccatctggcccaacaccaacggacccataccggagagaaaccgtacgaatgtaacgaatgtggaaggggcttcagcgagcgatcggacttaattaagcactaccgggtgcataccggggaaagaccatacaaatgcgatgaatgcggaaaaaatttttcacagaattccgatctcgttaggcatcggcgggctcataccggcgaaaagccataccattgcaatgagtgtggcgagaatttctccagaatttcacatttagtgcagcaccagaggacccacaccggtgaaaaaccttatgagtgtaacgcctgtgggaaatccttttcgcgcagcagccaccttattacccaccagaagatccacaccggggaaaagccctatgaatgtaatgagtgctggaggagtttcggtgagaggtctgacttgattaaacaccagagaacacatacaggcgagaaaccttatgagtgtgtgcaatgcgggaagggctttacacagagcagtaatctgatcactcatcaacgcgttcacacaggtgagaagccatacgaatgcactgaatgcgaaaagtcatttagccggtccagcgcattgatcaagcacaagcgggttcacaccgactag

SEQ ID NO: 141450 - DNA, 909 bp, synthetic construct
  misc_feature 1..909: note = Description of Artificial Sequence: Synthetic coding sequence
  source 1..909: mol_type = other DNA
atggcggccactttgctcatggctgggagtcaagcaccagtgactttcgaagacatggccatgtacctcacacgggaggagtggagaccactcgatgcggcacaacgcgatctgtaccgagatgtgatgcaagaaaactatgggaacgtcgtctctctggactttgagatcaggtccgaaaacgaagtgaatcccaagcaggagatctccgaggacgtgcagtttggaaccacatctgagagacccgcagaaaacgcagaagagaatcccgagtcggaggaggggttcgaatcaggggataggtctgaacggcagtggggagacctcacagccgaggagtgggtgagctaccctctgcaacccgtgacagatttactggtgcacaaggaggtccacaccggcattcggtatcacatatgttcccattgcgggaaggcattctcccagatatcagacttaaaccgccatcagaaaacacatacaggggaccgcccatacaaatgctacgagtgcggcaaggggttttcacgcagctcacacctgatccagcaccagagaacccataccggggagcgtccatacgactgcaatgaatgtggtaaatcgttcggccggagcagtcatttgatccagcaccagacgatccatacaggcgaaaagccccacaagtgcaacgaatgcgggaaaagtttctgccggcttagccacctgatccagcatcaacggacacattcaggtgaaaaaccctacgagtgtgaggagtgtggaaaatcctttagtcggtcttcccacctggcacagcaccagcgcacacatacaggagagaaaccctacgagtgtaccgagtgtgagaaaagcttcagccgctcttccgctctgattaagcacaagcgcgtgcacactgattag

SEQ ID NO: 141451 - DNA, 1848 bp, synthetic construct
  misc_feature 1..1848: note = Description of Artificial Sequence: Synthetic coding sequence
  source 1..1848: mol_type = other DNA
atggattcagtggcctttgaggatgtggcagtgaacttcactcacgaggagtgggccctgctggggcctagccagaagaatctgtaccgggacgtcatgagggaaaccatcagaaatctaaactgtattgggatgaagtgggaaaatcaaaacattgatgatcagcaccagaatctgcgaagaaatcctaggtgcgacgttgtggaacgcttcggtaaatctaaggatggatctcagtgcggagaaacgttgtcacagattagaaatagtatcgttaacaaaaatacacctgctagagtcgatgcctgcgggtcttcagttaacggggaggtgattatgggccactcatccctgaattgttatatcagagtcgacacagggcacaaacatagggagtgtcacgagtacgccgagaagtcctacacacacaagcaatgtgggaaaggattatcctacaggcattctttccagacttgtgaacgaccacacaccgggaagaagccctatgactgcaaggaatgcggcaaaactttctccagccccgggaacctgaggcgtcatatggtagtgaaggggggagatggcccctataaatgcgaactgtgtggaaaagcctttttttggccaagcctgctcagaatgcatgagagaacacatacaggggagaagccatatgagtgtaaacagtgcagtaaggccttccctgtctacagctcatatctgcgccacgaaaaaatccacacaggtgagaagccctacgaatgcaagcagtgtagcaaggcctttccagactattcctcatacctccgacatgagaggacacacacaggcgaaaaaccctacaagtgcaagcagtgtgggaaggctttctccgtctccgggtccctgcgagtccacgagaggatacatacaggcgaaaagccctatacgtgtaagcaatgcggcaaggcattttgtcacttgggatcatttcagcggcatatgataatgcactcaggagatggcccgcacaaatgcaaaatttgcggcaaaggcttcgatttcccaggcagtgctcggatccatgaaggcactcacacccttgagaagccctatgaatgtaagcagtgcggcaagttactctcacacaggtcctcgttcaggaggcacatgatggcccacacaggtgacggcccccacaaatgtacagtgtgcggcaaggccttcgactctccctctgtgttccagagacacgaacgcacgcacacaggggaaaaaccctacgagtgcaaacagtgcgggaaggcctttcgtacctcctccagtcttagaaaacacgagacaactcataccggagagcaaccctacaaatgtaaatgcggaaaggcctttagcgacttattctcatttcagtcacatgaaacgacccactctgaagaggagccttatgaatgcaaagagtgtggcaaggcattctcctcctttaagtacttttgccggcatgaaaggacacacagcgaggaaaagtcctacgagtgtcaaatttgcgggaaggcattttcaagatttagctaccttaagacccatgagcgtactcacaccgccgagaagccctacgaatgcaagcagtgccggaaagctttcttctggccctcgtttttattgaggcatgaacgcacccacactggagaacgcccttatgagtgtaaacactgcgggaaagccttcagcaggagctctttctgtcgcgagcacgaaagaacacacaccggggaaaagccgtatgagtgcaaagaatgtggtaaggctttctcttctctcagctcctttaatcgtcataaacggacccattggaaggacatcctttag

SEQ ID NO: 141452 - DNA, 1992 bp, synthetic construct
  misc_feature 1..1992: note = Description of Artificial Sequence: Synthetic coding sequence
  source 1..1992: mol_type = other DNA
atggccctgtgctacggcaccttctggggataccccaagatgctggaggccgccaatcttatggaaggcctcgtggatattggtccctgggtgactttgcctagaggccaacctgaggtcctggagtggggcttacctaaagaccaggacagtgtggcttttgaggatgtggccgtgaacttcacccatgaggagtgggcattgctcgggccctcccagaaaaacttgtaccgggatgtgatgcgagagacgattcggaacctgaactgtatcgggatgaagtgggagaaccaaaacattgacgatcagcaccagaatctcaggaggaatcctcgatgtgacgttgtggagaggtttggtaagagtaaggatggttctcagtgcggggaaaccctcagtcagattcgaaatagtattgtgaacaagaatactcccgcccgggtggatgcgtgtgggagttcagtgaatggagaggtcattatggggcacagttctcttaattgctacattagagtggatactggtcacaaacatagggaatgccacgaatacgcagagaaatcttacacacacaaacagtgcggcaagggcctctcctacaggcactcctttcagacctgtgagcgacctcacacgggcaagaagccctatgactgcaaggaatgcggaaagacctttagtagccctgggaacttgcgccgccatatggttgtcaaggggggagacggcccatacaaatgcgaattgtgtgggaaggctttcttttggcctagtttgttgcgtatgcacgagcgaactcacactggagagaagccttacgagtgtaagcaatgcagcaaagcattcccagtatactcctcttatctccgccacgaaaagatacacaccggggagaagccttacgaatgcaaacagtgttctaaagcatttccggactattccagctacctgcgacacgagagaacgcacaccggggaaaagccgtataagtgcaaacagtgcgggaaagccttttcagtgtcaggttcgctgagagtgcacgagaggatccacactggagaaaaaccatatacttgcaagcagtgcggaaaagcgttttgtcacctcggaagcttccagcgccacatgatcatgcactctggcgatggtccacacaagtgtaagatctgcgggaaaggttttgatttccccggcagcgcacgaatacatgagggtacgcacacactcgaaaaaccttacgaatgtaagcaatgcggaaagctcttgtcccacagatccagtttccggcgccatatgatggcccataccggcgacgggcctcacaaatgtactgtgtgtggaaaggcctttgattcaccatcagtgtttcagaggcatgaacgaacccatactggggagaaaccttatgagtgtaagcagtgcggtaaagcctttcgaacaagtagttccttgagaaagcacgagactacacacactggcgagcagccttataagtgtaaatgtgggaaggccttctccgacctattcagctttcaatctcatgagaccacccacagcgaggaggagccatatgaatgcaaagaatgcgggaaagccttttcctcttttaaatatttctgtcgacacgagcgcactcattccgaagagaagagctacgaatgtcagatctgcggcaaagcgttcagccgcttcagttaccttaaaactcatgaacgaactcacactgctgaaaagccttatgagtgcaaacagtgccgtaaagcctttttttggccatctttccttctgcgccatgagcgtacccacacaggggagaggccatacgaatgcaagcactgcgggaaggctttttcaagatcatcattttgtcgggagcacgagcgtacgcacactggcgagaagccatatgagtgcaaggaatgtggcaaggcattcagctccctgtccagttttaaccgccataagaggacacactggaaagatatactctag

SEQ ID NO: 141453 - DNA, 1914 bp, synthetic construct
  misc_feature 1..1914: note = Description of Artificial Sequence: Synthetic coding sequence
  source 1..1914: mol_type = other DNA
atggctctgtgctatggcaccttctggggctacccaaagatgctggaagctgcgaatctgatggagggactggtcgatatcgggccctgggtgacgttgcccagaggtcaaccagaagtgcttgagtggggcttaccaaaggatcaggacagcgttgcattcgaggacgtggctgtgaattttactcatgaggaatgggccctactgggccccagccagaagaatctgtacagggacgtgatgcgagaaaccatccgtaacctcaattgtatcgggatgaagtgggagaaccagaacattgacgaccagcaccagaacctaagaagaaatccccggtgtgacgtagtggagaggttcggcaagagtaaagacggctctcaatgtggggagactttgagtcagatcaggaactccatcgtcaacaagaacaccccagctcgcgtagacgcctgcggaagcagtgtgaacggcgaagtgataatggggcattcttctctaaactgctacattcgggtggacaccggccataagcacagggaatgtcatgaatatgctgaaaagagttatacccataagcaatgtgggaaaggactaagttatcgccacagttttcagacctgtgagagacctcacactggcaaaaagccttatgattgcaaagagtgtggtaagacattctcaagtcccgggaacctccgcaggcacatggtcgtgaagggaggcgacggcccttacaaatgcgaactgtgtggaaaggcgtttttctggccatccctcctgagaatgcacgagagaactcatacaggagaaaagccatacgaatgcaaacagtgttctaaagctttcccggtgtactctagctatctgcgacacgagaagattcacacgggagaaaaaccctacgagtgcaagcaatgttctaaggcctttccagactactcttcttatctgagacatgagcgcactcataccggggagaaaccttacaagtgtaagcagtgcggcaaagcatttagtgtgagcggctcgctgagggttcatgagagaatacacactggagagaagccctacacatgcaagcagtgcgggaaggcattttgtcacttggggtcttttcagcgtcacatgatcatgcactctggagatggcccacataaatgtaagatatgcggaaagggattcgattttcccggaagcgcccggatccacgagggcacccatactctggaaaagccctatgaatgtaaacagtgtggaaagctgctttcccacaggtctagctttcgtcggcacatgatggcccacacaggagacggcccacataagtgtaccgtgtgcggcaaggctttcgactccccctccgtgttccagcgccatgaaaggactcataccggggagaagccttatgaatgcaagcagtgtggcaaagccttccgcacctcgagctctctgcgcaagcatgagacaacacacacaggcgagcaaccttacaaatgcaagtgcggcaaggctttttcagatttgttctcattccagtctcacgagaccacacattcagaagaagaaccatacgagtgcaaagagtgcggtaaagcattctccagcttcaaatacttctgtcgccatgagcgtacccactccgaagagaaaagctacgagtgccagatctgcgggaaggccttctctcggttttcgtacttaaaaactcatgaaaggacgcatacagccgaaaagccgtatgagtgtaagcagtgccggaaagcgttcttttggccctcattcttattgaggcacgagcgtacacacacaggggagcgaccttatgagtgtaagcattgtggcaaggcattcagccggtctagtttttgtcgagaacacgaacggacacatacaggagagaagccctatgagtag

SEQ ID NO: 141454 - DNA, 1770 bp, synthetic construct
  misc_feature 1..1770: note = Description of Artificial Sequence: Synthetic coding sequence
  source 1..1770: mol_type = other DNA
atggactctgtggcttttgaggatgtagcagtcaactttacacacgaagaatgggctctgctgggccctagccagaaaaatctctaccgggacgttatgcgcgagacaatcagaaacctaaactgcattgggatgaaatgggaaaatcaaaatattgacgaccaacaccagaacctccgccggaaccctcgatgcgacgtggtagaacgcttcggaaaaagcaaagatggatctcaatgcggagaaaccctgtcacagattcgaaatagcatcgtgaataagaacactcctgccagagtcgatgcttgcggctcttccgtgaatggagaagttataatgggacactccagtctcaactgttacatccgggtggacaccggccataagcacagagagtgtcacgagtatgccgagaagtcttacacacacaaacaatgcggaaaaggcctttcctaccggcactccttccagacttgtgagcgcccccacacaggcaaaaaaccatatgattgcaaagagtgtggtaagacgtttagttcccctggcaacctgaggaggcatatggtggtcaagggaggggacggcccatacaagtgtgaactttgcgggaaggctttcttttggccctctctgctccgcatgcatgaaaggacccatacaggggagaagccatatgaatgtaaacaatgctccaaggcctttcctgtttactcctcttaccttcgccacgagaagatccatactggggagaagccatacgagtgcaagcaatgcagcaaagcattccctgactatagtagctacctcagacatgagcgaacccataccggcgagaaaccgtataaatgcaagcagtgcggaaaagccttctctgtgtccggctctctaagggtacatgagaggatccacaccggggaaaagccctacacgtgcaagcagtgcggcaaagccttctgtcatttaggcagctttcagaggcacatgattatgcatagcggcgatggacctcataaatgtaagatttgcggaaagggctttgattttcctggcagcgcaagaatacatgaaggaacacataccttggagaaaccctatgagtgtaagcaatgcgggaaactgctgagccacagaagttcctttagacggcatatgatggcccacacaggagatggcccacacaaatgtacggtgtgtgggaaggctttcgatagcccctccgtttttcagcggcacgaacgcacccatactggagagaagccttacgagtgcaagcagtgcggcaaagcttttcggacaagcagttcccttcgtaaacacgagaccacccataccggagagcagccctataagtgtaagtgcggaaaggcattcagtgatctgttctcctttcagagtcacgagaccacccactccgaggaggaaccctacgagtgcaaagaatgtggcaaagcttttagttcctttaaatatttttgccggcacgaaaggacccatagcgaggagaagagctacgaatgccagatttgtggtaaagcgttctcccggttcagctacctgaagacacacgaacgcactcacactgcagaaaaaccttatgagtgcaagcaatgccggaaggccttcttctggcccagttttcttctccggcacgaaagaactcacactggtgaacggccctatgagtgtaagcattgtggcaaggcattcagccgatcgagtttttgtcgggagcatgaaaggacgcacacgggagaaaagccctatgagtag

SEQ ID NO: 141455 - DNA, 1623 bp, synthetic construct
  misc_feature 1..1623: note = Description of Artificial Sequence: Synthetic coding sequence
  source 1..1623: mol_type = other DNA
atgggcatcgtagagaaggcctcttcatctagcgatagcgtcaccttcgaagatgtggccgtcaatttcacacaggaggaatggaccctgctcgatcctagtcagaagaaactctaccgggatgttatgtgggagacttttcgtaatctggccaccatcggcaccaagcagaaggaatggaatatagaggagcagtacaaaaatcaggggaggaatctccgcaaccacatggtcgagcgcctttgcgaatctaaagaggggtcacacgggggcgaaggttttagccagattgccaatctgtctctgaataaaaaaaccccgtccggagggaaactctgggagtcctccgtttgcgggaaagttctgtcacatcattcatccttgaatcgacacatacggtcctatactaggcacaagctctacaagtgtcaggaatacggcgagaagccctataaatgcaagaaatgcggtaagccattctcttaccttcagagcttcaagaagcacaagcgtacacatagcgcaggtatagtgtacaaatgcaaggcctgcggcaaagcgttctcgtgtcagcgctcatttcagattcacggcagaacacacaccggcgataaaccctttaaatgtaaggaatgtggcaaagcttttcggtatcaccagtctgcacagaagcacgagaaggcccatactggcgagaaaccatataagtgcaaggaatgtggcaagccatttatttaccggcatagcgctcgggcgcacgaacgaaatcacacagtgcagaaaaggtacgagtgcaagcaatgcgggaagacatacatttccagtgtcggattccaggcccatgaacgaacgcataccggggaaaaaccatatgagtgtaaaaagtgcgggaaagtgttcgtgtaccacaattctgctcaaaggcacgaaaagacacacaccggagaaaagccctataagtgcaaggagtgtgggaaagcctttagctaccattgtacggcccagaaacatgagcggaatcacactgcccaaaagcactatgagtgtaagttgtgtggtaagacttatttgtcccccctcgggtttcaagcccatgagtccacgcacactggagataagcctttcgagtgcaaaaaatgtggaaaggctttccgatattactattccgcgcagaggcatgagagaacacatactggagaaaagccctacaaatgcaaagagtgcggaaaggccttctattgttgcagctccgctcggcgtcatgagagaatgcataccgctaagaaacaatatgaatgtaaaaagtgtggcaagacgtatattaccctggcaggatttcagatccatgagagaactcacaccggagaaaaaccctacgaatgcaagcagtgtggcaaggccttctcttcgtccagctacatacatatccatgaaagaattcacacaggcgaaaagccgtatgagtgcaaggagtgtgggaagcctttcagcttcctgaccggctttcgcgtgcacatgagaatgcacacaggggagaaaccgtacaagtgtaaggattgtggcaacgcctttatttggagggccagcttgcaataccatgtgaagaaagtccatgccgagtag

SEQ ID NO: 141456 - DNA, 1848 bp, synthetic construct
  misc_feature 1..1848: note = Description of Artificial Sequence: Synthetic coding sequence
  source 1..1848: mol_type = other DNA
atggactcagtggccttcgaggacgtggcggtgaatttcacgcacgaggagtgggccctcctcggtcccagccagaagaacttgtacagagatgttatgcgagaaacaatcagaaacctgaactgtatcgggatgaagtgggaaaaccaaaatattgacgatcagcatcagaatctgaggaggaacccaaggtgcgatgttgtggagcgctttggtaaaagcaaggatgggtcgcaatgcggggagacactgtcccagattaggaactctattgtcaacaaaaacacgcctgcgcgggttgatgcatgcggcagctcggttaatggcgaagtgattatggggcactcctctctgaactgctacatccgggtggacactggtcataaacatcgcgagtgtcatgaatatgccgagaaaagctacactcataagcaatgcggaaaggggctatcataccgacatagcttccaaacatgcgaaagaccacacactggaaagaaaccctacgattgtaaggagtgcggaaagacattcagttctcccggaaatctgaggcgccacatggttgtgaaagggggggatgggccttataaatgcgagttgtgcggtaaagcattcttctggcccagtttgcttaggatgcatgagcgaacacacactggtgaaaagccgtacgaatgcaagcagtgctctaaggcctttccagtgtactcctcctatctcagacatgagaaaattcataccggcgagaagccctatgagtgcaaacagtgctcaaaggcttttccagactattctagctacttgcgtcacgagaggacacataccggtgaaaaaccttacaaatgcaagcagtgcggcaaggcattttccgtttccgggagtcttcgggtgcatgaaagaatccacaccggggaaaaaccctacacctgtaaacaatgtggcaaggccttctgtcatctggggtcatttcagcgccacatgatcatgcacagcggagacggtccacataaatgtaaaatttgcgggaagggctttgattttccaggctccgcccggatccatgaaggtactcacacgctcgagaaaccatacgaatgtaaacagtgtggcaaactgttatcacatcgctcctcattccgcagacatatgatggctcatacgggggatggccctcacaaatgtacagtttgtggtaaagccttcgattcccctagtgtgttccaaagacacgagcggactcacacgggagaaaagccctatgagtgtaagcagtgcgggaaagctttccggactagctccagcttaaggaagcatgagacgacccatactggagaacaaccatataaatgtaagtgtgggaaggccttcagcgacttgttctctttccagtctcacgagacaacccactccgaggaagagccctacgagtgtaaagaatgtggcaaagcttttagctctttcaaatacttctgtcgtcatgaaaggactcattccgaagagaaaagctacgaatgtcaaatttgcggcaaggcgttttcccggttctcgtacctgaaaactcatgagcgaacacacaccgccgaaaaaccttacgagtgcaagcagtgtagaaaagcctttttctggccttcgtttttgctcaggcacgaaaggactcacacaggagaaaggccatacgagtgtaaacactgcgggaaagccttcagccggtcttctttctgccgggagcacgagcgcacccatacgggcgaaaagccctacgaatgcaaagaatgtgggaaggccttcagctcactctcgtccttcaatagacataagcgcacacactggaaggacatactgtag

SEQ ID NO: 141457 - DNA, 984 bp, synthetic construct
  misc_feature 1..984: note = Description of Artificial Sequence: Synthetic coding sequence
  source 1..984: mol_type = other DNA
atggaagtggcggtccctgtgaaacaggaagcggagggtctagctcttgatagcccctggcacaggtttcgcaggttccacctgggcgatgctcctggccctcgcgaagctctcggcctcctgagggctttgtgcagggactggctacggccagaagtccataccaaagaacagatgctcgagttgctcgtactcgagcaatttctttctgcgctacccgccgacactcaggcttgggtttgttctagacagcctcagagcggggaggaggctgtggcgctgctggaggagctctgggggccagcagcctcccccgacgggagctctgctacccgagtgccccaagatgttacgcaggggcctggcgctactggaggaaaagaagactcaggaatgatcccgctggccggcaccgcaccaggagccgaaggcccggcaccgggggactcacaagccgtgaggccatataaacaggagccgagcagccccccactggcccctggcctgcccgctttcctcgcagccccgggcacgacctcttgcccggaatgcggcaaaaccagtctcaaacccgcccatttgctgagacacaggcaaagccacagcggggagaaaccgcacgcatgtcccgagtgcgggaaggccttccgccgcaaggagcatctgagaaggcatcgcgacacccaccccgggagcccaggaagtccagggcctgccctgcggcctctcccggcaagagagaagccacacgcttgctgtgaatgcggtaaaacattctattggcgggaacatctggtacgacaccgaaagacccatagcggcgcgagacccttcgcttgctgggagtgtggaaagggtttcggcagacgggagcacgtcctgcgtcaccagaggattcacgggcgggccgccgctagcgctcagggagcagtggcaccagggcccgacggcggcggtccatttcctccctggccacttggatag

SEQ ID NO: 141458 - DNA, 1557 bp, synthetic construct
  misc_feature 1..1557: note = Description of Artificial Sequence: Synthetic coding sequence
  source 1..1557: mol_type = other DNA
atggctgtggctctggggtgcgctattcaggctagcctcaaccaaggcagcgtttttcaggagtacgacactgattgcgaagtctttcgacagcgcttcagacaatttcagtacagagaggcagcaggcccccatgaggccttcaacaagctgtgggagctatgttgccagtggcttaagcccaagatgaggagcaaagaacaaatcctggagctacttgttctcgagcagtttctgacaattttgcccacagagatcgagacgtgggtgcgcgagcactgtccagagaacagggaacgagtggtcagcctgattgaagaccttcagagggagttagaaataccggagcagcaggtggatatgcatgatatgttgctcgaggaactagccccagtaggcaccgcccacattcctcccactatgcacctcgaatctccagccctgcaggtgatgggccccgcacaggaggcccctgtcgcagaggcctggattccccaggcaggaccaccagagctcaactatggcgccacaggtgagtgtcagaatttccttgacccaggatatccattacccaagcttgacatgaatttcagccttgaaaacagagaagagccctgggtgaaagagcttcaggatagcaaggagatgaaacagttgctcgacagcaaaatcggttttgagatcggtatcgagaatgaggaagataccagtaaacaaaagaaaatggaaaccatgtaccctttcattgtgacgctggaaggtaatgcattacagggcccaatcctccagaaagactatgtgcagctagagaaccaatgggagacacccccagaggacctgcagacggatttagccaagttagttgatcagcaaaacccgacactcggggagacccccgagaactctaatctagaggaacccttgaaccctaagcctcataagaaaaaatcccccggtgagaagccacaccggtgcccacagtgcggaaagtgctttgccaggaagagtcagcttactgggcatcagagaattcattccggtgaagaaccacacaaatgcccagaatgcggcaagcggttcctgaggagcagcgacctgtatcgacaccaacgactgcacaccggggagagaccatatgagtgcactgtatgcaagaagcgtttcaccagacgctcccatctcattgggcaccagcgcactcattccgaagaagagacatataaatgtcttgagtgtggtaagagcttttgccacggatcaagcttgaaaagacacctcaagacccacactggagaaaaacctcatcggtgccacaattgcggcaagtccttttcacgcctgacagccctgacgctgcaccagcggacccataccgaggaacggccattcaaatgcaattactgtgggaagtcctttaggcaacggccgtccctggtgatccacctacgcattcacaccggagagaaaccgtacaagtgcacacactgcagcaaatccttccggcagcgagcgggccttatcatgcatcaggtcacacatttcagaggcctgatttag

SEQ ID NO: 141459 - DNA, 384 bp, synthetic construct
  misc_feature 1..384: note = Description of Artificial Sequence: Synthetic coding sequence
  source 1..384: mol_type = other DNA
atggccgtcgctctaggctgtgccattcaggcttcgctaaaccagggcagcgtgttccaggaatatgacactgattgtgaggtatttcggcagcgtttccgccagtttcagtacagagaagcagcaggtccccatgaagccttcaataaactgtgggaactgtgctgtcaatggctcaaacccaagatgcggtcgaaggagcaaatccttgagttgctggtgctagagcagtttctgacaatcctgccaactgagattgaaacttgggtgagggagcactgtcccgagaacagagaaagagtggtgtcgctgatcgaggatcttcaaagggagctggaaattccggagcagcaaacctttgccgccgaatacagccattactag

SEQ ID NO: 141460 - DNA, 495 bp, synthetic construct
  misc_feature 1..495: note = Description of Artificial Sequence: Synthetic coding sequence
  source 1..495: mol_type = other DNA
atggctgtggctctagggtgtgccatccaagcatcactgaatcaaggcagtgttttccaagagtacgataccgactgtgaggtttttaggcagagattcagacagtttcagtaccgagaggcagccggtccccatgaagccttcaacaagctgtgggagctttgttgtcagtggctgaaaccaaaaatgaggagcaaggagcagatcttggaactgctcgtgctcgagcagtttctcactattcttcccactgagattgagacctgggtcagagagcattgtccagaaaatcgagagcgggtggtgagtctgatagaggatctgcagcgcgaactcgagattcccgaacagcaggtgaggaaagaatgcggcatctttgttatcgggccaaaagaagtggcagaagctgctggcactaggccacacatctgtctgtatgtaatcccccaaccccaggatttctctcgggtgctgtttttattcctcttctgctag

SEQ ID NO: 141461 - DNA, 2049 bp, synthetic construct
  misc_feature 1..2049: note = Description of Artificial Sequence: Synthetic coding sequence
  source 1..2049: mol_type = other DNA
atgaccaagagcaaggaagctgtgacgttcaaggatgtggctgttgtcttttctgaagaggaattacaacttctcgatctagctcaacgaaaactgtatagggacgtaatgctggagaactttcggaacgtagttagcgtggggcatcagagcacaccagacggactgcctcagctcgagagggaagagaagctgtggatgatgaagatggcgacacaacgcgataacagctctggggccaaaaatctcaaagaaatggagactctccaggaggtcggtctgcgctacttgccccacgaggaacttttttgttcacagatttggcagcagattacccgagagcttattaagtaccaggacagtgtcgtgaatatccagcgaactggctgtcagctagaaaagagagacgatctccattataaggacgaaggtttctccaatcagtccagtcacctccaggtgcaccgcgttcacacgggggagaaaccctataagggggagcattgcgtcaaaagtttttcctggagctcacatctgcagattaatcaacgggcgcacgccggagagaagccgtacaagtgtgaaaagtgcgataacgcattcagacgattctcatctctccaggcccaccagagagtccacagccgggctaagtcttacacaaacgatgcgtcctacagaagtttcagccagagatcccatttaccccaccatcaaagggttcctactggggaaaatccgtacaaatacgaagaatgcgggcgcaacgtgggcaaaagcagccactgtcaggcacccctcattgtccatacaggggaaaagccgtacaaatgcgaggaatgtggagtaggatttagtcaacgaagctacctgcaggttcatctgaaggtccacaccgggaagaagccctataagtgtgaggagtgtggaaagagcttctcatggagatccaggctgcaggcacatgagaggatccataccggcgagaagccctataagtgtaacgcttgtggcaagagttttagttactcctcacatctgaatatccactgccgcatccatacaggagagaaaccttacaaatgcgaagagtgtggcaagggattctctgtgggctctcatttgcaggcacatcagatatcgcacacgggcgaaaaaccgtataagtgcgaggagtgcgggaaaggtttctgccgggccagcaacctcttagaccaccagagagggcacacaggcgagaaaccttaccagtgtgacgcctgcgggaaaggttttagcaggagtagcgattttaatattcactttcgcgttcacacgggggagaagccctataagtgcgaagaatgtggtaagggattctcccaggccagcaatctgctggcgcatcaacgtggtcacacgggcgagaaaccttataagtgcggcacatgcgggaaagggttcagcaggtctagcgatctgaatgtccattgccgcatccacacaggagagaaaccatataagtgcgaaaggtgtggaaaggccttctcacagttttctagcttgcaggtgcaccagcgggtgcacaccggtgaaaagccatatcagtgcgcggaatgtggcaaaggattctccgtgggaagccagttgcaggcacaccaaagatgccataccggcgagaaaccatatcagtgtgaggagtgcgggaagggattctgtagagcatcaaactttctggcccaccgcggagtgcatacgggagaaaagccctatagatgtgacgtgtgcggcaaaaggttccgccagaggtcttatctgcaggcccaccagcgcgtgcatacaggggagagaccatacaaatgcgaggagtgtgggaaagtattctcctggagctcttacttgcaggcacaccagcgcgttcacaccggggaaaaaccctacaagtgcgaagagtgtggtaaaggctttagctggtcatctagcttaatcattcaccaacgcgttcatgcagatgacgaaggcgataaggatttccccagctccgaggactcacatcgaaagaccaggtag

SEQ ID NO: 141462 - DNA, 1617 bp, synthetic construct
  misc_feature 1..1617: note = Description of Artificial Sequence: Synthetic coding sequence
  source 1..1617: mol_type = other DNA
atgaccaagtcaaaggaggcagtgactttcaaggacgtggccgtggtttttagtgaagaagagctgcagctcctagacctcgctcaaagaaaactttatcgcgacgtcatgctggagaatttcaggaacgtggtctcagttggtcaccaatcaacacccgacggtctgcctcagttggaaagggaggagaagctgtggatgatgaaaatggcaactcagcgagacaacagttcaggagctaaaaatctgaaggagatggaaaccctgcaggaggttggcttgcggtatcttccccacgaggaactcttttgttcccagatctggcagcagataactagagaactgattaagtaccaagactccgtggttaatattcagcggacggggtgccaattagaaaaaagggatgatctgcactataaggatgaggggtttagcaaccagagctcacacttgcaggtacatcgcgtgcacacaggcgagaagccttataaaggcgaacactgtgtgaaaagttttagctggagctctcacctgcagattaaccagagggctcatgctggggagaagccctacaagtgtgaaaagtgcgacaatgcttttcggcggttcagcagcctccaggctcaccaaagggttcactccagggctaaaagttacacaaacgatgccagttataggtccttttcccagagatcacatctgcctcaccatcagcgcgtgcccactggtgaaaatccctacaagtatgaagagtgtggtcgcaacgtaggaaagtcttcgcactgtcaggcaccattgatcgtgcatactggggagaaaccctataagtgtgaggagtgcggggtcggcttctcccagaggtcctacttgcaggtgcacctgaaagtccacacaggtaaaaagccttacaagtgcgaggagtgcgggaagagcttctcatggaggagtcgcctccaggcccacgaaaggatccacaccggtgagaagccatataaatgtaacgcatgcggcaagtccttttcctatagctcacatctcaacattcactgccgcatacacactggggaaaagccttacaagtgtgaagagtgcggaaagggcttctccgtggggtcccatttacaggcacaccaaatttcccataccggagagaagccctataaatgtgaggaatgtgggaagggtttctgtagagcttcaaacctgttggaccatcagcgcgggcacactggcgaaaagccttaccagtgcgatgcctgcggcaagggcttttctcgctcttctgacttcaatatacactttcgggtgcatacaggaaaaaaccccatcaacgtaaggagcgtggcccgggccagcgcccgtcctcagattttttggcctatcaaggaggccacactagaaaggaatcccaccaatgtggtccatgtcgggcgggctagtgtgggagctcagattcttatgtataccgtggaaagcacgcaggaacggaaccctataaacgcaaggggggtggtcaggccgtcagtgtccagccccgcgtttcggtgcatccgcgaatttacactggagaggaatcacattagcgtacagagtgtgggtagggcctcagtatag

SEQ ID NO: 141463 - DNA, 1689 bp, synthetic construct
  misc_feature 1..1689: note = Description of Artificial Sequence: Synthetic coding sequence
  source 1..1689: mol_type = other DNA
atggccgccgcgtggatggctccagctcaagagtccgtcacgtttgaggatgtggccgtcacattcacccaagaagaatggggccaactcgatgtcacacaaagggccctgtatgtagaggtgatgcttgagacatgcgggctgcttgtagcacttggggattccaccaagcctgagactgtagagccaattccatcacatttagcattgcccgaggaagtgtccttacaggagcagcttgcccagggggtccctcgctacagctatctcgggcaagccatggatcaggacggacccagtgaaatgcaggagtattttttgcgccccggaactgatccccaatctgagaagcttcacggtaaaatgtcattagagcatgagggactcgcaaccgcagacggcatctgctctatgatgatccagaaccaggtgtctcctgaggacgcactctacggctttgactcgtacggccctgttaccgattcacttatccacgagggcgaaaatagctacaaattcgaagagatgttcaatgagaattgcttcttagtgcaacacgagcagattctgccccgggttaagccctatgattgtccagagtgtggcaaagccttcggcaaaagtaagcacctgctgcagcaccacatcattcacaccggagagaaaccatataaatgtctcgaatgtggcaaggactttaataggagaagtcacttaaccaggcatcagaggacacacaatggagataaaccgtttgtgtgctccgagtgcggacgaacatttaatagaggctctcacttgacaaggcaccagcgcgtccactccggtgaaaaacccttcgtgtgtaacgagtgcgggaaagccttcacttatcgctctaatttcgtgctgcataataaaagccacaacgaaaagaagcctttcgcgtgctctgaatgcggcaagggtttttatgaaagcaccgcgctgatacaacatttcatcatccacactggcgagaggcctttcaagtgcctggaatgtggaaaagctttcaactgccgatctcacctcaaacagcacgagagaatccatacgggggagaagccattcgtgtgcagccagtgcggaaaagccttcactcactactcaacttatgtactacatgagcgcgctcataccggcgagaagcccttcgaatgtaaggaatgtggaaaggcgttttccatcagaaaggatctgatacggcacttcaacatccacacaggcgaaaaaccgtatgagtgcttgcagtgcgggaaagccttcacgaggatgtccggcctcactagacaccagtggatccatactggggaaaagccttatgtgtgcatacagtgtggcaaggccttttgtcggacaaccaatcttattcgccatttctcgatccataccggcgaaaagccatacgaatgcgtggagtgtggcaaagcttttaatcggagatcccctttgacacgccatcaacgaatccataccgcggagaagagccacgagccgatccaatccgggaacgtcagctgcgagtcaaccgacctgattcagcactctattatccacactgaaagctcacccgtctctgcggttaatatggagacaccctccattgccgctcatagcagttcgctggatataaacggcttcatcgtggaggagaccctccctctttag

SEQ ID NO: 141464 - DNA, 1566 bp, synthetic construct
  misc_feature 1..1566: note = Description of Artificial Sequence: Synthetic coding sequence
  source 1..1566: mol_type = other DNA
atgcttgagacctgtggccttctggttgcactgggggacagtacaaaacctgagacggtagagccaataccttcccacctggctctgcctgaggaggtgagcctgcaggagcaattggcacaaggggtgccacggtattcatacctaggacaggccatggaccaggacggaccatcagaaatgcaggaatatttcctgcggcccgggacagatcctcaatccgagaagttgcatggcaagatgtcactagaacacgaggggcttgccactgccgatggcatctgtagcatgatgattcagaaccaggtgagcccagaggacgctctttacggctttgattcatacgggcctgtaacggactccctgatccatgaaggggaaaacagctataaattcgaggagatgttcaacgaaaactgcttccttgttcagcatgagcagattttacctcgcgtgaaaccttatgactgccccgagtgtggcaaagcttttggcaaaagtaaacacctcctgcagcatcacattattcataccggcgaaaaaccttataagtgtctggaatgtgggaaagattttaaccgcaggagccatctcacacggcaccagcggacacataacggcgacaaaccttttgtctgctccgaatgcggcagaaccttcaatagaggctcacatctcactaggcaccaaagggttcactccggagagaagccattcgtatgtaacgaatgcggaaaggcctttacttaccgttcaaatttcgtcttgcacaacaagtcacacaatgagaaaaagccctttgcctgtagcgaatgtggtaagggattctacgaatccacagccttaattcagcactttattatccataccggggagcggccattcaagtgcctggagtgtggaaaggccttcaattgcaggtcccatttgaagcagcacgagcggattcatacgggcgaaaaaccttttgtttgctcacagtgtgggaaggcattcactcattatagtacctatgtgctccatgagagagcccatacaggagaaaagccattcgaatgcaaggagtgcggcaaggccttctctatccgaaaagatcttattaggcattttaacatccacaccggggagaaaccctacgagtgtctgcagtgcgggaaagcttttacacgcatgtctgggctgaccaggcatcagtggattcacacgggcgagaaaccttatgtgtgcatccagtgcgggaaagcattctgtcgtactacaaatttgattcgtcattttagcatccatactggcgaaaaaccctacgaatgcgttgagtgtggtaaagcctttaacaggcggagcccactgacccgtcaccagaggattcacacagcggagaagtctcacgaaccaattcagtctggcaacgtctcctgcgagagtacagatctcatccaacactcaatcatccacacagagagcagccctgtgagcgccgttaatatggagactccgtctatagctgcacacagttcctctcttgatattaacggatttattgtggaagagactctcccgctgtag

SEQ ID NO: 141465 - DNA, 1623 bp, synthetic construct
  misc_feature 1..1623: note = Description of Artificial Sequence: Synthetic coding sequence
  source 1..1623: mol_type = other DNA
atggcacatgagctggtgatgtttagggacgtggcgattgacgtctctcaagaggagtgggagtgccttaaccctgcccagcggaatctctacaaagaggttatgttggaaaactacagcaacctggtaagcctgggactttcagtctccaagcccgctgttatctctagtcttgagcaagggaaagagccatggatggtggttcgagaagagactgggcggtggtgtccagacttggcctcaagggacgagcctcagaagctctctcccaagcgggacatttatgagaccgagctcagccagtgggtaaatatggaagagtttaaatcacacagtcctgagaggtccatattcagcgccatttgggaaggcaattgtcacttcgagcagcatcagggccaagaagaaggctacttccgtcaactgatgattaaccacgagaatatgcctatcttctcccagcacacactgctcacgcaggaattttacgacagggagaagatatccgagtgtaaaaagtgccggaagatcttctcttatcacctcttcttttcgcaccacaagcggacccattccaaggagctcagtgaatgcaaagagtgtaccgaaattgtgaacacgccttgtctgttcaaacagcaaaccattcaaaacggcgataagtgtaatgagtgtaaggaatgttggaaggctttcgtccattgttctcaattgaagcacttgagaattcataatggagaaaaacgatacgagtgcaatgagtgcggtaaggcctttaattacggaagtgagctgaccctgcatcaacgcatacacacgggagaaaaaccatatgagtgcaaggaatgtgggaaggccttccggcaacgctcacagttgacacagcatcagcgcctccataccggggagaagccctacgaatgcaaacagtgcggtaaggcttttatccgagggtttcagctgacagagcacctcagattgcatactggcgagaagccctacgagtgtaaggagtgcggtaagacctttcggcaccggagccacctaaccattcatcagagaatccataccggagagaagccctacgagtgccgcgagtgtggtaaggccttttcctaccatagttcgtttagccatcatcagaaaatccattcggggaagaagccttatgaatgtcatgagtgcgggaaggcattttgtgatggactgcagcttaccttacatcagagaatccatacgggagagaaaccatatgagtgcaaggaatgcggaaaaacttttcgacagtgctctcatctaaaacgacaccagcggatccataccggtgagaagcctcatgagtgtatgatttgcggtaaggctttccgattacactctcacctcatccagcatcagcgcatccacacgggcgagaaaccatacgaatgcaaggagtgcgggaaagccttttcctaccactcctctttcagtcaccatcagcggattcactcgggcaagaaaccctatcaatgtggaaaagcttttaaccaccggttacagttgaatctgcatcagactctgcacacaggagagaagcctgttcggttcccgttactgccaccacacccttccttggccagctag

SEQ ID NO: 141466 - DNA, 741 bp, synthetic construct
  misc_feature 1..741: note = Description of Artificial Sequence: Synthetic coding sequence
  source 1..741: mol_type = other DNA
atggtcgtacgggaagaaaccggtcgatggtgccctggaacttggaagacatggggcttccacaacaactttctcgacaataatgaagccacagatatcaacgcagatctggcctcacgggatgaaccacaaaaactatcaccgaagagagatatttatgaaacagagctgagccagtgggtcaatatggaggaatttaaatcgcatagccccgaaaggtcgatctttagtgccatctgggagggcaactgccactttgaacaacaccagggccaggaagaggggtactttcgtcagcttatgatcaaccacgaaaacatgcccattttttcccagcatacattgctcacccaggagttctacgatagggagaaaatcagcgaatgcaagaagtgtaggaagattttctcatatcacctgttcttttctcaccacaagtgttcccaccttaaaaggcatcagcgaatccatacgggcgagaaaccccacgagtgcatgatttgtggaaaggcctttagacttcattcccacctcatccagcatcagagaatccatacaggggagaagccatatgagtgtaaagaatgtgggaaagccttttcatatcattcatcattctcacaccaccagaggattcactccgggaaaaagccttaccagtgtggaaaggcttttaaccatcgtcttcagctaaacttgcaccaaaccctgcatacgggcgagaaaccagttaggttttag

SEQ ID NO: 141467 - DNA, 1692 bp, synthetic construct
  misc_feature 1..1692: note = Description of Artificial Sequence: Synthetic coding sequence
  source 1..1692: mol_type = other DNA
atggcccatgaacttgtgatgtttagggacgtcgccattgatgtctctcaggaagaatgggaatgtttaaatccggctcagagaaatttgtacaaggaggtgatgctcgaaaactactcaaatttggttagtctcgggctgtcagtcagcaagccagccgtaatttcatcactggagcagggcaaggaaccttggatggtggtaagagaggaaacggggcgctggtgccccggaacctggaaaacatgggggttccataacaatttcctggacaataacgaagcgacagatattaatgcggatctagctagccgggatgagccccagaagcttagtcctaagagggacatttacgagaccgagctttctcaatgggtgaacatggaagagtttaaaagccactcaccagagcgaagcatcttcagcgccatctgggagggaaactgtcacttcgagcagcatcagggacaggaggagggatattttcggcagctgatgattaatcacgagaatatgcctatcttctctcagcacacgttactgacccaggaattttatgaccgggagaagatcagcgaatgcaaaaagtgtcgtaaaatctttagctaccacctgtttttctctcatcataagcgcactcactctaaggagttaagcgaatgtaaagagtgtaccgaaatagtgaacacaccttgccttttcaaacagcagaccatacagaatggagataagtgcaacgagtgcaaagaatgctggaaggcttttgtacactgttcccagcttaaacatctaagaatccacaatggtgaaaaacgatacgaatgcaatgaatgcgggaaggcatttaactacggatccgaacttaccctgcaccaaagaatccacaccggggagaagccttatgagtgtaaggaatgtggtaaagctttccggcaacggtcccagctgacacagcatcagagacttcatacaggcgaaaaaccgtatgaatgcaaacaatgcggcaaagcgtttatccggggcttccagctgacggaacatctccgcctgcacacaggagagaaaccctatgaatgcaaggagtgcggaaagacatttcggcatagatctcatctcacaatccaccagagaattcacacaggagagaaaccttatgaatgtcgggagtgtggcaaggcctttagctaccactccagcttcagtcatcatcaaaaaatccatagcggtaaaaagccctatgagtgtcacgaatgtggtaaggccttttgcgatggtcttcaactaaccctccaccaacgcatccacactggtgaaaagccctatgagtgtaaggaatgcggcaagacatttagacagtgcagtcatttgaagcgccaccagcgaatacatacaggagagaagccacatgagtgtatgatctgtggcaaggcgttccggctgcattctcatctgattcagcatcaacggattcatactggggagaaaccatatgaatgtaaggagtgtggcaaagctttcagctatcattcttctttctcccaccaccaaaggattcatagcggcaaaaagccctaccagtgtggcaaggcgttcaaccacaggctccagttgaacctccaccaaacgctgcatactggggaaaagccagttcggttccccctgttgcctccacatccgtcactcgcctcatag

SEQ ID NO: 141468 - DNA, 777 bp, synthetic construct
  misc_feature 1..777: note = Description of Artificial Sequence: Synthetic coding sequence
  source 1..777: mol_type = other DNA
gaaaagaggtacgagtgcaacgagtgcgggaaggcatttaactatgggtccgagctgacattacatcaacggattcatactggggaaaagccatatgaatgtaaggagtgcggaaaggcattccgtcagcgcagccagctaacccagcaccagcgtctgcacactggcgaaaagccatacgaatgtaaacagtgcggaaaggcgttcattagaggttttcagctgacggagcacctgcgcctacacaccggcgagaaaccttatgaatgcaaggaatgcggcaaaacattccgccaccggtcacacctgacaatacatcagcgcatccacacaggggagaaaccatatgagtgtcgagagtgtggaaaagctttcagctatcactctagcttcagccaccaccagaaaattcactctgggaaaaagccatacgagtgtcatgaatgtggcaaagccttttgcgatggccttcagctgaccctccaccagagaattcacactggggaaaaaccatacgaatgtaaagagtgcggtaagacattccgtcaatgctcacatctgaaaagacatcagaggattcacaccggggaaaagccccatgaatgcatgatctgtggtaaggccttccggctccactctcaccttatccaacatcagcgtatccataccggtgaaaaaccctacgaatgcaaagaatgcggaaaggctttttcttatcacagcagcttctctcatcaccagcggattcactccgacgccaccactgctatttcctag

SEQ ID NO: 141469 - DNA, 1311 bp, synthetic construct
  misc_feature 1..1311: note = Description of Artificial Sequence: Synthetic coding sequence
  source 1..1311: mol_type = other DNA
atggaagagttcaaaagccattccccagagcggtccatcttctccgccatctgggaaggcaactgtcactttgagcagcatcagggccaggaggaaggatacttcaggcagctgatgataaaccatgagaatatgccgattttctctcagcatacactgctgactcaggaattctatgaccgcgagaagatcagtgaatgcaagaaatgtcggaaaatcttctcttaccatttattcttttctcaccataaacgcacccattccaaagaactgagtgagtgcaaggaatgtacagaaattgttaacaccccatgcttattcaaacagcagactattcaaaacggagataagtgcaacgagtgcaaggagtgctggaaagccttcgtccactgttcccagctgaagcacctccggatccacaatggcgaaaagagatatgagtgtaatgagtgcgggaaggcatttaactatggatccgagctaacactgcaccaacgcatccacactggagagaaaccttatgagtgcaaggaatgcggcaaagcattccggcagcgctctcaacttacccagcaccagaggcttcacactggagagaaaccctatgaatgcaaacagtgcggtaaggccttcattaggggatttcagctcacagagcatctgaggttacacacaggagagaagccctacgagtgcaaggagtgcggaaaaacttttcggcacagatctcacctgaccatccaccagcggatccataccggcgaaaaaccgtacgaatgccgggaatgtggcaaggctttcagttaccatagctccttttcccatcaccaaaagattcacagcggcaaaaaaccttacgagtgtcacgaatgcggaaaagctttttgtgacggcctccaacttactctgcatcaacggatccacacaggggagaagccttacgagtgcaaagaatgtggcaagaccttccgccagtgcagccatttgaagcggcaccaaagaatccatacgggggaaaaacctcacgaatgcatgatttgcggcaaggctttcagactccattctcacttaatccagcaccagcgtattcacacgggtgaaaaaccctacgaatgcaaagagtgtggcaaagccttctcctaccacagtagctttagtcatcatcagaggattcattctggtaagaagccttatcaatgtggaaaagcctttaaccaccggctgcagcttaacctccatcagaccctacacactggtgaaaagcctgtgcgattcccactactgcctcctcaccccagccttgccagctag

SEQ ID NO: 141470 - DNA, 1692 bp, synthetic construct
  misc_feature 1..1692: note = Description of Artificial Sequence: Synthetic coding sequence
  source 1..1692: mol_type = other DNA
atggctcacgagctggtgatgtttcgcgatgtggccattgacgtttcacaggaggagtgggagtgtctcaatccggcccagaggaatttatataaagaggtaatgctggaaaattactctaacctagtatccctgggactgtccgtaagtaaaccagccgtgatctcttcgttagagcagggcaaagagccatggatggtcgtgcgggaggagacggggaggtggtgccccgggacatggaagacttggggattccataataacttcctggataataacgaggcgacggacatcaatgcagacctggcttcacgggacgagccccagaagctctcaccaaaaagggatatttacgagacagaactgtcccaatgggtgaacatggaagaatttaagtcacactcaccagaacgctcaatcttttccgcaatctgggaaggcaactgccattttgagcagcaccaaggacaggaggaaggatattttcgccagttgatgatcaatcacgagaacatgcctatcttcagccagcacaccttgctgacccaggagttctatgacagggagaagatttcggagtgcaaaaaatgcagaaagatattctcttaccatctgtttttctctcatcataagcgaacccactccaaagagctgagcgaatgtaaggagtgtaccgagatcgttaacaccccatgtctgtttaaacagcaaaccattcagaacggagataaatgtaatgagtgcaaggaatgttggaaggccttcgtacactgctcgcaattgaagcatttacggattcacaatggcgaaaagaggtacgagtgcaatgagtgcggcaaggcctttaattatggctccgaactgacgctgcaccagcgtattcacaccggtgagaagccctacgagtgtaaggagtgcgggaaggccttcaggcagcggtcacagctgacccagcatcagagactacacactggggagaagccatacgagtgcaaacagtgcggcaaagcttttatccgggggttccagctaaccgaacacctgcggctgcacactggcgagaaaccctacgagtgcaaagagtgtggaaaaacctttaggcatcgatcacatctgacaattcaccagcggatccacaccggagaaaaaccctacgagtgtagggaatgcgggaaggcattctcataccatagctccttctcacaccaccagaaaatccacagcggtaagaagccgtatgagtgtcatgaatgtggcaaagccttctgcgatgggctacagttgactcttcatcagaggattcataccggcgagaaaccctacgagtgtaaagagtgtgggaagacttttcgccagtgctcccacctgaagcgacaccagaggatccacacaggcgagaagccacatgaatgtatgatatgtggcaaggcattcagactacacagccacctaatccagcatcaacggatccacactggcgaaaagccctatgaatgtaaagaatgcggtaaggcgttctcgtatcacagcagcttttcccatcaccagagaatccattcaggtaaaaagccctatcaatgtggtaaggccttcaatcatcgcctgcaattaaatttgcatcagacccttcacaccggagagaagccagtgcgattcccccttttgccacctcacccgtcattggcatcttag

SEQ ID NO: 141471 - DNA, 1788 bp, synthetic construct
  misc_feature 1..1788: note = Description of Artificial Sequence: Synthetic coding sequence
  source 1..1788: mol_type = other DNA
atgcgggagacactggaagccttaagtagcctgggctttagtgtaggtcaacccgagatggctccacagtctgaaccccgagaaggttcccacaatgctcaggagcaaatgagcagctctcgcgaagagagggcccttggcgtctgctcaggacacgaggccccaacgccagaagagggcgcacataccgagcaagcagaagctccgtgcagaggccaggcctgctctgcccagaaagctcaacctgtgggcacctgtccaggagaggaatggatgattcgcaaagtgaaagttgaagacgaggaccaagaagctgaggaggaagtggagtggccccaacatctgtcactcttaccctcgccttttcccgcccctgatctgggccatttagcagcagcttataagctggagccaggggcccctggggcactgtccggactagctctctcaggctggggcccaatgcctgagaagccctatggatgtggcgagtgcgagagacggttccgtgaccagcttaccctgagactgcaccagaggttgcaccgcggggagggtccctgtgcatgcccagactgcggcagatcattcacccagagagctcacatgctgctacatcagcggtcccataggggtgagcggccgttcccgtgcagcgaatgcgacaaacgatttagcaaaaaggcacacctgacacggcacctgagaactcacacaggagagagaccctacccgtgtgcagagtgcggcaagcgattttcccaaaagattcatctgggctcgcaccagaagacccatacaggagagcgaccttttccatgcacagaatgtgagaagcggtttcgcaagaagactcatctcattaggcatcagcgtatacacactggtgaacgcccataccaatgtgcgcagtgcgctcgctcttttacacataagcagcacttggtgcgtcaccaacgagtccatcagactgccggacctgcccgacctagcccagatagctccgcatctccacacagcacagctccctcgcccacgccttcctttcccggtcctaagccgttcgcctgctccgattgcgggctgtcattcggttggaaaaagaacctagctacgcatcaatgtttgcatcgcagcgaaggaaggcccttcggctgtgacgaatgcgcactcggcgctacagtggacgcccccgcagctaagcccttggcaagcgccccgggcggccctggatgtggtccgggttccgaccctgtcgttcctcagagagccccctccggtgagagatcattcttttgcccggactgcggaagaggtttctcccacgggcaacatctagctcggcatccacgcgtgcataccggggaaagacctttcgcctgcacccagtgcgataggaggttcggttcccgcccaaacctggttgctcacagcagggcccacagcggggctaggcctttcgcatgtgcacagtgtggcaggaggttttcacggaagtcccatttaggacgtcaccaggccgtccacactggctcaaggccccatgcctgtgctgtatgcgctcgatcgttttcttccaagactaacctggtcagacatcaggcaattcataccgggtctagaccatttagttgccctcagtgcggaaaaagtttcagtcgcaagacacatctagtaaggcatcaattgattcacggggaggccgcgcacgccgctcctgacgctgcactggccgcgccggcatggtcagcgccccctgaagtggcaccccctccactgtttttctag

SEQ ID NO: 141472 - DNA, 11778 bp, synthetic construct
  misc_feature 1..11778: note = Description of Artificial Sequence: Synthetic coding sequence
  source 1..11778: mol_type = other DNA
atgccgggcgagagaccaagaggggcgccacctcccaccatgactggggacctacagccgcgacaggtggcaagctcacctggacaccctagccagcctccactggaagacaatacgcccgctacacgcaccacaaaaggtgcccgggaagctggtggccaagcacaagccatggaactcccagaagcccagcctagacaggctagggacggcgagctgaagcccccttctctgcgcggtcaagcaccatcttctacacctggaaaacggggttcccctcaaaccccccccggccggagtccactgcaagcgccttctcggctcgccggtcgggcagaaggatcgccccctcagcggtatatccttgggatcgcaagctcccgaaccaagcctaccttagacgaaacacctgagaatccccagctggaagcagcccaacttcctgaggtagacaccccacagggacctgggaccggagctccactgcggcctgggttgccaaggacggaagcccagcctgccgctgaggagctgggattccataggtgcttccaggaaccaccctctagtttcacctccacaaattatacgagcccaagtgctactcctcgcccacctgcaccaggtccaccccagagcagggggacctctcccctgcagccagggtcttaccctgaataccaggcctcgggtgccgacagctggccgcccgctgccgagaactcgtttccgggagcgaactttggcgtgccacccgccgagccagaaccaatccccaagggctcccgccctggaggatcacccagaggcgtgagcttccagtttcccttccccgcactccacggggcaagcacaaagccttttccggccgacgtggccggccacgcatttacgaatggtccgctcgtattcgccttccatcaaccacagggcgcctggccagaagaggccgttggaaccggtcccgcctaccccctgccaacacaaccagcaccctcaccccttccatgttatcagggtcagcctgggggcctcaatcgccattccgacctgagcggtgccctaagctcccctggggctgcccatagcgctccaagaccgtttagcgattctctgcataagtcccttaccaagattctcccagagaggcccccctctgcacaggatggcttgggctccacccgcggccctccttccagcctaccccagagacactttcccggccaggcgtacagggcatcgggagttgatacctcccccggacccccagatactgagctcgcggctcccggaccccccccggcccgcctccctcagctttgggaccccacagcggcaccctaccccaccccccctggcggaccactggctgccactcgcagcatgtttttcaatgggcagccaagccctggccagaggctgtgcctcccccagagcgctccactgccgtggccacaggtgttgccgacagcgcgaccctcaccacacggcatggaaatgctcagccggctgcctttcccggccggcggcccagagtggcaggggggctctcaaggagctttgggcacggccggaaagactcctgggccacgtgaaaaactaccagccgtccgaagttctcaaggagggtcgccggccctattcacatacaacgggatgaccgatccgggagcccagccactgttttttggggtcgcccagcctcaggtatcgccccatggcactccaagtctcccccctcctcgggtggttggtgcaagccccagtgagtcccctcttccctctcctgcaaccaataccgctgggagcacatgtagctcattatcccccatgtcctccagccccgccaacccctcctccgaggaaagccaattgccaggaccattggggccaagcgcatttttccacccccctacccaccctcaagaaacgggatccccgttcccgagtcccgagcctcctcactccctgcctactcactaccagccagagcccgctaaagctttcccattccccgccgacgggctcggggctgaaggggcctttcagtgcctcgaggaaaccccgttcccgcacgaagggccagaggttggcaggggcggacttcagggatttccacgtgcacccccaccataccccactcatcacttctctctgagcagcgcctccctcgaccagctggacgtcctgctgacttgccgccagtgcgaccgaaactattctagcctggccgcgttcttggcccatcgtcagttctgtggactattgctagctagagctaaggacggtcatcagagatcccccgggcccccagggctcccctctcctccagcagccccacgggtgcccgcagatgcacacgcagggctgctgagccacgcaaagacttttctcctagccggggacgcccaggcagaaggaaaggatgatcctttgcgcaccggcttcctgccctcacttgcagcgacaccgtttcctctgcctgccagcgacttagacatggaggacgatgcaaagcttgatagcctcatcacggaggccctcaatggtatggaatatcagtcagataaccccgaaattgactcctccttcatcgatgtatttgcagacgaggaaccatccggccctagaggacctagcagcggacatcccctgaaatcaaaggcaggcgtaacaccagagagtaaggcacctcctccgctgccagctgccacgcccgaccctcagacaccacggcctggcgatagaggttgtcctgcaagggggcggccaaaaaccaggtcccttggactggcccctacggaggccgacgctccttcccagggcaggcaacagcgaaggggcaaacaattaaaattatttagaaaggacctcgacagtggtggggcagctgagggatccggttccggtggtggcggccgggcctccggactgcgtccacggcgcaatgatggcctgggcgaacgacccccccctagaccaagacgacctcggacccaggctcccgggtctcgggccgaccccgctccgcgggtgccccgagccgcagctctgcctgaggagacaagatcctcaaggaggcgccggctgccaccaaggaaagatccgcgcaagcgcaaggccagaggcggggcctgggggaaggagctgattctgaaaattgtacagcagaagaaccgtctgcgggaatacgattttgctagtgaatccgaggaagacgaacagcccccacctaggggtccgggctttcgcggaagaagaggcaggggagaaaagagaaaagaagtagagctgacacagggtcctcgggaggatgagccacagaaaccccgcaaagcggctcgtcaggaagcgggaggagacggagcacctgccaatcctgaagagcccggtggcagtaggccaggcccaggaaggtctcctcaagctcgcggtccatcccgatcactcgagaccggggctgccgcgagagagggcggacccaagtgcgctgatagaccttctgtcgcacctaaggatcctctgcaagtccccacgaacacagagacatccgaggaaacccgcccgtcattagacttccctcaggaagccaaggaacctgagacagcagaggagtcggctcccgatagcactgaatttacagaagccctcagaagtcccccggccgcctgtgctggggagatgggggccagccctggcttactgatacctgagcagcctccaccaagccggcacgatactgggacccctaagccctctggctcattggctaatactgctcctcatggaagctctcccactccgggcgtgggtagcctcttgggcggacctggaggcacccaagcaccagtatctcataatagtaaggatccccccgcgcggcagccgggggaatttctggccccagtcgcaaatcctagtagtactgcatgtccaaaacccagcgtactgtcctctaagattagttcctttggttgcgatcccgccggatttaatagggatcctctgggcgtacccgtcgcgaaaaagggcccccagccctactcgtcaccccactcggaattatttctcggcccaaaggatttagccggttgtttcttagaggagctgcatccaaagccgtccgctagggacgccccaccggctagctcctcatgcttatgccaggatggggaagacgcagggagtttggagccacagctgccacgatcaccccctgggacggcagagactgagcccgggcgggccgcgtcaccacctacactggaatcttccagcctgttccccgacctcccggtggacaggtttgacccacctttatacgggagcctttctgctaacagagacagtggcctaccattcgcatgtgccgacccccctcagaaaacggtcccgtctgaccccccctacccctcgtttcttttgctagaggaggtaagtcctatgttgccaagtcactttcccgacctgtcaggaggaaaggtgctgtccaaaacatgtcctcccgaacgcaccgtagtgccgggcgctgcgcccagtcttcccgggaagggttccgggtgcagtgtagctctgatgtcacacctctctgaggatgaattggagatacagaagctcgtcactgaactggaatcccaactgcagagatccaaggatactagaggagctcctcgggaattagccgaggccgaatcagtaggtagggtggaactcggtaccggcacagaacctccctctcaacggcgtacatgccaggccactgttccgcacgaggacacattctctgcggccgacctcaccagagtgggcgagtcaacggcacaccgggagggggccgagagcgctgttgcgacagtcgaggctgtgcagggcagaccgggcggcacctggccctgtccagcctctttccatcccgggcatgccgctcttctgccttgtgcccaggaagacctggtttctggcgccccgttctcgcctcgcggagccaattttcatttccaacctgtgcagaaggcaggcgccagtaaaacagggctgtgccaagcagagggagacagcagacctcctcaggacgtctgcctcccagagccctccaagcaaccaggacctcaactggacgcgggtagcctcgctaaatgtagtcctgatcaagagctgtcgttccctaagaataaggaagccgcctccagtcaggaaagcgaggacagcctgcgcttgctcccctgcgaacagcgcggaggttttctaccagaacccgggacggctgaccagcctcaccgcggggcaccggcgccagaagccttcgggtcaccagcagtgcacttagccccagacctcgctttccagggagacggtgcccccccgctagacgctacctggccttttggcgcatccccctcgcacgccgctcaggggcatagcgcaggccgtgcaggcggacatctgcaccccactgccggaaggcccgggttcgagggtaacgagttcgcacccgcaggagccagcagtctgaccgccccacgggggagggaggcgtggttggtgcctgtgcctagcccggcatgtgtaagcaacactcatcctagcaggaggagtcaggacccagcactgtcaccgcctatccgacagctgcaattgccgggtcccggagtcgcaaagagtaaggacggaattctgggactgcaggagctgaccccggctgcccagtcccccccgcgagtgaacccatcaggattggaagggggcacagtagagggcggcaaggtcgcctgcgggccagcccaaggctctcccgggggtgtacaagtgacgacgcttcctgcagtcgcagggcatcagctcggactagaggctgacggccattgggggctgctgggtcaggcagagaagacccagggacagggcaccgcgaaccaactgcaacctgagaatggcgtgtcaccaggtgggacggataaccatgcctctgtgaatgcatctccaaagaccgctctaacaggaccaactgagggggctgtcctgctcgagaaatgcaagggctctagggctgccatgagcctacaagaggaggctgaacctaccccatctcctccaagtcccaacagagaatccctcgcgctggcgcttactgccgcgcactctcgatcaggctctgaaggaaggacacctgagcgcgctagctcacccggcctgaataagccactcctcgccacaggggacagccctgccccaagcgtcggagaccttgctgcatgcgccccgtctcccacctctgcggctcatatgccgtgctctctcggccctttaccacgagaagacccgctgacctcgcctagcagggcccagggaggccttggcggccaactccccgcttctccaagctgtagggatcctccagggcctcagcagctgttggcatgttccccagcttgggcccccttagaggaagcagacggggtgcaggctacaacagacaccggtgccgaagattctcccgtggccccaccctcactgaccactagcccatgcgatccaaaagaggctctcgcaggatgccttttacagggagaagggagccccctcgaagaccccagctcctggccacccggctctgtgagcgctgtgacctgtacccattctggggacacgccaaaagattccacccttcgcattccagaggattcacggaaagaaaagctgtgggaaagtcctgggcgcgctacatcaccacccctggctggcgccgtaagcccgtccgtcgccgtgcgcgcgacaggtctatcgtccacaccaactggtgatgaagcccaggcaggcaggggtttgcccggtcccgacccacagagcagaggggcaccaccgcacacgaatccagatagaatgccccgcggtcattctagttacagcccttcaaacacggcacgattagggcacagagagggccaggcagtaactgctgtgccaactgagccgcctacactgcaaggtgccggcccggacagccctgcctgcctagagggcgaaatgggtactagctccaaggagcctgaagatccaggaactcccgagacgggcagaagcggtgcaaccaaaatgcctagggtcacttgcccgtctactggactggggttggggcgcacaactgctccctcttcaacagcctcggactttcagtccgattccccccagtcacatagaaatgcttcacaccagacgccccagggcgaccctctcggtccccaggacttaaaacagaggtctagaggttataaaaagaagccagcctccaccgaaaatggccagtggaaagggcaggctccccacggtccggtgacctgtgaggtatgcgcagcaagtttccgttccggaccagggctaagtcgccataaggcaagaaagcacagacctcacccaggtgcgccagccgagcccagtccagctgcactacccgcacagcaacccttggaaccgctggcgcagaaatgccagccgcctagaaaaaaaagccatcgggtgtcaggtaaggaaagacctaatcactcccggggcgacccatcccatgttacccagcccccccccgcacaggggtcaaaggaggtgctgagggcgcccggctcccctcattctcagcagctgcatcccccaagcccaacagaacatgaagtggacgtaaagactcctgcttctaaacctagaccagatcaggcccgggaggacgaactgcatcctaaacaggcagaaaaaagagagggccgccgctggcggcgtgaacccactgtagactcccctagtcattcggagggaaaaagcaataaaaaacgaggcaagctcagggggaggcggttgcgcgaggaaagcatcctgcccgtctccgcagacgtgataagtgatggcaggggatctagaccgtcaccagctatggctagctatgccgcgtcacccagccattgtctgagtgtggagggcgggcctgaggccgacggggaacagcctcctagacttgccactcttggccctggagtgatggagggcgcggcagagacagatcaggaggccctgtgcgctggcgaaaccggggcacagaagccacccggggatcggatgttatgcccaggccgcatggatggtgctgcattgggcgagcagcccaccggacaaaaaggcgcttccgccagaggcttttggggaccaagagagacgaaagcactcggggtctgcaaggagtccggcagcgaacccgcagaggattcttctcgtgcccacagcagaagcgaagagggtgtgtgggaagagaataccccccccctgggtcccctggggttccccgaaacctctagtagtcctgccgactcaacgaccagttcttgcctgcagggtctgcctgataatcccgacactcagggaggggtgcaaggtcccgaagggccaacacccgacgcttcagggagctctgcaaaggatccaccttcactgttcgacgacgaggtttcattctcccagcttttccctcccggtgggaggctgacacgcaagagaaacccccacgtttacggtaagcgctgcgaaaagcctgtgttaccgctgccaactcagccatcattcgaggagggcggagacccaacattaggtcccgcgcggctgcccacggacctctccgacagctccagcttgtgcctgtgtcatgaagacccttgggaggatgaggaccccgccggtcttcctgaatcatttctactggacgggttcttaaatagtcgagttcccggaattgacccttgggcccccggtctgtcactttgggccttggagcccagccgggaggcaggggcggaaaagcttcctagccattgcccagaggacgatagacccgaggccatcccagagttgcacatggttcccgccgcttggcggggtctagaaatgcctgcccctgcggacgacagttcgtctagtctcggagacgtgtctccagagccaccttctctggagagagagaggtgtgatggaggactgcccggcaacactcacctgctgccactccgggccactgacttcgaggtgttgtcgactaagttcgagatgcaagatctctgtttcctgggcccattcgaggatccagtgggattgccgggcccatccttcctcgattttgagggcaccgcgtccagtcagggcccccagtccaggaggacagaagaggcagccggggcggggagggcgcagggacgcggccggccggcgaaggggcgtagggcatcgtacaaatgcaaagtttgcttccagagatttcggagcctgggcgagcttgacttgcataaactggcacacactccagctccccctccaacttgctacatgtgtgtggaaagacgcttcggcagcagagagctactgcggggccacctgcaggaaagacatgcgcaaagcaaggccggaccatgggcttgcggtatgtgtctcaaagaggtggcggatgtctggatgtataacgagcatctgagagagcacgccgtgagatttgcacgccgaggccaggctagacgaagcctgggcgatctacctgggggactcgagggctcatctgccgtagcccacctgttgaacagtattacagaacccgcgcctaagcaccacaggggaaaacgctcagccggaaaagctgcgggatccccaggtgatccctggggtcaagagggcgaggcgaaaaaggattcccccggggaaagagccaaaccaagagccagaagtactccgtccaaccctgacggagctgcaacccccgactctgcctctgcgactgcacttgcagacgcgggatctcccggaccaccgcggaccacgcctagtcctagtccagacccatgggcaggaggtgaacctcttcttcaggcaactcccgttcacgaagcttgtaaagatccttcaagagactgccaccattgcggaaagaggttccctaagcctttcaaactccagcggcatctcgcagtacactcaccacaaagagtgtacctttgccctcgctgcccacgtgtataccctgaacatggagaactactcgctcatctgggcggagctcatggtctgttagagcggcctgagctgcagcacacccccttgtacgcatgcgaactgtgtgccaccgtgatgaggattatcaaaaaaagcttcgcatgcagttcatgcaactacaccttcgctaagaaagagcagtttgaccggcacatgaataaacacctaagagggggtcgccaaccattcgcattcagaggagtacggcgtcctggagcacctggtcagaaagcccgagccttggagggaactctccccagtaagcgccgtcgagtcgccatgcctggcagcgcaccggggcctggtgaggacaggcccccccctcgagggtcatccccaatactgagcgagggcagtctcccagccctgctgcatttatgctctgaagttgctccctctacaaccaagggttggccagagacactagaacggcctgtggaccctgttacgcaccctataagaggatgtgaactaccaagtaaccaccaagagtgccctccccccagcctgagtccgttcccggctgcgctagcagacggtaggggcgactgtgccttggacggagccctggaaagaccagagaacgaagcatcccctggcagccctggcccgctcctgcagcaggctcttcccctcggcgcctccttgccccgcccaggagctagaggacaagatgccgagggcaagcgggcccctctggtgttttcaggcaagagaagggccccaggcgcacgaggtcggtgcgcgcctgatcatttccaggaagaccacctcctgcagaaggagaaagaggtgtcaagcagccacatggtgtctgaaggaggtcccagagggactttccacaaggggtccgccactaagcccgcggggtgtcagagcagcagtaaggatcgctcagctgccagcaccccttccaaggccctgaagttcccggtccatcccaggaaagccgtggggagcctggcccctggcgagctggccagggggaccgagaacggcatgaagccagcaacccctaaggcaaaaccaggcccctcctctcaaggatccggcagtccgcgcccggggactaaaactggcggcggcagtcagccccagccagccagcggtcagcttcagtcagaaaccgctaccacacccgctaagccatcctttccatccaggagcccggcccccgagcgcctgcctgcaagggctcaggctaaatcctgtactaagggtccccgggaggctggggaacaggggccgcatggcagtctcgggcctaaggagaagggtgagtcgtctaccaagcggaaaaaagggcaggttcccggcccagctaggtccgagtctgtcggttcctttggccgcgcccccagcgcaccagacaagccacctcgcacaccgcggaagcaggcgactccttcacgggtccttcccacaaaacctaagcctaacagtcagaacaaaccaaggccccccccctctgagcagaggaaagccgagccgggccatacacagagaaaggaccgactcggaaaagctttcccgcagggccggccattgcttaggccacctaagagagggacggccgttcacggagccgagcctgctgaaccccacactcatcgcaccgccgaggcacagtccgatttattgtcccagctgttcgggcagcgcctgacgggtttcaagatccccctcaaaaaggacgcttctgaatag

SEQ ID NO: 141473 - DNA, 1479 bp, synthetic construct
  misc_feature 1..1479: note = Description of Artificial Sequence: Synthetic coding sequence
  source 1..1479: mol_type = other DNA
atgctttgtgacgagaaagcccagaagaggaggaagcggaaggcgaaagagtccggaatggctctcccacagggccatctcacttttagagacgtggccattgagttttcccaggccgaatggaaatgtcttgacccagctcagcgtgccttatacaaggacgtgatgctggaaaattacaggaatctcgtgagtcttggctcgtcctatgctctgggcagtaacgccgaagataagcctatcaaaaagcaactcggtgtctcttttcacttacatctgagcgagctggagctgtttcctgacgagagagtcattaacggctgcaatcaggtggagaatttcatcaaccattcctcctcagtatcttgcctgcaggaaatgtcttcctcagtgaaaaccccaatctttaaccgaaatgattttgatgactcctccttcctaccccaggagcaaaaagtgcaccttcgagagaagccatacgaatgtaacgagcatagcaaggtgttccgggtttcgagttcccttaccaagcaccaggttatccacacggtcgagaaaccctacaaatgcaactcttgtggaaaggtgttctctcggaactcacacctggcggagcattgtaggattcacaccggggagaaaccctataagtgtaatgtgtgcggtaaagtgttctcgtataattctaattttgcaagacaccagagaatccatacccgcgagaagccatacgaatgtaatgagtgtggcaaggtgtttagtaacaattcctatctggcgcgacaccagcgcatccatgctgaagagaagccatataagtgcaacgagtgcggcaagggtttttctcataagtcctccttagctaaccactggagaatctatacaggagaaaagccatacaaatgtgacgaatgcgggaaagcgttttaccgaatcgctctattagtgcgccaccagaagattcacaccggagaaaaaccttataagtgcaatgaatgcggaaaggtgtttatacagaactctcacctggcgcagcactggagaatccacaccggggagaaaccctacaagtgcaatgagtgcggaaaggtgttcaatcagctcagcaatttggctcgacatcgacggatccataccggcgagaaaccttacaagtgcaatgagtgtggcaaagccttctcagagtatagtggactcagcgctcatttggtgatccatactggggagaagccttacaagtgtagcgagtgtggcaaagctttcaggcataaactgagcctcacaaatcaccagcggatccacactggcgaacgcccatacaaatgcaacgagtgcggaaaagtattcaatcgcatcgcccacctggccaggcatcgaaagattcacaccggtgaaaaaccgtataaatgcaacgaatgcggcaaagcattttcccgcatcagttatctagcgcagcactggacgatccacatgggctag

SEQ ID NO: 141474 - DNA, 1377 bp, synthetic construct
  misc_feature 1..1377: note = Description of Artificial Sequence: Synthetic coding sequence
  source 1..1377: mol_type = other DNA
atgctggaacagcgccgcgaaccctggtccggggaatctgaagttaagattgctaagaacagcgacgggagggaatgtataaagggcgtcaatactggtagcagctatgcgttagggtctaacgcagaagacaagcccatcaaaaaacagttaggggtctcttttcacttgcacctgagcgagttggaactgttccccgatgagcgcgtcattaacggctgtaatcaagtcgagaattttataaaccattccagcagtgtttcctgtctgcaggaaatgtcatcatccgtcaaaaccccgattttcaatcgcaatgattttgacgactcttcctttttacctcaggagcagaaagtgcatctccgcgaaaagccctatgaatgcaacgagcatagcaaagttttcagggtttccagctctctgaccaaacaccaggtcatacatactgtcgagaagccctataaatgcaattcctgcggaaaggtgttcagccggaacagccacctggccgagcactgccgtatccacacgggggagaaaccttacaaatgtaatgtgtgcgggaaggtattcagctacaattctaatttcgccagacaccagagaatacacactcgggagaagccctacgaatgcaacgaatgcggaaaagtcttctctaacaacagctaccttgctcggcatcagcgtattcatgcggaggaaaagccatataagtgtaatgagtgcggcaaaggtttcagccataagtctagcctagcaaaccactggcggatctacacaggagaaaagccctacaaatgcgacgaatgcggaaaagcgttctacaggatcgccctcttagtgagacaccagaagatccataccggggagaagccatacaagtgcaacgagtgtgggaaggttttcatccagaactctcacctggcccagcattggcgtattcataccggcgaaaagccctataagtgcaatgaatgtggcaaagttttcaaccagctgtctaacctggcccggcaccgaagaattcacaccggagagaaaccctataaatgtaacgagtgtgggaaagccttttcagaatactccgggctctccgcccacctggttatccataccggggagaagccttataagtgctccgagtgtgggaaagccttccgccataagctgagcctcaccaatcaccagagaatccatacaggggaaagaccttataagtgtaacgagtgcggcaaagtattcaatcgaatcgctcacctggcccgccatcgcaagatccatacaggcgagaagccatataagtgcaacgagtgcgggaaggctttcagtagaatatcttacctggctcaacactggacaatccatatggggtag

SEQ ID NO: 141475 - DNA, 537 bp, synthetic construct
  misc_feature 1..537: note = Description of Artificial Sequence: Synthetic coding sequence
  source 1..537: mol_type = other DNA
ttcccccagaccaggaaaagaattgcgtggtcagaggggcacgctgccgcgcggctgacatccaaggagagttgctgcgagaaggcccagaagaggaggaaaagaaaagctaaagagagcggaatggcgttaccacagggacacttaacgttccgggacgttgcaatcgagtttagtcaagccgaatggaaatgcctcgaccccgcacaaagagctctgtacaaagatgtcatgttagagaattacaggaacctagtgtctctcggcattagcttgcctgatttaaatatcaactccatgttggaacagagaagggagccttggagcggtgagagtgaggtaaaaatagccaagaactcagacggtagggaatgtatcaagggagtcaatacaggatcaagctatgcactgggctcaaacgctgaagataaaccaattaaaaaacagctgggcgtcagtttccatctccacctttctgagcttgagctgttcccagacgaacgcgtgattaatgggtgcaaccaggtggagaattag

SEQ ID NO: 141476 - DNA, 1608 bp, synthetic construct
  misc_feature 1..1608: note = Description of Artificial Sequence: Synthetic coding sequence
  source 1..1608: mol_type = other DNA
atgctgtgcgatgaaaaggcacagaagcgcagaaagcgcaaggccaaggaaagcggtatggctcttcctcaggggcatctgacctttcgggacgtggctatcgagttttctcaggctgaatggaagtgtcttgacccagcacagcgagccctgtataaggacgtcatgctggagaattacaggaacctggtctctctaggaataagtttacctgatcttaacatcaatagtatgcttgagcagagaagagaaccatggtcgggtgagtcagaagtgaaaatcgccaagaacagtgacgggcgagagtgtatcaaaggtgtaaacactggaagctcttacgccctggggtctaatgctgaggataaaccaataaagaagcagttgggggtgtcatttcacctccacctgagtgagctggagctgttccctgatgaacgtgttatcaacggctgtaatcaggtggaaaatttcattaaccatagtagctcagtgtcgtgcctgcaggagatgtctagcagcgtcaagaccccaatcttcaacaggaatgactttgacgactcaagttttctgccccaggagcagaaggtccaccttagggagaaaccctacgaatgtaacgaacactcaaaagtctttcgggttagctcatcgctgacaaagcaccaagttatccatacggttgaaaaaccttataaatgcaactcttgcgggaaagtttttagcagaaatagccatcttgctgagcactgcagaatccatactggagagaagccctataaatgcaacgtgtgcggcaaggtcttctcatacaattcaaactttgcccggcatcaaagaatacatacacgtgaaaagccatacgagtgtaatgagtgtggaaaggttttctccaataatagctatctggcccgtcatcagcgtattcacgccgaggaaaaaccttataaatgcaatgagtgtggaaagggctttagtcataagtcgagcctcgccaatcactggcggatttatacgggtgagaaaccatataagtgtgacgagtgcggaaaggccttctaccgaattgccctgctcgttcggcaccagaagattcacaccggtgagaagccctataaatgtaatgagtgtggtaaagtgtttattcagaacagtcacttggctcaacattggaggatccacacaggcgaaaagccctacaagtgtaacgaatgcggcaaagtgtttaaccagctgagcaacctcgcacgtcacaggcggattcacactggtgagaaaccctataagtgtaacgagtgcggtaaagcgtttagcgagtatagtggattgagtgctcacctggtgatccacacaggtgagaagccctacaaatgctctgagtgtggaaaagcattcaggcataagctttcgctgactaatcaccaacgcattcacactggagagcgcccgtacaagtgtaatgagtgcggcaaggttttcaaccggattgcacaccttgcccgccatagaaagatacatactggcgagaaaccatacaagtgtaatgagtgcggaaaggcttttagccgtatctcctaccttgcgcagcactggactattcatatggggtag

SEQ ID NO: 141477 - DNA, 1608 bp, synthetic construct
  misc_feature 1..1608: note = Description of Artificial Sequence: Synthetic coding sequence
  source 1..1608: mol_type = other DNA
atgctctgcgatgagaaggcccagaagaggcgaaagcggaaggctaaagagtcaggcatggccctcccacagggacaccttacctttcgagacgtggccatagaattttcacaggccgagtggaagtgcctggacccagcccaaagagctctgtataaagacgtcatgctggagaactaccgcaacctggtctcacttggaatctctctgcccgatttaaatattaatagcatgctggagcagcgccgagaaccatggtctggtgaaagtgaggtgaagatcgccaaaaattctgatggaagggagtgcatcaaaggcgtgaacaccggatcatcttacgcactcgggtctaatgccgaagacaaacccattaaaaaacagctcggcgtgtcattccatcttcatctgagcgagctggagctgtttcctgatgagcgggtgatcaatgggtgcaaccaagtggagaattttattaatcactcgtctagcgtgtcctgtctgcaggagatgagctccagtgtgaagactcccatttttaatcgcaatgatttcgatgacagcagcttccttccccaagagcaaaaagtgcatcttcgggaaaagccttacgaatgcaacgagcactctaaggtcttccgggtctcgtcaagccttaccaagcatcaggtgatacacactgtggaaaagccatacaaatgtaactcatgcgggaaggtattttcccgcaactcacatctggccgagcactgccgcattcatactggcgagaagccatacaagtgtaatgtgtgcggaaaggtgttttcctataactccaactttgcacggcatcaacggatccacacacgggaaaagccctacgaatgcaacgaatgcggcaaggttttctccaataattcgtatctcgcacgccaccaacgcattcacgccgaagaaaaaccttacaagtgtaatgagtgtggcaagggattctctcacaagtctagtctggccaatcactggagaatttacacaggggagaagccttataagtgcgacgagtgtggaaaggctttctatcggatcgcccttcttgttcgccaccagaaaatccacacaggggagaaaccttacaaatgcaatgagtgtggcaaggtgtttatccagaactctcatcttgcacagcactggaggatccacacaggggagaaaccttacaaatgcaacgagtgtggaaaggtatttaatcagttaagcaatctggctcgccacaggcgcatacacaccggcgagaaaccttataagtgcaatgaatgcgggaaggccttctccgaatattccggcctgagcgcccacctggtcattcatactggggaaaaaccctataagtgctcagagtgtggcaaggcctttcgccacaagttaagcctgacaaatcaccagcggatccatactggggaacgaccctacaaatgcaatgaatgcggaaaggtcttcaatagaatcgcccacctcgctcgacatcgtaaaatacacactggagagaagccctacaagtgcaacgaatgcgggaaagctttttctcggatctcctatcttgcccagcactggaccattcatatgggctag

SEQ ID NO: 141478 - DNA, 1764 bp, synthetic construct
  misc_feature 1..1764: note = Description of Artificial Sequence: Synthetic coding sequence
  source 1..1764: mol_type = other DNA
atgcctacagccctatgcccgcgagtgctggcccctaaggaatctgaagagccacgaaaaatgagatctcccccgggggagaacccgagcccacaaggggagttaccttccccagaatcatcacgacgtctgttccgtaggttccgataccaagaagctgctggcccccgggaggctctgcagaggctgtgggacctgtgcggaggctggttgcgcccggagagacacacaaaagaacagatcctggagttgctagttctcgagcagttccttgccatcctgccgagggaaatccagtcctgggtgcgtgctcaggaacccgagagtggagagcaggcggtcgcagcagtggaggccctagagagagagcccggacgcccctggcagtggctgaagcactgcgaagaccctgtggtgatagacgacggtgattctcccctcgatcaagagcaagaacagctgccagtcgagccacactcagacttagctaagaaccaagacgctcagcctatcacactggcacaatgtttagggcttccgagccggcccccttcccagcttagcggagaccccgttctccaggatgcattccttctgcaagaagagaacgtgagggatacacagcaggtgaccaccctgcagctgccgccctccagagtttccccattcaaagacatgattctgtgcttttcagaggaggattggtcccttctggaccccgcacagaccggattctacggggaatttataatcggagaggactacggggtgtccatgccacccaacgatttagcagcacaacctgatctgtctcaaggtgaagaaaatgaaccccgcgttcctgagttgcaggatttgcaggggaaggaggttccccaggtatcctacctggatagcccttctctgcaacctttccaagtagaagaacgaagaaagcgagaagagctccaggttcccgagtttcaggcatgtccacagactgtggtcccacaaaatacataccctgccgggggaaaccccagatccctggagaactcccttgacgaggaggttaccatcgagatcgtgcttagctcttctggagatgaggactcacaacatggaccatattgcactgaggagttgggttccccgacagagaagcagcggtccctcccagctagccatcgctcttccaccgaggccgggggcgaggtacagacctcaaaaaaatcctacgtgtgcccaaattgcggaaagattttcagatggcgtgtgaatttcattagacacctccgaagtcgaagagagcaagagaaaccgcatgaatgttccgtgtgtggcgagctgttttccgactccgaggacctggacggtcacctggagagtcacgaggctcagaaaccttaccggtgtggagcctgcggaaagagtttccggcttaacagccaccttctgtctcaccgcagaattcatttgcagcccgacaggcttcaacccgtggagaagcgtgagcaagctgcatctgaggatgccgacaagggccctaaggagccccttgaaaatggaaaggccaagttgtcatttcagtgttgtgaatgtggcaaagcatttcaacggcacgaccatctggctaggcaccgtagtcactttcatttaaaagataaggcccggccatttcagtgtcgatactgtgttaagagctttactcaaaactacgacttactgcgccacgagaggctgcatatgaagcgccgcagtaaacaagctctgaattcttactag

SEQ ID NO: 141479 - DNA, 1872 bp, synthetic construct
  misc_feature 1..1872: note = Description of Artificial Sequence: Synthetic coding sequence
  source 1..1872: mol_type = other DNA
atgcctacagccctgtgtccccgcgtgttagctcctaaagaatcggaagaaccacgcaagatgcgaagcccacctggtgagaatccgtcaccgcagggggaacttccctcaccagaatccagtcgcaggctttttaggcgattccgttaccaagaagctgccgggcctcgggaggcgttgcaacgactgtgggatctttgtggtggctggctgcgcccagagcggcacactaaagagcagatattggagctcttggtgctggaacagtttctggccatactcccaagggaaattcagtcctgggtccgcgcacaagagccagagagtggcgagcaggcggtcgccgccgtcgaggctttagagcgggagccaggaaggccctggcagtggctgaaacattgtgaggacccagtagtaattgatgacggggacagtccgctggatcaagagcaggaacagctcccggtggagccccacagcgacctggctaagaatcaggatgcccagccaataacactcgcacagtgcctcggcctgccgtctcgccctccaagtcagctgtccggggatccagttctccaagatgcattcctgttgcaggaggagaatgtccgcgacacccagcaggtgacgacactgcaactgcctccacgcattttccaatttaataatcaccggagcaatgggtacatcctggaaatgctcggttccggcggcaaaaaagctcagattatctcagtgctgtcccagatctacgtgtcacgcgtgagtccttttaaggatatgatcctgtgcttttcagaagaagactggtctctgctcgatcccgctcagaccggcttttacggcgagttcatcattggtgaggactacggggttagcatgccacctaatgatctggctgctcaaccggacctatcacaaggtgaggagaacgagcctcgtgttcctgagctgcaggacctgcagggtaaagaggtgccccaagttagctacctggactcacccagtctgcagccttttcaggtggaagaacggcggaaacgcgaagagctgcaggtcccagaatttcaggcatgcccgcagacggtagttccgcagaacacatatccagcaggaggaaacccccgatcactggagaactcccttgacgaggaagtaactatcgagattgtactttcctcatccggcgatgaggacagccagcacggtccatactgcactgaagaactcggatcccctaccgagaaacaacgcagcttaccagcaagccaccgcagctccacagaggcaggcggggaggtgcagacaagtaagaagtcctatgtatgtccaaattgtggaaaaatttttcgttggcgcgtgaacttcattcggcacttacgctcacgtagggaacaggagaaaccccacgaatgttctgtctgcggagaactattttctgattccgaggacctcgatgggcatctcgagagccacgaggcgcagaagccgtatcggtgtggagcatgcggcaagagtttcagactcaactcccacctccttagccaccgccgcatccacctgcagcctgatcgactccagcccgtggaaaagcgagaacaggctgcgtctgaggatgcggacaaaggccctaaagagcctctggagaatgggaaagcaaagctgtcctttcagtgttgtgagtgcggtaaggccttccagaggcacgaccacctcgcccgccacagatcccacttccatctcaaggataaggctaggccttttcagtgccgctactgtgtgaagtcgttcactcaaaactatgatctcctgagacacgagaggctccacatgaaacggaggtcaaaacaggcactcaatagctactag

SEQ ID NO: 141480 - DNA, 1830 bp, synthetic construct
  misc_feature 1..1830: note = Description of Artificial Sequence: Synthetic coding sequence
  source 1..1830: mol_type = other DNA
atgtcaaccgccccgagtttatccgccctgcgtagcagcaaacattcgggcggaggcggcgggggcgggggcggcggtggagctgatccagcatggacttcagccctgagtgggaatagcagtgggcccgggcccggatcttctccggcgggctcaaccaagccttttgtgcacgccgtcccaccgagcgaccctctgcgccaggccaatcggctcccaataaaggttttaaaaatgcttaccgcccggaccggacatatccttcacccggagtatttgcagcccttaccaagcaccccagttagccctattgagcttgacgccaaaaaatctccccttgcgttactggcccagacttgttctcagatcgggaagcctgaccctagtccatctagcaaactgagtagcgtcgcatctaatggaggcggtgccgggggggctgggggaggcgctgccggcgataaggacactaaaagtgggcccttgaagctcagcgatattggggtagaggacaagtcaagtttcaaaccgtattccaagccgggaagcgacaaaaaggagcccggcgggggtgggggcggcggcggagggggtggggggggcggcgggggtgtgagtagtgaaaagtcaggatttcgagttccctcagccacatgccagccttttacgccccggactggatctccatcttcaagcgcttctgccgaaggaggccccaccggcttggcccatggccgcatcagctgcggaggtggtatcaacgtcgatgtaaaccagcatccagatgggggccccgggggtaaagccttaggctcggattgcggagggagcagtgggtctagcagtgggtcgggtccttcagcacctacgtcatcaagcgtgcttggctcaggactcgtagcgccagtgagcccttacaagcccggtcagaccgtatttcctcttcctcccgcagggatgacctaccccggctctctcgccggggcatacgccggctatcccccccagtttctcccccacggagtggcactggatcctactaagcccgggtcattggtcggcgcacagctggcagctgccgctgccggctccctgggctgctcaaaaccggctggaagctccccattagccggcgccagcccaccgtctgtcatgaccgcctcactgtgcagagacccctattgtttgtcatatcattgtgctagtcatttggccggagccgccgctgctagcgcaagttgcgcccacgaccctgccgccgctgcagctgcactgaagtctggctaccccctggtgtacccaacgcacccattgcatggagtgcatagttcactgaccgccgccgcggccgctggagcgacgccccccagccttgcaggccacccactttatccttacgggtttatgcttccaaatgacccgctgccgcacatctgcaattgggtttcagccaatggaccatgcgacaaaaggtttgcaactagtgaagagctcctctcacacctgagaacccatacagcctttcccgggactgataaacttctgagtggctacccttcaagtagctcactggccagtgcagctgcggctgccatggcttgccatatgcatatccctacaagcggtgcacctgggagcccgggtaccctggctctgcgctctcctcaccatgccctgggtctgtccagccgttaccacccctacagtaaatcccccttgccaacccctggagcccctgtcccggtgccagcagctacggggccctactactctccctatgcactgtatggacagaggctcaccacggcctctgccctggggtaccaatag

SEQ ID NO: 141481 - DNA, 1941 bp, synthetic construct
  misc_feature 1..1941: note = Description of Artificial Sequence: Synthetic coding sequence
  source 1..1941: mol_type = other DNA
atgtcaacagccccctctctcagtgcactgcggagcagcaagcatagcggcggaggtggaggcggcgggggtggcggcggtgccgatcccgcctggacttccgcactctctggcaacagctccggccccggtccggggtctagccctgccggctctaccaaacctttcgtgcatgccgtgccgccatccgatccgctgcgccaggctaatcgactgccaatcaaagtgctgaagatgctgacggcaaggactggccacattcttcacccggaatacttgcaacccctcccgtctacacccgtaagccccatcgagttggatgcaaagaaatcacccctggccctgcttgcgcagacctgttcccagattggtaagcccgacccttccccatccagtaaactttcctccgtggccagcaacggcggcggcgcggggggggctgggggaggggcggctggagataaggatacaaaatcggggcctctgaaactgtccgacattggagtcgaagataagtctagtttcaaaccatactccaagccgggatccgataaaaaagagcccggcgggggcgggggcgggggaggaggcggaggcggtggtggcggaggtgtgagctctgaaaagagcggcttcagggttcctagtgccacatgccagccctttactcctcggaccggctccccatccagttccgcaagcgcatgttcgccagggggtatgctgtcatccgccggtggcgctcccgaaggcaaagacgacaagaaggacacagatgtcggcggtggaggcaagggtacaggcggtgcctccgcagaggggggccctaccggactggcacatggaagaatttcttgtggggggggtataaatgtggacgtgaaccaacaccccgacggaggccctggcggaaaagcccttggctctgactgtggagggtcctcagggtcctccagtgggtctgggcctagtgctcctacatcatcatctgtgctgggttccggtcttgtcgcacctgtctccccttacaaacctggacagacagttttccccctgccacccgccggaatgacttaccctggatcgctcgccggagcctatgctggataccccccccagttcctcccccatggcgttgctctcgatcctactaagcccggtagtctcgtcggtgcgcagctggccgcggccgccgctggttccttgggttgctctaagcctgcgggctcttcacccctggccggcgctagcccacccagcgtgatgacggcctccctttgtagggacccgtattgcttaagttaccactgcgcaagtcacttagccggtgcggctgccgcctctgccagctgtgcccacgaccctgcagccgccgcggcagccctgaagtccggataccccttggtgtaccccacacacccattgcatggagtacactcctcacttacagcagccgccgccgcgggagctaccccgccctcattagcagggcaccctctgtatccttacggattcatgcttcccaatgaccccttaccccacatatgcaactgggtgtcggctaatggcccttgtgacaagcgattcgccacatccgaagaactgttatcccacctccggacacacactgcattccctggtacagacaagctgctctcgggatacccctccagttcctctctcgctagcgcagccgccgcagccatggcttgtcacatgcacataccgacatcaggggcacccggttccccaggaactctggcccttagatccccacaccatgccctaggactctcatccagatatcacccatactcaaagtcccccctaccaacccccggagcgcccgtcccagtccctgctgctactggcccgtattattctccatatgcgctctatggacagcggttgaccaccgcctccgctctgggatatcagtag

SEQ ID NO: 141482 - DNA, 1941 bp, synthetic construct
  misc_feature 1..1941: note = Description of Artificial Sequence: Synthetic coding sequence
  source 1..1941: mol_type = other DNA
atgagcacagccccgtctctctccgctcttcggtccagtaaacatagcggtggcggcggcggcggggggggcggcggaggcgccgacccagcctggaccagcgccctgtctggcaactcatcggggcctggacctggttcctctccggcaggaagtaccaagccattcgtgcacgcagtgcccccatccgaccccctcagacaggctaatcggctcccgattaaagttcttaagatgctcactgccagaacgggccacatcctccatcctgaatacctccaacctttgccatctacacctgtatcacctatcgagctggacgccaaaaagtctcctttagcgctgttggctcaaacgtgcagtcagatcggtaagcccgacccgagccctagctcaaaactgagttcggtggcatccaacgggggcggtgctggaggggctggcggtggggccgcaggtgacaaagacacaaaaagcggccctctgaaactctccgatatcggcgttgaagataagtcctctttcaagccgtacagcaaacctggatccgataagaaggaacccggcggcggcggtgggggggggggcggcggcggaggcgggggtggcggcgtgtcttccgagaagtccggatttagagtgccctccgctacatgccagcctttcacaccaagaactggtagcccctcaagcagcgcttctgcctgtagccccggtggaatgctctctagcgcgggtggcgcccccgaaggtaaggacgataagaaagatactgacgttggcggtggtggcaaaggtaccggcggcgcaagcgctgaaggtggccctacaggccttgctcatggcaggatctcctgtggggggggcattaatgtggatgtaaaccagcacccagatggtggccctggaggcaaggcacttggatcagactgtggtggcagctctggatcgagtagcgggtcaggcccaagcgctccaacttctagcagcgtacttgggagcggtctcgtggctcctgtctcaccatacaaaccagggcaaactgtattccccctccccccagcaggcatgacatacccaggctccctcgccggagcctatgctggctacccccctcagtttcttccccatggggttgctctcgaccccacaaaacctggcagcctggtcggggcgcaactcgcagccgcggccgctggctcactaggttgtagcaaacctgctggatcctcaccgctggctggtgctagtcccccctccgttatgaccgcttcactttgcagagatccttattgcctatcttaccattgtgcgagccacctggccggtgctgcagctgcttcagcttcctgtgcccacgatcctgccgctgcggcagctgccctgaagtccgggtaccccttagtttacccaactcaccccctccatggtgtccactccagtctaaccgcagccgccgctgccggggctacgccaccgagcttagccggtcatcctctttacccctacgggttcatgctacccaacgatcctttgccacacatttgcaattgggtgtctgcgaacggtccctgcgataagcgatttgctacatcagaagagctgctttcacacctgcggacccataccgcattcccaggaaccgacaaactgctgtcagggtacccgagcagcagcagcctcgcttccgcagccgctgccgctatggcgtgccatatgcacatccctacgtcgggcgcacctggatctccaggaacattagctttacgatccccgcaccatgcgctgggcctgagctccaggtaccacccctactctaagtccccattaccaactcctggcgctcctgtgcccgtccctgctgctacagggccctactattctccttatgccctgtacggccagagactgactacggcatcagccctgggctatcagtag

SEQ ID NO: 141483 - DNA, 1626 bp, synthetic construct
  misc_feature 1..1626: note = Description of Artificial Sequence: Synthetic coding sequence
  source 1..1626: mol_type = other DNA
atgcctcggagaaagcagtcacaccctcaacctgttaaatgcgagggagtcaaggtcgatacagaggacagtctggatgaagggcctggagctctggtactcgaaagtgatctgttactgggtcaagatctggaatttgaagaggaagaggaggaggaagagggggatggtaatagcgaccaattgatggggttcgagcgggactccgagggagacagtctcggggctagacccggtctgccttacggactcagtgatgacgaatccggaggcggcagggcgctgtcggctgagtccgaggtagaggagccagcccgcgggccaggagaggcacgcggagaacgccctggacccgcatgccagctgtgtggaggcccgaccggcgagggtccttgttgtggtgctggtggccctggcggcggccctttgctgcctccccgccttctctacagttgccgcctatgtaccttcgtaagccattacagtagccatttaaaaagacatatgcagacccatagtggcgaaaagccgtttaggtgcggaagatgtccgtacgctagcgctcagctggtgaacctgacccgccatacgcggacacacaccggtgagaaaccttacaggtgccctcactgtccatttgcctgctcatcactgggaaacttaaggcgccaccaacggacgcatgcgggccccccaacaccaccatgccccacttgcgggttccggtgttgcacgccacggcctgctcggcccccctctcccacagaacaggagggtgcggttcccagacgaccagaggatgctctgcttctccccgacctcagcctccacgttccccccggcggcgcgtcgtttctcccagattgcggccaactgcggggcgagggcgaaggattgtgtggtactggctctgaaccattacctgaactgctctttccttggacatgtagaggatgtggacaagagctggaggaaggagaggggagtaggctgggagcggcaatgtgcggacgctgcatgagaggcgaagctggaggcggcgcatctggcgggccccagggcccttctgacaaaggcttcgcatgttctctgtgcccatttgcgactcattatccaaatcacctagcccggcacatgaaaactcactcgggcgaaaagccgtttcgttgtgcaagatgtccgtatgcatctgctcatctggataacctgaagagacatcagcgggttcataccggggaaaagccctataagtgcccgctctgtccgtacgcttgtggcaatctggctaacctcaagcgccacggtcgaattcattctggagataaacctttccgttgctccttgtgcaactatagttgtaaccagagcatgaatctcaaacgtcatatgctgagacataccggcgagaaaccttttcgatgcgcaacatgcgcatacaccactggccattgggataactacaagaggcaccaaaaggtgcacggacacgggggagctggcggaccagggctgtccgccagtgagggctgggcccctccccacagccctccatcagttcttagtagtagggggcctcctgccctcgggactgccggcagccgtgccgttcatacagatagctcctag

SEQ ID NO: 141484 - DNA, 1440 bp, synthetic construct
  misc_feature 1..1440: note = Description of Artificial Sequence: Synthetic coding sequence
  source 1..1440: mol_type = other DNA
atggggttcgagcgggattctgaaggcgactcactgggcgcccgaccagggctaccttacgggctgtctgacgacgagtccggtggcggtagggccctgagtgccgagtctgaggtagaggagcccgcccgaggcccaggcgaggcaaggggcgagcgacctggacccgcctgtcagctgtgcggtggaccaactggagaaggcccttgttgtggcgccggcgggcctggtggtggaccactgttgccacctcgcctgctgtacagctgtagactttgcacattcgtctctcactactcatcgcatctaaagcgccacatgcagacacattctggtgagaagcctttccgatgtggccgctgtccatacgctagcgcccagctggtgaatctaacacggcacacacgaacacataccggggaaaagccctaccgatgtccacactgtccatttgcctgctcatcacttggcaatctgcgacgtcaccagcgtactcacgctggcccacccactcctccatgccccacctgtggattccggtgctgtaccccacgccctgcccggccaccatctcctactgaacaggagggcgctgtacctcgcaggcccgaagacgccttgttactgcctgatcttagcctgcacgtcccacccggcggtgcttcgtttctgcccgactgcggccagttacgcggggagggagaagggctatgcggtactggttctgagcctttgccggagcttctctttccatggacctgtcgggggtgcggccaggagctcgaagaaggcgaaggcagccggctcggcgccgccatgtgtggacggtgcatgcgcggggaggccggcggcggcgcaagtggcggaccacaagggccatcagacaagggtttcgcgtgttccctatgcccctttgcaactcattacccgaatcatctggcccgccacatgaagacacactcgggtgaaaagccctttaggtgcgcacggtgcccctacgctagtgctcacctcgacaatcttaagcgccatcaaagggtgcataccggtgagaagccctacaagtgcccactgtgcccttacgcttgtggaaacctggctaacttgaaaagacacggtcgcattcattctggagacaagccatttcgatgcagcctgtgtaattattcttgcaaccagtctatgaatctgaagcgacatatgctccggcataccggggagaaaccctttcggtgcgccacctgtgcttacacaacgggccactgggataactacaaaaggcaccagaaagttcacggccacggcggagccggaggccccgggctgtccgcgtctgaaggctgggccccgccgcactccccaccctcggtgctctccagccgaggacctcctgccctggggaccgcgggtagtcgagccgtgcacacggactcttcttag

SEQ ID NO: 141485 - DNA, 3936 bp, synthetic construct
  misc_feature 1..3936: note = Description of Artificial Sequence: Synthetic coding sequence
  source 1..3936: mol_type = other DNA
atgagtaggaggaagcaagccaaaccccgatcactgaaagacccaaattgcaagctcgaagataagacagaggacggagaagcactggattgcaaaaagcggcccgaggacggagaagaactcgaggacgaggctgttcacagttgcgactcctgtctgcaagtgttcgaaagcctctcagacataacagagcacaaaatcaatcagtgccaactcaccgatggggtggatgtggaagacgaccccacatgtagttggcccgcctcaagcccttcttctaaagaccagacctctccttctcatggagaaggctgtgatttcggcgaagaggagggaggacctggactgccttatccctgtcagttttgtgataagtctttctcccggctttcatacctcaagcaccacgaacagagccactccgacaagctgccattcaaatgcacatattgtagtcgactgttcaagcacaaacggtctcgggataggcacatcaaactccacaccggagataaaaagtaccattgttctgaatgtgatgctgctttcagccggtccgatcatcttaaaattcacctgaagacgcacaccagcaataaaccctataagtgcgccatctgcagaagggggttcctttccagctctagcctgcatggccacatgcaagtgcatgagagaaataaggatggcagccagtcaggtagcaggatggaggactggaagatgaaagacacgcaaaagtgttctcagtgcgaggagggcttcgactttcctgaagatcttcagaaacacatcgccgaatgtcaccctgagtgctctcctaacgaggatagagctgccctacagtgcgtctattgccatgaactatttgtggaggagacaagcctaatgaaccacatggaacaagtccacagcggggagaaaaaaaacagttgctctatttgcagcgagtcattccacaccgtcgaggagctctatagtcacatggattctcatcaacagcccgaatcctgtaaccatagtaatagcccctctttggtaacagtgggatacacatctgtgtcatctaccacccctgacagcaacctaagcgtggactcatctactatggtggaggccgccccaccaattcctaaaagccgaggccggaagcgggcagctcagcagactcccgacatgacgggtccatcctccaagcaggctaaggtgacttactcttgtatttactgcaataaacagctttttagctccctcgccgtgctgcaaatccatttgaagaccatgcatctggacaaaccagagcaggcccatatctgccagtattgtctcgaggtgcttccatcattgtacaatttgaatgagcatctgaagcaggttcatgaggctcaggacccaggcctcattgtgtcagccatgcccgccatcgtctaccaatgcaacttttgctcggaagtagtgaatgatctgaacaccttgcaggaacacatcaggtgcagtcatgggttcgctaatccagccgcgaaagactctaatgcattcttctgtcctcactgttatatgggatttctgaccgacagcagtctcgaagaacatatacgtcaagtgcattgcgatctcagtggtagtcggtttggcagccctgtcctggggacacccaaggagcccgttgtcgaagtctattcttgttcgtattgtactaatagcccaattttcaactccgtactcaagctgaataaacacattaaggagaaccacaaaaacattcctctggctctgaactatattcacaatgggaaaaagagtagggctctaagcccccttagccctgtagctatcgaacaaactagtctcaagatgatgcaggcagtgggtggcgcccctgctcgtcccacgggagaatatatatgcaatcaatgcggtgccaaatacacctccttggactcctttcaaacacacttaaagactcatctggacaccgtccttcccaagcttacatgtccccaatgtaacaaagagttcccgaatcaggagtccctgcttaagcatgtgacaatccacttcatgatcacatccacctactatatctgcgagtcttgcgacaagcaattcacctccgtggacgacctccagaaacacctcctggacatgcacacattcgtgttcttccggtgtaccctgtgtcaggaggtgttcgattcaaaagtcagtatccagctccatctggcggtgaaacactcgaatgaaaagaaggtttacagatgtacatcctgcaactgggactttcgcaacgagactgatctccagctgcacgttaagcacaatcacctcgagaaccaaggcaaggtccacaaatgtattttttgtggcgagagcttcggaacagaggtggaactgcagtgtcatatcaccacgcactccaaaaaatataattgtaagttttgctctaaggccttccacgcaattatcttgctggaaaagcacttacgggagaagcactgcgtctttgaaactaagacacctaactgtggaacaaatggagccagcgagcaggtgcagaaggaggaggtcgagctacagactttactgacaaactctcaagagtcacataattcccacgatggcagcgaggaggacgtggacactagtgaaccgatgtatgggtgtgacatctgcggcgcagcctacactatggagactctgctccagaatcaccagctgcgagatcacaatataaggccaggagagagcgccatcgttaaaaaaaaagccgaactcattaagggcaattataagtgcaacgtatgttcccggacgtttttcagtgagaatggtttgcgggagcacatgcagacccatctgggccctgttaagcactacatgtgtccaatctgcggggagcgctttccctctttactcactctgaccgagcacaaggtcacgcatagcaagtccctggataccgggaattgcagaatttgtaaaatgcccttgcagtccgaagaagagttcttagagcactgtcagatgcacccagacttgcggaactcactaacgggctttcgctgcgtggtctgcatgcagaccgtcacaagtacgcttgagcttaaaatccacggcacgtttcacatgcagaagaccgggaacggtagcgccgtgcagactaccggaagaggacagcatgtccaaaagctgtacaaatgcgcttcctgtctgaaagagtttcgcagcaagcaggatttggtgaagctggacatcaacgggctcccttatggcctttgcgcaggctgtgtgaacttgagtaagagcgccagtcctggcatcaacgttccacctgggactaaccgccctggactcggtcagaatgaaaatctcagtgccatcgaaggaaaaggaaaagttggtggtctcaaaaccagatgctcctcttgcaatgtgaaatttgagagtgaatctgaattgcagaaccacatccagaccatccatagggaacttgtccctgattcaaattctacccagctgaaaacacctcaggtgtcacctatgcctagaatttctccaagccagagtgacgagaagaagacatatcagtgtatcaaatgtcagatggtgttctacaatgagtgggatatccaggtgcacgtggcaaatcatatgatcgatgaggggctgaaccatgagtgtaaactgtgttctcagacatttgacagtcccgctaagctgcagtgtcatttaattgagcacagctttgagggaatgggcgggacctttaagtgccctgtctgtttcactgtgttcgtgcaggcgaacaaactacagcagcacatcttttcggctcacggacaggaagacaagatatacgactgcacgcagtgtcctcaaaaatttttcttccagaccgagctgcagaatcacaccatgacacaacactctagctag

SEQ ID NO: 141486 - DNA, 3936 bp, synthetic construct
  misc_feature 1..3936: note = Description of Artificial Sequence: Synthetic coding sequence
  source 1..3936: mol_type = other DNA
atatctagagctcagaaagcacagactcggcggctcaatgatcccaactgtaaattggaggacaagaccgaagacggtgaagcccttgactgcaaaaagaggccggaagatggtgaggaattggaggacgaagccgttcacagctgtgacagctgcctccaggtgttcgaatctttaagcgacattacagagcacaagatcaaccaatgtcagctgaccgatggggttgatgttgaggatgaccccacctgcagctggcctgcatcgtcacctagttctaaggatcaaacttcaccctcacatggcgaggggtgtgatttcggggaggaggaaggcggccccggtttgccctacccttgccagttttgtgacaaatccttcagccggctgagctacctgaaacaccacgagcagtcacattctgataagctgcctttcaaatgtacctattgcagtaggctattcaagcacaagagatccagagacaggcatattaagctgcataccggagataagaagtaccactgttcagagtgtgacgcggctttctccaggagcgaccacctgaaaattcacctcaaaacccacacatccaacaagccgtacaagtgtgctatatgcaggcgaggctttctctcatcctcctcactgcacggacatatgcaagtgcacgagagaaacaaagatggctcgcagagcggatcaagaatggaagattggaagatgaaggatacacagaaatgttcccagtgtgaggagggcttcgactttccagaggatctgcaaaagcatattgctgagtgccaccccgagtgtagccctaatgaagatcgcgcggcgttacagtgcgtctattgccacgaactgttcgtcgaggaaacaagtctgatgaatcacatggagcaggttcactctggggagaaaaagaatagttgctcaatatgttccgaatcgtttcacaccgtggaggaactgtattcacatatggatagtcaccagcagcccgagagctgtaaccatagcaactccccctcactggtcaccgttggttatacaagcgtgtccagcactaccccggacagtaacctctcagttgacagttcaacaatggtcgaggccgctcccccaatacctaagagtcgaggacgaaagagggcagctcagcaaactccagatatgacaggtcctagtagcaagcaggctaaggttacctattcttgcatctactgcaataaacaattgttttcttctctcgccgtgctgcagatacaccttaagaccatgcacttggacaagcccgagcaagcccatatttgccagtactgccttgaggtgctgccgtccctatacaacttgaacgagcacctgaaacaggtacatgaagcgcaggatccaggattgattgtgagtgctatgcccgccatagtgtaccagtgcaacttttgttcagaggtggtgaacgatcttaatacgttacaggagcacattcgatgctctcatggatttgcaaatccagctgcaaaggactccaatgcctttttctgcccccactgttatatgggctttttgactgatagtagtctcgaggagcatattcgccaggttcactgtgatctatccgggtcaaggttcggcagcccagtattagggacacccaaagagcctgtggttgaagtatattcctgttcctactgtacaaacagcccaatttttaactccgtcctcaagctgaacaagcacattaaggaaaatcataagaacataccactggctctgaactatattcacaacggtaaaaagagcagagcactgtccccactgtctccagtggcgatagaacagacgagcctgaaaatgatgcaggcggtcggtggtgctcccgctaggccgactggtgagtacatttgcaaccagtgcggggcaaagtacacgtccctggatagttttcagacccatttgaaaacccacctagatacagtcctgcctaaattgacctgcccacagtgcaacaaggaattcccaaaccaagaaagcctgctgaagcatgtgaccatacatttcatgatcacatccacttactacatctgtgaaagctgcgataaacagttcacctccgttgatgatttgcaaaaacacctcttggatatgcatacatttgtattcttcaggtgcaccttgtgccaagaggtgttcgattcgaaagtgagcattcaactacacctggcagtgaagcacagcaatgagaaaaaggtgtaccgctgtacaagctgtaattgggatttccgtaacgagactgatttgcagctgcacgtcaagcacaaccatctcgagaatcagggaaaagtccacaagtgtattttctgcggggaatcttttggaactgaagtcgagctgcagtgtcatatcaccactcatagcaagaaatacaattgtaagttttgttcaaaagcttttcacgctattattcttctggaaaagcacctcagagaaaagcactgcgtatttgaaacaaagacacctaactgcggaaccaatggagccagcgaacaggtgcagaaagaggaggtcgagctgcagactttgctgacaaactctcaggagtcacataatagccacgatgggagcgaagaagatgtggataccagcgagccaatgtacggctgtgatatttgcggcgccgcctatactatggagactctcctacagaatcaccagttgcgagaccacaacatccgccctggagagtccgccatagtgaaaaagaaagctgagctgatcaaggggaactacaagtgcaacgtctgctcgcgcacctttttttccgagaatggcctccgcgagcacatgcaaacgcacctcggcccagtgaaacactatatgtgtccaatttgcggagagcggttcccatcactcctgacactgacagagcacaaagtgactcacagtaaaagcttggacaccggcaattgtcgcatctgcaagatgcccctgcagtccgaagaggagtttctggagcattgccagatgcatcccgacctgcggaattcactgacaggattcaggtgcgtggtgtgcatgcagacagtcacaagcacgcttgagctaaaaattcacggaacatttcatatgcaaaaaacaggcaacggtagtgccgtccagaccacaggtcgcggacagcacgtgcagaaactttataaatgcgcctcttgcctcaaggagttccggagtaagcaggatttagtgaaactggacattaacggccttccttacggtctgtgtgccggatgtgtgaatttaagcaaatcagcttctccaggtataaatgttcccccggggaccaatcgcccaggactggggcagaatgagaacctgtccgccatcgaggggaaggggaaggtgggaggcctgaagacaagatgctccagttgtaatgtcaaattcgaatctgaatccgaattgcagaatcacattcagacgattcaccgcgagctcgtgcccgactctaatagtacacaactgaagacacctcaggtgtcacctatgcctaggatatcccccagccaatctgatgagaaaaaaacttatcaatgcatcaaatgtcaaatggtgttctataacgaatgggatatacaagtccacgtcgccaatcacatgattgatgagggcctcaatcacgagtgtaagctttgcagccagaccttcgacagccccgctaagctgcaatgtcatctgattgagcacagtttcgagggtatgggcggtacgtttaagtgccctgtgtgtttcacagtcttcgtccaggccaacaagctgcagcagcacattttctctgctcacggccaggaagacaagatctacgactgcacccagtgtcctcaaaagtttttttttcagaccgaactgcaggtgcatacagccaccccccgtcagtcttag

SEQ ID NO: 141487 - DNA, 4038 bp, synthetic construct
  misc_feature 1..4038: note = Description of Artificial Sequence: Synthetic coding sequence
  source 1..4038: mol_type = other DNA
ttcctgagcgactacgttcagagtgaatcactgagggtaagaggaccactgtggtctcatcccgatggattcggcgggttggcatctattttccactactacgttgattataggtctgatagcgctgtgcaggatctggccgatcccaactgcaaactggaagacaagacagaggatggagaggcccttgattgtaaaaaaaggccagaggacggagaggaactggaagatgaggccgtccactcctgtgacagttgtcttcaagtctttgaatctctctccgacatcacggagcacaagataaaccaatgtcagttaacagatggtgtcgacgtagaagatgaccccacttgttcttggcctgctagtagccccagttctaaggaccagacttccccaagccatggggaagggtgcgactttggggaagaggaggggggccccggactgccatacccatgccagttctgtgataagtcattctctagactctcttatctgaaacaccatgagcagtctcacagcgataaactacctttcaagtgcacatattgttctcgtttgttcaaacataaacgctcacgtgaccgacacatcaagctccacacaggcgacaagaaatatcattgctcagaatgtgatgcggctttttcacggtcagaccacctgaagatccacctgaaaactcataccagtaataaaccttacaaatgcgctatttgtcgaaggggctttctctcatcgtccagcttgcacgggcatatgcaggttcatgaaaggaacaaagatggctcgcagtcaggatcccgaatggaggattggaagatgaaagacacgcagaaatgctcacaatgtgaggagggcttcgatttccccgaggatcttcaaaaacacattgccgagtgtcacccagagtgttcccctaatgaggaccgtgccgcactgcagtgtgtatactgccacgaactgtttgtggaggaaacctccttgatgaaccacatggaacaggtacactccggtgaaaagaaaaacagttgctctatttgctctgagtctttccatactgtcgaggaactgtactcccatatggactctcaccaacagcccgagtcatgcaaccactcaaactccccgagcctcgtgaccgttgggtacacaagcgtttcctctactacacctgactcaaacctctcagtggatagctccacgatggtggaggctgccccacctatacctaagtcacgtggtcgcaagcgggctgcacagcagaccccggatatgaccggcccttcttccaaacaggccaaagtgacttatagctgtatctactgtaacaaacagctgtttagctccctggccgtgcttcaaattcatcttaagacaatgcaccttgataagccagaacaggcgcacatttgccaatattgcctcgaggtcctcccaagtctatacaacctaaacgagcatcttaaacaggtacacgaggcgcaggatcctggtcttattgtgtccgcgatgccagctatcgtctaccagtgcaacttttgttcagaggtcgttaacgatctgaatactctccaagaacatattcggtgttcccatggatttgccaatcccgcagcgaaggactccaatgcttttttttgcccacattgctacatgggttttttgacggattcaagtttagaagagcatatcagacaagttcactgcgatctgtccgggtcacgctttggttcccccgtactcgggacacccaaagagccagtggtagaggtgtacagttgcagctattgtacaaattcacctattttcaattctgtactcaaactgaataagcacattaaggagaaccataagaatatacctttggccttgaactacattcacaacggcaaaaaaagccgagccctgagccccctgtccccggttgcaatcgaacagaccagtctcaagatgatgcaggcagtcgggggagctcctgcgcgtcctaccggcgaatacatctgcaaccagtgtggcgccaagtacacaagcctggactcatttcagacccatttaaagacacatcttgataccgtgctcccaaagctgacatgcccgcagtgcaataaggagttcccgaaccaagaatctctgctcaagcatgtgacaattcattttatgatcacatcaacctattacatctgcgagagctgtgataagcagttcacaagcgtggatgacctgcagaaacatctgctggacatgcacacctttgtcttcttccgctgtaccctgtgccaggaggtgtttgactctaaggtaagcatccaacttcacttggcagtgaaacatagtaatgagaagaaagtttacagatgcacgagctgtaactgggactttaggaacgagaccgacctgcagctgcatgtcaagcataaccatcttgagaaccagggtaaggtgcacaaatgtattttctgtggggagagttttgggaccgaagtggagctccaatgtcacattacaacccacagtaagaagtacaactgcaagttttgttcaaaagctttccacgctatcatcctgctggagaagcacctgcgggagaaacactgcgtctttgagacaaaaacgccaaattgcggaactaacggagctagcgagcaagtgcagaaggaagaggtggagctgcaaaccctgctgacaaatagtcaggaaagccataatagccatgacgggagtgaggaagacgtcgatacatcagagcccatgtatggctgtgatatctgtggcgcagcctacactatggaaaccctgctgcagaatcatcagctgcgggaccacaacatccggccaggcgaaagcgcgattgtaaagaaaaaagcggagcttattaagggcaattacaaatgcaacgtgtgctctcggactttcttctctgagaacggcctccgcgagcacatgcagactcatcttggaccagtgaaacactacatgtgcccgatttgcggcgagcgcttcccgagcctgctgactttgacagagcacaaggtgacgcacagcaaaagcctcgatacaggtaactgtagaatatgcaaaatgcctttgcagagtgaggaggagtttctggagcattgtcaaatgcaccccgatctccgcaattctcttaccggattccgctgcgttgtctgcatgcagacagtgacttccactctggaactgaagatccacggaacttttcacatgcagaaaacgggaaacggaagtgcagtgcagacaactggaaggggccagcacgtgcagaagctctataaatgcgcctcctgcctgaaagagttccgcagcaaacaagatctggtcaagttggatatcaacggtcttccctacggcctttgtgcgggctgcgtgaacctgtccaagagcgcctctcccggcattaatgtgccacctggcaccaacagacccggactcggccagaacgaaaacctgtcagctatcgagggtaaaggcaaggttggagggctcaaaacccgctgtagctcttgtaacgtcaaatttgaaagcgagagcgagctgcagaaccacatccaaactattcatagggaactggtgcccgactcaaacagcacccagctcaagactccccaggtgtcaccaatgcctcgtatctccccatcacaaagcgatgaaaaaaagacttaccagtgcatcaaatgccagatggttttttacaacgagtgggatattcaggtgcacgtggctaatcatatgatagatgagggcttgaatcacgaatgtaagctgtgtagccagaccttcgactctcctgccaagctccaatgtcacctgatcgagcactcattcgagggaatgggcgggaccttcaagtgccctgtctgtttcacggtctttgtgcaggcaaataaactacagcagcatatcttttctgctcacgggcaggaggataaaatatacgactgtacccagtgccctcagaagttcttttttcagacagagttacaggtgcataccgccactcctcgtcaatcatag

SEQ ID NO: 141488 - DNA, 2013 bp, synthetic construct
  misc_feature 1..2013: note = Description of Artificial Sequence: Synthetic coding sequence
  source 1..2013: mol_type = other DNA
atggccgaagtggtagccgaagtggctgagatgcctactcagatgagtccaggggcagttgagatgagtacccctatgtcagcagaaatgatggagatgtctactgaggtgaccgagatgactccaggtgaagcgctggcttcttcccttttctttcagcatcatcagttcatgtgcagcgaatgcggtagtctctataatacactggaggaggtgctctcgcaccaggagcagcatatgcttgcggtaagtgaggaggaagcactgacaactcagaatgttggcttagaacccgagctggttccgggcgcagaagggccatttcagtgtggcgagtgttcacagctcatcttgtcaccgggcgagctgctggcccaccaggacgcgcacctgcgtgagagcgccaaccaaatacagtaccagtgttgggactgccaggagttgtttccctcaccagagctgtgggtggcccaccgcaaagcccagcacctgtccgccaccgtggctgaacctccagtgcctcccccacttccgccaccgacaccactgcctccaccaagccctccatctgaagtaaagatggagccctacgaatgtccagagtgcagcaccctatgtgccacgccggaagaatttctggaacatcagggaacccacttcgattctctggaaaaggaggagagaaacggcttggaggaagaggaagaggacgatgaggaggatgaggaggatgacgaggaaatggaggatgaagaagctatggcggaggtaggcgacgacgccgtggggggcgacgaatctactgcaggatgggctcagggttgtggagactgtccacaacaccaacccagtgcaggagcaagacgacaacaccggcgcacagctcactcccctgcctccgccactcatccatttcattgtagccaatgccagagatcctttagttctgccaatcgcttacaggctcatgggagagcccacgtgggtggcactcacgagtgtactacttgctcgaaggtattcaagaaagccgcaagcttggaacagcacctccgactccacaggggtgaggcccgatacctctgtgttgactgcggaagaggctttggaactgagcttacactcgtggcacaccggcgcgcacatactgctaatcctctgcatcggtgtcgttgcggcaagacttttagtaacatgactaagtttctgtatcatcgacggacccacgctgggaaatctggtgcaccgccgacaggagctaccgccccgcctgcgccagccgagcctacccctcccccaccaccccccgctccccccgcacagttgccctgcccccaatgtagtaaatcattcgcaagcgcttcacgactgagcaggcatagacgggctgtgcacggaccaccagaacgaagacaccgctgcggcgtgtgcgggaagggatttaagaagctgatccacgttcgcaaccatctaaggacacacaccggcgagcgaccctttcagtgccacagttgcggaaagaccttcgcctcattagccaacttaagtaggcatcagctcacacacacgggcgcccgcccctaccagtgcctggattgtggtaagagattcacacaatcttccaacttgcagcagcaccgacgtctgcacctgcgccccgtcgcttttgctcgcgccccacggcttccaatcactgggctctacaacaaaagcccctactattgcgggacttgtggccgatggtttcgcgctatggctggcctgcggctgcatcagagggtgcacgcccgcgcccgaactctcacactacagcctccccgcagcccgtcaccagccccccccccaccacctgagccccaacaaaccatcatgtgcaccgaactcggcgagaccatagccattatcgagacttcccagccattggcactggaggacacattacagctgtgtcaggcggccctgggcgcatcagaggctggcggtttgctgcagctggatactgccttcgtttag

SEQ ID NO: 141489 - DNA, 1581 bp, synthetic construct
  misc_feature 1..1581: note = Description of Artificial Sequence: Synthetic coding sequence
  source 1..1581: mol_type = other DNA
atggccgaagtcgttgcagaagtcgccgaaatgcctacgcagatgagccctggcgctgttgaaatgtccacacctatgtccgccgagatgatggagatgagtacagaagttaccgaaatgaccccctcacccccctccgaggtgaagatggaaccttacgagtgccccgaatgctccaccctgtgcgctactcctgaggaatttctcgagcaccagggtacgcacttcgactcattagaaaaggaggagagaaatgggctggaggaggaagaggaggacgatgaagaagatgaagaagacgacgaagagatggaagacgaggaggccatggccgaggttggcgacgacgccgtgggtggagatgaaagtacagctgggtgggcacaaggctgcggcgattgccctcaacaccaacctagcgcaggagcccgtagacaacaccgccgcacggctcattcgcctgcctctgcaacacatccattccattgctcacagtgccagaggagtttctcgagtgcaaatcggcttcaagcacatggacgagcgcatgttggaggcacacacgagtgcaccacctgctctaaagtttttaagaaagcagcatccctcgagcagcacttaagattgcatcgaggggaggcccgttatctctgcgtggattgtggccgcggtttcgggactgaattgactttagtcgcgcaccgccgcgctcatactgcaaaccccctccatcggtgtcgatgcggaaagaccttctccaatatgaccaaattcctttatcaccgcagaactcatgccggcaaatccggtgcccctccaaccggggcaaccgcccctcccgctcctgccgagccgaccccaccgcccccccccccagcaccccctgcacagctgccatgcccgcaatgctcaaagtcctttgcatccgcctcccgactctctcggcatcgacgcgcggtgcatggcccccctgaaagacggcacaggtgcggtgtctgtggaaaaggctttaagaaactcattcacgtaaggaaccatctgcgaacccatacaggagaaaggcccttccaatgtcattcatgcggtaagacattcgccagcctcgccaacctctccaggcatcagttaacccatacgggagcaaggccgtaccagtgcctggattgcgggaagagattcacccagtcctccaatctccagcagcacaggaggttacatcttagacctgttgctttcgctagggcccccagactccccattactggcttatacaataaatctccctactactgcggtacatgcggacggtggttccgcgcgatggccggtctccggctacaccagcgggttcatgcacgggccagaacactcaccctccaacccccccgtagcccctctcccgcccctccacccccgcccgagccacagcagaccatcatgtgcaccgaacttggggagacgattgctatcatagaaacaagccagcccttggcactcgaggacactctccagctatgccaagcagccttgggggcctctgaggccggcggactcctccaactcgataccgccttcgtctag

SEQ ID NO: 141490 - DNA, 1983 bp, synthetic construct
  misc_feature 1..1983: note = Description of Artificial Sequence: Synthetic coding sequence
  source 1..1983: mol_type = other DNA
atggcgcatgcccttgtgacattcagagatgtggctatcgattttagtcaaaaagagtgggaatgtctagacaccacacagcgcaaattgtaccgtgacgtaatgcttgaaaattacaacaacctggttagtttgggctatagcgggtccaaacccgacgtgatcactcttctggagcaggggaaagagccctgtgtcgtggctagagacgtgacagggagacagtgtcctggcctgctatccaggcacaaaaccaagaagctttcaagcgagaaggacattcacgaaatttcactgagcaaggagagcatcatcgagaaatcaaaaacactccggctcaagggatctattttcagaaacgagtggcagaacaaaagtgagtttgagggacagcaaggcctcaaagagagatccataagccagaagaagatcgtgagcaaaaagatgagcactgacaggaagcggccctcctttactctgaatcaacggatccataactccgaaaagtcatgtgactcacatttggtgcagcacggcaagattgattcagatgtaaaacacgactgtaaggagtgcggatccacatttaataatgtataccagctgacacttcatcagaagatccacactggagaaaagagctgcaagtgcgaaaagtgtggtaaagtttttagccattcgtaccagctgacactccaccagcgtttccacactggtgagaaaccctacgaatgtcaggagtgtggaaaaacgttcacactgtacccacagttaaacaggcaccagaagatccacaccggtaaaaagccctatatgtgcaaaaaatgcgataagggattcttttctaggctggaactgactcagcataagagaatccatactggaaaaaaatcatatgaatgtaaagagtgtggaaaagtgttccaattgattttttacttcaaagaacacgaacgtattcacaccggaaaaaagccatatgagtgtaaagaatgcggtaaagcattttccgtctgtggacaactgacccgtcatcagaagattcatacaggtgtgaaaccctacgagtgcaaggagtgcgggaagacttttagactgtcattctatctgacagaacaccggcggacacacgccggtaaaaagccttatgagtgtaaggaatgcgggaagtcttttaatgtgcgcggccaactgaacagacacaagaccatccatacaggcataaagcccttcgcttgtaaagtgtgcgagaaggccttttcatactctggggacctacgggtccactctaggatccacactggagagaaaccatacgaatgcaaagaatgtgggaaggcattcatgttgaggagtgtacttacagagcaccagcggttacacaccggcgtgaagccatatgaatgtaaagaatgcgggaaaacatttagggtgcgttcccagatttctctgcacaagaagatccatacagacgtgaaaccctacaagtgcgttcgatgtgggaagacttttaggtttggattttacttgacagaacatcaacgtatacacaccggagaaaaaccttacaagtgtaaagaatgtggcaaggcctttatcaggcgaggaaacctgaaggagcatctcaagattcacagcggcctgaaaccttacgactgcaaggagtgtggaaagtctttctcgcggcggggtcaattcaccgagcaccagaagatccacactggcgttaagccctacaagtgcaaggaatgcgggaaggccttttctagaagcgttgatctgcggattcatcagagaattcatactggggaaaagccatacgaatgtaagcagtgcgggaaagcattccggctcaattctcatttaaccgagcaccagagaatacacaccggcgagaaaccttacgagtgcaaagtctgtaggaaagcttttcggcagtacagtcatctataccagcaccagaagactcataatgtgatatag

SEQ ID NO: 141491 - DNA, 1887 bp, synthetic construct
  misc_feature 1..1887: note = Description of Artificial Sequence: Synthetic coding sequence
  source 1..1887: mol_type = other DNA
atggcacatgccctcgtcaccttccgggacgtggctatcgacttttctcagaaagagtgggaatgccttgatactacacagagaaaactgtacagggacgtgatgctggaaaactataacaatttggtcagtttggggctgctcagccgtcacaagaccaagaagctgtcctctgagaaggatattcacgagatttcactgtctaaggaatctattattgagaaatccaaaactctgcgactgaagggatccattttcagaaatgaatggcagaacaagtctgagttcgaaggccagcaaggtctcaaagagaggagcatctcgcaaaaaaaaatcgttagtaagaagatgtccactgacaggaaaagaccttccttcaccctcaaccagcggatccacaacagcgagaagagttgcgactctcacctggttcagcacggtaagatcgactcggacgtgaaacacgattgtaaagagtgcggctccacttttaacaatgtgtaccagcttaccttgcatcagaaaatccacactggggagaaatcatgcaagtgtgagaagtgcgggaaagtgttcagccacagttatcagttaacgttgcaccaaagattccacaccggggagaaaccctacgagtgtcaggaatgtggcaagacctttacactatatccccagctaaatcgacaccaaaaaatccacacgggcaagaagccttacatgtgtaaaaagtgtgataagggattttttagtcggctcgaactgacacagcacaagagaattcatactggcaagaaaagctatgagtgtaaggagtgtggtaaggtcttccaactgatcttctattttaaggagcatgagcgcatccatactggaaaaaaaccatacgaatgcaaggagtgtgggaaagcctttagcgtttgcgggcagctcacacgtcaccagaaaatccatactggcgtgaaaccatacgaatgtaaagaatgcggcaagacttttagactgtccttttacctaacagaacatcgccgcacacacgccggcaagaagccttacgagtgcaaagaatgcggtaagagcttcaacgttagaggtcagctgaacaggcacaagacaatacatacggggataaagccgtttgcctgcaaggtctgtgagaaagccttctcctactccggagacctaagggtgcacagcagaatccacaccggggagaaaccctatgaatgcaaggaatgtggaaaagcattcatgttgcgctcagttttaaccgagcaccagaggctccacaccggtgtcaagccctatgaatgcaaggaatgtggcaaaacatttcgggttcgaagccagatctcactgcacaagaaaattcacactgacgtgaagccctacaagtgcgtccggtgtggcaagacttttcggttcggcttttacctgaccgagcatcagaggatccacaccggggaaaaaccctacaagtgcaaagaatgtgggaaggcttttatcagacggggcaacctcaaagaacatttaaagattcattctggtctgaaaccctacgattgcaaggagtgtggaaagagtttcagtcggagaggccagttcactgagcatcaaaaaatccatacaggagtgaagccctataagtgcaaagagtgcggtaaagcatttagcaggtccgtcgatctcaggatccaccagaggatccacaccggcgaaaaaccttatgagtgcaagcagtgcggtaaagcgtttcggcttaattctcacttaaccgagcaccagagaatccacactggcgagaagccctacgaatgcaaggtttgcaggaaagctttcaggcaatatagtcatttgtatcaacaccagaaaacgcacaacgtcatctag

SEQ ID NO: 141492 - DNA, 1887 bp, synthetic construct
  misc_feature 1..1887: note = Description of Artificial Sequence: Synthetic coding sequence
  source 1..1887: mol_type = other DNA
atggcgcatgcgctcgtaactttcagggatgttgctattgacttcagccagaaggagtgggagtgccttgatacaacacagcgaaagctctatcgcgacgtaatgttggagaactacaataatttggtcagcctgggcctcctatcgaggcataaaactaaaaagttgtcctctgagaaggatatccatgagatctcactgtccaaagagagcatcatcgaaaagagtaaaactctgcgactcaaaggctccatatttcggaacgaatggcagaataagtccgaatttgagggacagcagggcctcaaagagaggtctatttcccagaaaaaaattgtgtcaaagaaaatgtcgacggacaggaaaaggcccagcttcacactgaatcagcgcatacataattcagaaaagtcctgcgactcccatctcgttcagcacggcaaaattgactcggacgttaaacatgactgcaaggaatgcgggagcacattcaacaatgtttaccaattgaccttgcatcagaaaatccacacaggcgagaagtcatgcaagtgcgagaaatgtggcaaagttttttcccacagctaccagctgaccctgcatcagcgatttcatacaggtgagaaaccctacgaatgccaggagtgcgggaagacttttaccctctatccacagctgaacaggcatcagaagatccacacaggtaagaaaccctacatgtgtaagaaatgcgacaagggatttttctcacggctcgagttgactcaacataaacgaatccataccggcaaaaaatcttacgagtgtaaggagtgcggcaaggtatttcagttgatcttctacttcaaagagcacgagcgtattcatacgggtaaaaaaccatatgaatgtaaagaatgtggcaaggcattctctgtctgcgggcagctgacacgccatcagaagatccataccggggttaagccctatgagtgcaaggaatgcggcaaaaccttccggttaagcttttacctgaccgagcaccgaagaactcatgcggggaagaaaccttatgaatgtaaggaatgtggcaaatcatttaacgtgcgaggacagcttaataggcataagacaatccacaccggtattaagccctttgcctgtaaagtgtgtgaaaaggctttctcctattcgggcgatctgcgggtgcactcaagaattcacacgggcgagaaaccttacgaatgtaaagagtgtggaaaagctttcatgctgcgttctgtcctgactgagcatcaacggctgcacactggcgtaaagccgtatgagtgcaaagaatgcggaaagacatttcgggtccggtcacagatttctctgcataaaaagatacacacagatgtgaaaccctataaatgcgtgcggtgcggcaagacattccgttttggcttctacctgacggagcaccagaggatacatactggtgagaagccttataaatgcaaagagtgtgggaaggcttttatccggcggggcaacttgaaagaacatctaaaaattcactccggattgaaaccatacgactgcaaagagtgcgggaaaagcttttccagaaggggccagtttaccgagcaccaaaaaattcatacaggggtgaaaccatacaagtgtaaggagtgcgggaaagcctttagtagatcagtcgacctacggatccaccagcgcatccacacaggcgagaagccatacgaatgtaaacagtgtggaaaggcatttcgattgaattcccatctcactgaacatcagagaatccacactggagaaaagccatacgagtgcaaggtatgcagaaaggccttcagacagtatagccatttgtaccagcaccagaagacacacaatgtcatctag

SEQ ID NO: 141493 - DNA, 1983 bp, synthetic construct
  misc_feature 1..1983: note = Description of Artificial Sequence: Synthetic coding sequence
  source 1..1983: mol_type = other DNA
atggctcacgccttggtgacattccgcgacgtggccatcgatttcagccaaaaagaatgggagtgcctggacacgactcagagaaagctctatcgtgacgtgatgctggagaattacaataaccttgtgtcactcggatattccggcagtaaacccgatgtaatcacactgctggagcagggcaaggagccatgtgtcgtggccagggacgtgactggcaggcagtgtcccgggttactgtcgcggcacaagacgaaaaagctgtcttctgaaaaggatattcacgaaatcagcctgagcaaggagagcattattgaaaagtccaagacgctacgcctcaagggtagcatcttccgcaatgaatggcagaacaaaagcgagtttgagggccaacagggattgaaggagaggtccatctcccagaagaaaattgttagtaagaaaatgtccacggatcgaaagcggcccagttttacactcaaccaacggatccataatagcgagaaaagctgtgattcgcacctcgttcagcatggtaaaattgattcggatgtgaagcatgattgtaaggaatgcggttctacctttaacaacgtctatcagctcactctgcatcagaagatccacacaggagaaaagagttgtaaatgtgaaaagtgtggcaaagtcttctcccactcttaccagctgaccttacaccaaaggttccacacgggcgagaagccctacgagtgccaggagtgcggaaagacattcaccctctacccccagctgaatcgacatcaaaaaattcataccggaaagaagccatatatgtgcaagaaatgtgataaagggttctttagcagactcgagcttacccaacataagaggatccatacaggcaagaaatcctacgagtgcaaagagtgcggaaaggtctttcagctgatcttttattttaaggagcatgagcggatccatacagggaagaaaccctacgagtgcaaagaatgcggcaaggcgttctctgtttgtggtcagttaacacgtcaccagaagattcataccggggtgaaaccctacgaatgtaaagaatgcggtaaaactttccgcttgtccttttacttaactgaacatcggcggacccacgcaggcaaaaagccgtacgagtgcaaggagtgcggtaagagttttaatgtacgcggccagctgaaccggcacaagactatccataccggaatcaaaccatttgcctgcaaggtttgcgaaaaggcgtttagctattccggcgacttgagggtccattcaagaattcatactggtgagaaaccttacgagtgcaaagaatgtggaaaggcatttatgcttcggagcgtgctgactgagcaccagcggttgcacaccggtgtgaaaccatacgaatgtaaggaatgtggaaaaacgttcagggttaggtcccaaatcagccttcacaaaaagattcatactgacgtcaagccttataaatgcgtgagatgtggcaagactttccgctttggattttatctgacagagcatcagcgtattcacacgggagaaaaaccttataagtgcaaagagtgtgggaaggcttttatccgcagagggaatctgaaggaacacttaaaaattcacagtggtttgaaaccctacgactgcaaggagtgtggcaaatcgttctcgcgacggggacaatttaccgaacaccaaaagatccatactggcgtgaaaccttacaagtgtaaagagtgcgggaaggcctttagccgttccgtggatctgagaatccatcagcggattcacactggagagaagccatacgaatgtaaacagtgcggcaaggcttttcggcttaatagtcatctaaccgagcatcagagaatccacaccggtgagaaaccctatgagtgtaaggtttgccgaaaggcctttagacagtacagtcacctgtatcagcaccaaaaaacccacaatgttatttag

SEQ ID NO: 141494 - DNA, 1500 bp, synthetic construct
  misc_feature 1..1500: note = Description of Artificial Sequence: Synthetic coding sequence
  source 1..1500: mol_type = other DNA
atggcacaaggacttgtcactttccgcgatgtcgcgattgagttctccctggaggaatggaaatgcttggaacccgcacaacgagacctgtatcgggaagtgactcttgaaaatttcggccacttggcctccctaggactgtccattagtaaacctgacgtagtgagcctactcgaacagggcaaggagccttggatgatagcaaatgatgtcaccggtccgtggtgccctgacctggagtccagatgtgagaaattccttcagaaagatatattcgagatcggtgcttttaattgggaaataatggagagcctgaagtgtagcgatctcgaggggtctgacttccgtgcggattgggagtgtgaaggacagtttgaaagacaggttaacgaggagtgctattttaagcaggtgaacgtaacctacggccatatgccagtattccagcaccatacaagtcacactgtgcgccaatctagagagaccggcgaaaagctgatggagtgccatgagtgtgggaaagcgttctctcggggaagccatcttatacagcatcaaaaaatccacaccggtgagaaaccattcggatgtaaagagtgcgggaaggccttctcaagagcctcccacctcgtccagcatcagcggatacatacaggcgagaagccgtacgactgtaaagactgcgggaaggcgttcggaaggacgtcagagctgatcttgcatcagaggctgcacacgggtgtaaaaccctacgagtgcaaggagtgcggcaaaacctttaggcaacactctcagcttattctccaccagcgaacccatactggcgagaaaccttacgtgtgtaaggactgtggcaaggcctttatccgagggtcccagctgacagtgcatcggcggatccacacaggcgccaggccatatgagtgtaaggaatgtggcaaagcctttaggcaacacagccagctgactgtacatcagcgtatacatacaggagagaaaccgtatgagtgtaaggagtgcggaaagggttttatacacagtagtgaggtgactagacatcaacgcattcactccggggaaaagccttatgagtgtaaagagtgcggtaaggctttccgccagcacgctcagctgactcgccaccagcgcgtccacactggtgataggccctatgagtgtaaagattgtggaaaagccttcagtcggagtagttacctcatacagcaccaacggatccacaccggagataagccgtacgagtgcaaggagtgcggcaaggctttcatccgggtatctcagcttacacaccatcagcggatccacacctgtgaaaaaccatacgagtgtcgagagtgtggcatggcattcattcgctcctctcaactgacagaacaccaacgcattcatccagggatcaagccatacgagtgtcgagagtgtggacaggcattcatcttgggttctcagcttatcgaacattatcggatccacactggatag

SEQ ID NO: 141495 - DNA, 1620 bp, synthetic construct
  misc_feature 1..1620: note = Description of Artificial Sequence: Synthetic coding sequence
  source 1..1620: mol_type = other DNA
atgcgcagaggtccttgggaacgctggagccttgccagccatcggctggacgcaggcctctgcacgtgccctagagaggaatcacgggaaatcagagcggggcaaatcgttcttaaggccatggcccaggggcttgtaacctttcgcgatgttgcgatcgaatttagcctcgaagaatggaagtgtttagagcccgcccaacgtgacctgtaccgggaggtcacattggaaaatttcggacacttggcttcgctcggtttgtctatctcaaagcctgatgtggtgtccctgctggagcagggaaaagagccatggatgatcgccaacgatgtgactggaccatggtgtcccgacctcgaatctaggtgtgaaaagttcctccagaaagatatctttgaaatcggagcattcaactgggaaatcatggagtccctgaagtgtagcgacctggagggctccgatttccgcgccgattgggagtgtgaaggacagttcgaaaggcaggtgaacgaagaatgttattttaaacaggttaatgttacgtatggacatatgcccgtctttcagcatcacacctctcacacagtcaggcaatctcgtgagaccggggaaaagctaatggaatgccacgaatgcggtaaagctttcagcaggggtagtcacttgatccagcaccagaaaattcacaccggtgagaaacctttcggttgcaaggaatgcggtaaggccttttctcgggccagtcatctggtacagcatcagagaattcatactggcgagaagccttacgattgcaaagattgcggaaaagctttcggacgcacctccgagctgatcctgcatcagcgcttgcacaccggtgtcaagccttatgagtgtaaggaatgcggaaaaacattccgtcagcattcccagttgatactgcatcagcgtacacacaccggcgagaagccttatgtctgtaaggactgtggcaaagccttcattaggggtagtcaactcactgttcaccgccgaattcatacaggggccaggccgtacgagtgtaaggagtgcggtaaggccttccgtcagcactcacaacttaccgtccaccagcgaattcacaccggtgaaaagccctatgagtgtaaggaatgcggtaaagggttcattcatagctccgaggtcacccgacaccagaggatccacagcggagagaagccatacgagtgtaaagaatgcggcaaggcctttcgccagcacgcccaattgacaaggcatcagcgcgtgcacaccggagaccggccctatgaatgcaaggactgcggtaaggcattttctcgaagctcctatctgattcaacaccagaggatccataccggggacaaaccgtacgagtgcaaggagtgtgggaaagctttcatacgggtgagtcagctaacacaccaccaaaggatccacacatgcgaaaagccatacgaatgtcgtgaatgtggcatggctttcatcaggtcctcccagctgaccgagcaccaacgaattcacccaggaattaagccatacgagtgtagagagtgcgggcaggcgtttatcctgggaagccagctcattgagcactatcggattcatacagggtag

SEQ ID NO: 141496 - DNA, 1500 bp, synthetic construct
  misc_feature 1..1500: note = Description of Artificial Sequence: Synthetic coding sequence
  source 1..1500: mol_type = other DNA
atggcacaagggctggtgacttttcgggatgtcgccattgagtttagcctggaagaatggaaatgtctggagcctgcacagagagacctgtaccgagaggtcactttagagaactttggccatctggccagccttggcctgtcaatttccaagccagacgtagtgagtttgctagaacaaggcaaagagccatggatgatagccaatgacgtcacaggcccttggtgccccgacttggagtcaagatgtgaaaagtttctccagaaggatatcttcgagattggagccttcaattgggagatcatggagtccctaaaatgttctgacctggaaggatcagatttccgcgccgattgggagtgtgaggggcaatttgaaagacaagtgaacgaggagtgctattttaagcaggtgaatgtcacttacggccatatgcccgtctttcaacaccatacctcccacacggtgaggcaatctagagagaccggggagaaactgatggaatgtcacgaatgcggcaaagccttctccagaggctctcacctaatccagcatcagaagatccatactggcgagaaaccctttggatgtaaagagtgcggaaaagcatttagccgcgcaagccatcttgtccagcatcagagaatccataccggcgagaagccctatgattgcaaggactgcggtaaggcattcggccgtacatctgaattaatcctccaccagaggctacacactggcgtcaaaccctatgagtgcaaagagtgtggcaaaacttttcgtcagcactcccagttgatcctccatcaacgcacacacaccggtgagaaaccctacgtttgcaaagactgcggcaaagccttcatcagaggatcacagctgaccgtacatagacgaattcacactggagctagaccttatgagtgcaaggaatgcggtaaagcgtttcggcagcactcccagctcacagttcaccagagaatccatactggggagaaaccgtatgagtgcaaggagtgcgggaagggatttatacattccagcgaagttaccaggcatcagagaatccattcaggcgaaaagccttatgagtgcaaagagtgtggaaaggctttccggcaacacgctcaacttacacgccaccagcgggtccatacaggggacagaccttacgagtgtaaagactgtggcaaagccttctctaggtcttcatatttgattcagcatcagcgcattcacacgggcgataaaccctacgagtgcaaggaatgcggaaaagccttcatcagggttagccaattgacacatcatcagaggatccatacttgtgagaagccgtacgagtgtcgagagtgtgggatggcatttatccgttcttcccagctgactgagcaccagaggatccacccggggattaagccatacgagtgtcgggagtgcgggcaggcgttcatactgggatcccagctcatcgaacattataggatacacaccggctag

SEQ ID NO: 141497 - DNA, 2061 bp, synthetic construct
  misc_feature 1..2061: note = Description of Artificial Sequence: Synthetic coding sequence
  source 1..2061: mol_type = other DNA
atgacagagtcacagggcacagttaccttcaaggacgtggcaatcgattttacccaagaggagtggaagcgtctggatccagcgcagcgtaagctgtaccggaatgttatgctggaaaactataataatctgatcaccgtggggtacccttttaccaagcccgacgtgattttcaaactggaacaggaagaggaaccatgggtaatggaggaggaggtcctgcggcgccattggcagggcgagatctggggtgttgacgagcaccagaagaaccaggatcggttactgcgccaggtcgaggttaagtttcagaagaccttgaccgaggagaaggggaacgaatgccagaagaaattcgcgaatgtcttcccactgaattccgacttcttcccaagccggcacaatctgtacgagtatgacctgtttggcaaatgcctcgagcacaatttcgactgccacaataatgtgaagtgcctgatgaggaaggagcattgcgagtacaacgagcctgtgaaatcgtacggaaattccagcagtcacttcgtcatcacgccttttaagtgtaatcactgcggcaaggggttcaatcagacgctggatttgatccggcatctccgtatccacaccggtgagaaaccctacgaatgcagcaattgtaggaaagctttttcgcacaaggaaaaactaattaaacattataagatacattctagagaacagtcatacaagtgtaatgaatgcggcaaggcattcattaaaatgagtaacctgatccgccaccagcgcatacacacaggtgaaaagccctacgcttgcaaggagtgtgaaaagagctttagccagaagagcaatctgattgaccacgagaaaattcatactggagaaaagccctatgaatgcaatgagtgcggcaaggcgttttctcagaagcagagcctgatcgctcatcagaaggtgcacaccggagaaaaaccttacgcctgcaacgaatgtggaaaggcgtttcctcgaatagcttccttagctctgcatatgcggtcccacacaggcgaaaagccatacaagtgcgataaatgcggaaaggctttctcccagtttagcatgcttatcattcacgtgcgaattcacacaggagaaaagccctatgagtgcaacgagtgcggcaaggctttttcccagtctagcgctctgaccgtgcacatgagatcccataccggagagaagccatacgaatgcaaggaatgtagaaaggccttttctcacaaaaagaactttatcactcatcagaaaatccacactagagaaaagccctatgaatgtaacgaatgtggtaaggctttcatccagatgtcaaacctcgtgcgacaccagaggattcacaccggggagaaaccttatatctgcaaggagtgtggaaaggcattttcccagaaatccaatctgatcgcccacgagaaaattcacagcggggagaagccgtacgaatgtaatgagtgcggcaaagctttttcccagaagcagaactttataactcaccagaaggtgcatactggcgaaaaaccatatgattgcaacgagtgcggaaaagccttctctcagattgcaagtttgaccctccatttacgcagtcacacgggcgagaaaccctatgagtgtgacaaatgtggtaaagcattttcacagtgttccctgctgaaccttcatatgcgttcccacacaggcgaaaagccctacgtgtgtaacgagtgtgggaaggccttcagccaaaggacaagcctgattgtacatatgcggggtcacaccggagaaaaaccttatgagtgcaacaagtgcggaaaagcattctctcagtcctcgagtttgaccattcatatccgtggacacactggagagaaacctttcgactgctccaaatgcggcaaggcattcagtcagatttccagtcttaccctgcacatgcggaaacataccggtgagaagccctaccattgtattgagtgtggcaaggccttctcccaaaagtcacacctcgtccgacatcaaagaatacacactcattag

SEQ ID NO: 141498 - DNA, 1029 bp, synthetic construct
  misc_feature 1..1029: note = Description of Artificial Sequence: Synthetic coding sequence
  source 1..1029: mol_type = other DNA
atgaggtctcacaccggggaaaaaccgtacaagtgtgacaagtgtggaaaggccttcagccagttttccatgctgatcatccacgtgcgcatccacaccggcgaaaagccctacgagtgtaacgagtgtggcaaggccttctcccagagcagtgccttgacagtccatatgcggagtcacaccggtgagaaaccatatgagtgcaaagaatgtcgaaaagcctttagccacaaaaagaattttattactcaccaaaaaatacatacacgtgagaaaccttacgaatgtaatgaatgtggaaaggcgttcatccagatgagtaatcttgtccggcaccaacgaatacatacgggcgaaaagccttacatttgcaaggagtgtggtaaagcttttagccagaagagcaacctcatagcgcatgagaaaattcattctggagagaaaccatacgaatgcaacgagtgtggcaaagccttctctcaaaaacaaaattttataacccaccagaaagtgcacaccggagagaagccttacgattgtaatgaatgcggaaaggcctttagccagattgccagtcttacactccacctgcgttctcataccggcgagaagccttatgagtgcgataagtgcggcaaggcattcagccagtgttccctgctcaatcttcatatgcgtagtcacacgggagagaaaccgtatgtttgcaacgaatgtggaaaagcgttcagccagcgaacatcactgatagttcacatgagggggcacactggcgaaaagccgtacgagtgtaataagtgtggtaaggccttctctcagtcttctagtttgactatccacatccggggccacacgggagaaaaacctttcgactgctcaaaatgcggtaaggccttcagccagatctcctcgctgactcttcacatgagaaaacacactggggagaaaccctaccactgcatcgaatgtggaaaggcgtttagccagaagagccatcttgtccggcatcaaaggattcacacacattag

SEQ ID NO: 141499 - DNA, 1584 bp, synthetic construct
  misc_feature 1..1584: note = Description of Artificial Sequence: Synthetic coding sequence
  source 1..1584: mol_type = other DNA
atgcggaaggaacattgcgagtacaatgagcccgtgaagtcatatggtaacagcagcagccatttcgtcattaccccttttaagtgcaaccattgtggaaaaggctttaaccagacccttgatcttatccggcacctccgtatccatactggggaaaagccatatgaatgctctaattgccgcaaggcttttagtcacaaagagaagttgattaagcactataagattcacagccgagaacagtcctacaaatgcaacgaatgcggaaaggccttcatcaagatgtccaatttgatcagacaccagagaattcatactggcgagaagccttatgcctgcaaagagtgcgagaaatcttttagtcagaagtctaatctgatcgaccacgagaagatccatacgggagaaaagccctacgaatgcaacgaatgcggtaaggcttttagccagaagcagagtctgatcgcccatcagaaagtccacaccggcgagaagccctacgcatgcaatgaatgtggcaaggcgtttcctagaatcgcttcattggccctgcacatgcgatcacatacaggcgaaaagccctacaagtgcgataagtgtgggaaggctttctctcaatttagcatgcttataatccatgtgcgcatccacaccggggagaagccttacgagtgcaatgaatgtggcaaggctttcagtcagtcgtcagccctgacagtgcacatgaggtctcacaccggtgaaaagccttacgaatgtaaagaatgtcgcaaagcttttagtcataaaaaaaatttcattactcaccaaaagatccatacaagggagaagccctacgaatgcaacgagtgtggaaaagcatttattcaaatgtccaacctcgtgcgccaccaacgaatccataccggggaaaaaccatatatttgtaaagaatgtgggaaggcctttagccagaaatccaatctcattgcacacgagaaaattcacagtggtgagaaaccctatgaatgcaatgaatgcggaaaagccttctcacaaaagcaaaactttatcacacaccaaaaggtccatacaggcgagaaaccttacgattgcaatgaatgcggtaaagctttcagtcagatagcttccttaacactccacttgagatcccacacgggggaaaagccttacgaatgcgataagtgtgggaaggcgttcagccagtgttccctgctcaaccttcatatgcgttctcacaccggggagaagccctacgtctgcaacgaatgcggcaaagctttttcccaacgcacatccctcatcgtccatatgcgcggccatactggcgagaaaccttacgaatgcaacaagtgcggcaaagccttttcccagtccagcagcctaactatccacattaggggacacaccggcgaaaagccatttgattgctcaaaatgtggcaaagcatttagccagatatcaagtctgaccctccacatgaggaaacataccggcgagaaaccctaccactgtatcgagtgcggcaaggccttctctcaaaaaagccatctggtgcgacatcaacggattcatacccattag

SEQ ID NO: 141500 - DNA, 1551 bp, synthetic construct
  misc_feature 1..1551: note = Description of Artificial Sequence: Synthetic coding sequence
  source 1..1551: mol_type = other DNA
atgtttgagcagctgaagcccattgagccccgagactgttggagggaagccagagtcaagaaaaaacctgtaacatttgaggacgtagcggtgaatttcacacaagaagagtgggactgcctggacgcatcacagcgtgttctgtaccaggatgtaatgtccgaaaccttcaagaatcttacatccgtggcccggatattcctgcacaagcccgagttgatcacgaagttggaacaggaggaagagcagtggagggaattcgtccacctcccaaataccgaagggctgtcagagggcaaaaagaaggagctgcgcgagcagcacccgtctctgcgtgatgagggaacttccgatgataaggtcttcctggcttgcagaggagcaggtcagtgtccactctctgccccagcggggacaatggaccggaccagagtcctacaggcatcacaagctggccccccttttttctgctatacttgtggcaaatgcttttcaagacggagttacctgtacagtcatcagttcgtacataatcccaagttaactaacagctgtagccaatgcgggaaactcttcaggagtcccaagagcctgtcctaccatcggaggatgcatctgggggagcggccgttctgctgtaccctgtgcgacaaaacctactgcgacgcctccggcctttctaggcaccggcgcgtccaccttggctacaggccgcatagctgctccgtctgcgggaagagcttcagggaccagagtgagctgaagaggcatcaaaagattcaccaaaatcaggaaccggtcgatgggaaccaggagtgcacactgcgtatcccgggcactcaggctgagtttcagaccccaattgctagatcccagaggtccatccagggtttacttgacgtcaatcatgctccagtggcaaggagtcaggagccaatctttcggacggaggggcccatggctcagaaccaggcctctgtgcttaagaaccaggcgccagtgactcgaactcaagcgcccatcaccggcactctgtgtcaggatgcccggtctaacagtcacccagtgaaacctagccgtcttaatgttttttgctgcccccactgtagtttaacctttagcaagaaatcctaccttagtaggcatcaaaaggcccacctgacagaacccccaaactactgcttccactgttctaagtctttttcttctttctcgaggctggtgaggcaccagcagacgcactggaagcagaagagttatctctgtcctatatgtgacctgtctttcggtgaaaaggaggggctcatggaccactggagggggtacaagggaaaggacctctgccaatcatcacaccacaagtgtcgcgtcattctcggccaatggttgggattctctcacgatgtcccaactatggccggggaagaatggaagcatggtggagaccaatcccctcctagaattcatacccctcggcgcaggggtctgcgggagaaagcttgtaaaggggacaaaactaaggaggccgtgagcatactgaaacataagtag

SEQ ID NO: 141501 - DNA, 1551 bp, synthetic construct
  misc_feature 1..1551: note = Description of Artificial Sequence: Synthetic coding sequence
  source 1..1551: mol_type = other DNA
atgtttgagcagttaaagccaatcgaacccagagactgctggcgggaggctagagtgaaaaaaaagccagtgaccttcgaggatgtggctgtcaacttcactcaggaggagtgggactgccttgacgcatctcagcgggtgttatatcaggacgtgatgagcgagacatttaaaaacttgacaagtgtggccagaattttcttgcacaaaccagagcttataacaaagctcgagcaggaggaagagcagtggagagagtttgtgcacctgcctaatacggaaggcctgtctgagggaaagaagaaggagctccgtgaacagcatccatccttaagagacgaagggacatcagacgataaggtgtttctcgcatgtcgaggcgcaggacagtgtcctctgtcagcgcccgccggtactatggaccgtacgcgggtgctgcaggcttcccaggctggaccacctttcttctgctacacctgcggaaagtgttttagccgccgcagctatctgtattcccatcagtttgtacacaatcccaagctcactaattcctgctctcagtgcggcaagctgtttcgctccccaaagagcctttcataccaccggaggatgcatcttggagaacgcccgttttgttgcaccctgtgcgacaagacttattgtgacgccagtggcttgtcccgacatagaagggttcatttaggctatcgtccccactcatgcagcgtgtgtgggaagtccttccgggatcagtccgagctgaagagacaccagaaaattcatcagaatcaggaacctgtagacggcaatcaagagtgtaccttacggattcctggcacccaggcagagtttcagacccctatcgccaggtcccagcggtctattcagggcctcctcgacgtgaatcatgcccccgtggcccgctcccaggagcccatcttccggacagaaggacctatggcccagaaccaagccagcgttctcaaaaaccaagcacctgttacgaggacacaggcgccaattacaggtacgctgtgccaggatgcacgatccaacagtcaccccgtgaagccatcccggctgaacgttttctgttgccctcattgtagcctgactttctcaaagaaaagctacctctcccgacaccaaaaggcccacctaacagagcctcccaactactgtttccactgcagcaagtcctttagttcattcagtcgtctggttcgccaccagcagacccactggaagcagaagagctatctctgcccaatttgcgatctcagtttcggggagaaagaggggttgatggaccactggcggggctacaaaggaaaggacctgtgccagagcagccatcacaaatgtagggtgattcttgggcagtggctgggcttcagccatgacgttcctaccatggccggagaggagtggaagcatgggggggatcagtcaccaccgcggattcacactcctaggaggagaggcttacgggagaaggcttgcaaaggggacaagacaaaagaagctgtgtcaattttaaagcataagtag

SEQ ID NO: 141502 - DNA, 1551 bp, synthetic construct
  misc_feature 1..1551: note = Description of Artificial Sequence: Synthetic coding sequence
  source 1..1551: mol_type = other DNA
atgttcgaacagctgaagcctattgaaccaagggattgctggcgggaggctagggtaaaaaagaaacctgtcactttcgaggacgtggctgtgaatttcacccaggaggagtgggactgccttgatgcctcgcagcgagtgttgtaccaagacgtgatgtccgaaacattcaagaacctcacttccgtcgcccgtattttccttcataaacccgaacttatcaccaaactcgagcaagaagaggagcagtggagagaatttgtgcatctgccaaacactgagggtctctctgagggaaaaaagaaggagctaagagagcagcaccctagtctgagagacgaggggacttctgacgataaggttttccttgcgtgccggggggcaggccaatgtcctctctcagcacccgctgggacaatggacagaactagggtactacaagcaagccaagccgggccgcctttcttctgctacacctgcggtaagtgctttagtcgcaggtcttatctctatagccatcagtttgtgcacaacccaaagctcacaaattcgtgcagtcagtgcggtaagctgtttaggagccccaaatccctctcttaccataggcgaatgcacctgggcgaacgccctttttgctgcactctgtgtgacaagacatactgcgatgcttcaggtttgagcaggcatagacgagtgcacctgggctaccgaccacatagctgttccgtgtgcggcaagagcttcagggatcagtccgaactgaagcgccatcaaaaaattcatcagaaccaggaaccagtggacggcaaccaggagtgcacactccgaattcccgggacgcaggccgagttccaaacgccgatagcacgcagccagcgatctatccaaggcctgctggatgttaatcacgcgccagtggccagatcgcaggagccaattttccggaccgagggccctatggctcaaaatcaggccagtgttctcaaaaatcaagcccccgtaactaggacccaggcaccgattacaggtaccttgtgtcaggacgccagatcaaactcacatccagtaaaaccctcaagactgaatgtgttctgttgcccacattgctccttaacatttagcaagaagtcatatttgtcaagacaccaaaaggcccacttgaccgagcctccaaactactgctttcactgcagtaaaagctttagctcattctcaaggctggtcagacaccagcaaacccactggaagcagaaatcctatctatgcccaatctgtgatctaagctttggagagaaagaagggctcatggatcattggagagggtacaaaggcaaggatctttgtcagtcctctcatcacaaatgtagggtcattctcggccagtggctcgggttctcacacgatgtgccaacgatggcaggcgaagagtggaagcacggcggcgatcagagccctcctagaatacacacccctagacgtcgaggtctccgagaaaaagcctgcaagggggacaagactaaagaagcggttagcatcctgaaacacaagtag

SEQ ID NO: 141503 - DNA, 1551 bp, synthetic construct
  misc_feature 1..1551: note = Description of Artificial Sequence: Synthetic coding sequence
  source 1..1551: mol_type = other DNA
atgtttgaacagctgaaacccattgaacctagggactgttggagagaggcccgggtgaaaaaaaaacccgtgacctttgaggatgtggctgtcaatttcacgcaggaagagtgggattgcttagacgcatcccagcgcgtcttgtatcaagatgtaatgagcgagacttttaaaaacctgacatccgtagctcgaatctttttgcacaaacccgagttgatcaccaaattggaacaggaggaggaacaatggcgggagttcgttcacttgcctaataccgaaggactgtccgagggcaagaagaaagagctgcgggagcagcatccctctttacgcgacgaggggacctctgatgataaagtgttcttagcatgccgcggagcggggcaatgtccactgagcgcaccagccggaacgatggaccggaccagagtcctgcaagctagtcaggcaggacctcctttcttctgttatacctgcggaaagtgctttagcagaagatcgtatctctattcacatcagtttgtgcataatccgaaactaaccaattcctgtagccagtgtggcaagctgtttcgttcgcctaagtccctgtcataccataggagaatgcatctgggagagagacctttctgttgcactctctgtgacaaaacctattgtgacgcctcggggcttagtcgccatagacgcgtgcatctggggtatagacctcactcgtgctccgtgtgcgggaagagttttagagatcaatcagagctcaagcgtcatcagaagatccatcaaaaccaggaaccagtcgacggcaaccaggaatgtaccctgcgtattccaggaacccaggctgagttccagacgccaatagccagatcacagcgtagcatccagggcctgctggatgtgaatcacgctccagtggcgcgcagccaggaacccatctttcggacagaaggcccaatggcacagaatcaggctagcgtgttgaagaatcaggccccggtgacacggacacaggcccctataacaggtactctttgtcaagatgcaaggtctaactcacatcccgtcaagccatctcggctgaacgtcttttgttgtccacactgcagcctgactttttcaaagaaaagttatctgtccaggcatcagaaggcccatctcactgaaccaccaaattactgttttcattgctccaagagtttctcgtctttctcaagactggtcaggcatcagcagacacactggaagcagaaaagttacctttgcccaatctgcgacctgagcttcggagagaaggaaggcctaatggatcactggaggggctataaagggaaggacttatgccagtctagtcaccataaatgcagagttatcctaggtcagtggttgggcttttcgcacgacgtgcctaccatggccggtgaagaatggaaacatgggggcgatcagtcaccccccagaatccatacgcctcgaaggagggggctgagggaaaaggcctgcaaaggcgataaaacgaaagaagcggtctccatactcaagcacaaatag

SEQ ID NO: 141504 - DNA, 636 bp, synthetic construct
  misc_feature 1..636: note = Description of Artificial Sequence: Synthetic coding sequence
  source 1..636: mol_type = other DNA
taggcccggtcccaggaacctattttcaggaccgaaggcccaatggcccaaaaccaagcatccgtgctgaaaaaccaagcccccgtgacacggacacaggcacccatcacaggaactctctgccaggatgcccgaagcaattcccatcccgttaagccatcccgccttaatgtgttttgctgccctcactgcagcttaacatttagtaagaaaagttacttaagcaggcatcaaaaagcccacctgaccgagcctccgaattactgctttcactgtagtaagtctttttcaagtttttcacggctggtgcgacaccaacagactcactggaaacagaagagctacctgtgtccgatatgcgatttgtctttcggcgagaaagaaggtctgatggaccattggcggggatacaagggtaaggatctctgccagagctctcatcacaaatgtagggtgattttagggcagtggctgggtttttcacatgatgtgcccaccatggctggagaggaatggaagcacggtggcgaccagtcgcccccgagaatccacactccccgacgcagaggactcagagagaaggcctgtaaaggcgataaaaccaaggaagcagtaagtatcctcaagcataagtag

SEQ ID NO: 141505 - DNA, 1551 bp, synthetic construct
  misc_feature 1..1551: note = Description of Artificial Sequence: Synthetic coding sequence
  source 1..1551: mol_type = other DNA
atgttcgaacagctgaaaccaattgagccaagagactgctggagagaggcaagagttaagaaaaagcctgtcactttcgaagacgtggccgtgaacttcactcaggaggagtgggactgccttgatgccagccagcgggtgttgtaccaagatgtaatgagcgaaacgtttaaaaacctaactagcgtggcccgaattttcttacataaacctgaacttattaccaaacttgaacaagaggaggagcagtggcgagaattcgtccacctgccaaacacggaaggcttaagtgaagggaaaaagaaggagttaagagaacagcaccctagtctccgcgacgaagggaccagcgacgataaagtgtttctggcatgccgaggtgctgggcagtgtccactctctgcacctgccggaaccatggatcggacaagagtactacaagcgagccaggcaggccccccatttttctgctatacctgtgggaaatgtttcagtcggcgctcctacttgtacagccatcagttcgtgcacaaccctaaattgactaacagctgctcccagtgtgggaagctgttccgatcccctaagtcactatcctatcaccgcagaatgcacctgggggagagacccttctgctgtaccctgtgtgataagacatattgtgacgcttcggggctctcgagacacaggcgtgtgcacttgggctataggccccactcctgtagcgtttgtggtaaatccttccgcgaccaaagcgaactcaagagacaccagaagattcaccagaatcaggaacctgtggacgggaatcaggagtgcacattaagaataccaggcacccaagctgagttccagacaccaatcgcccggtcccagcggtctatccagggcttgttggatgtcaaccatgcccctgtggcccgatcacaggaaccaatcttcagaaccgaaggacccatggcccagaatcaagcctctgtactcaaaaaccaagctccggtaacgaggacacaggctcctatcacagggacactctgccaggacgctcgaagtaattcccacccggtgaagccttctcgcctgaacgtgttttgctgcccacattgtagcctgacattttctaaaaagtcttatctgtctagacaccagaaggcccatctgaccgagcctcccaattattgttttcattgtagcaaatccttctcatctttttctcgtctggtcagacaccagcagacacactggaaacagaagtcctatctttgccccatatgcgacctcagtttcggagaaaaagaagggctgatggaccactggagagggtataaaggaaaagatttgtgtcaatccagtcaccataagtgtcgagtcattttagggcagtggctcggtttttctcatgacgtgcctacgatggcaggagaggaatggaagcacgggggagaccaatcgcctcctagaatccacaccccccggcggcggggtctcagggagaaggcctgtaaaggagacaagacaaaggaggccgtgtctatcctcaaacacaaatag

SEQ ID NO: 141506 - DNA, 1551 bp, synthetic construct
  misc_feature 1..1551: note = Description of Artificial Sequence: Synthetic coding sequence
  source 1..1551: mol_type = other DNA
atgttcgaacagttgaagcctattgaaccgagagactgctggagggaagcccgggtgaaaaagaagcccgtcaccttcgaggatgttgcagttaatttcactcaagaagagtgggactgcctggatgcaagtcagcgggtgctgtaccaggacgtgatgagcgagactttcaagaatctcacatccgtggctagaatctttctccacaagcctgagttgatcaccaaactggaacaggaggaggaacagtggcgcgagtttgtgcacctgcctaatacagaaggtctgagcgaggggaagaaaaaggaactgagggaacagcacccatccctcagggacgaaggcacgtcagatgataaggtgtttttagcctgccggggtgcaggtcagtgtcctctatctgctccagccggaacgatggataggaccagagtcctgcaggccagtcaggctggccctcccttcttctgctatacgtgtggcaagtgtttctccaggagaagctacctttactctcaccagttcgtgcacaatccaaagctgaccaactcttgttcccagtgcggcaaactattccgcagccctaagtccctttcctatcaccggcggatgcatcttggggagcgcccattctgctgcacactctgtgataaaacctactgcgacgcctctgggcttagtagacacaggcgagttcatctgggttatcgtcctcatagctgcagtgtttgtggaaaaagcttcagggatcagtccgaacttaagagacaccaaaaaattcatcaaaatcaagaaccagtggacggcaaccaggagtgcacgctgaggatccctggaacccaggccgagtttcagactcccatcgcccggtcccagcggtccatacagggactgctcgacgttaaccacgcacccgttgcccggtcccaggagcctattttccgcacagagggaccgatggcccaaaatcaggcctctgtcttgaagaatcaggccccggttaccagaactcaagcaccgataacaggaacactttgccaggacgcgcgtagcaactctcatcctgtcaagccttcaaggctgaatgtgttctgttgtccgcattgtagcttgacattctcaaaaaagagttacctgagtaggcaccagaaggcacacctgactgagcctccaaattattgcttccattgctccaagagcttcagcagcttttctcgcctggtccgccatcagcagacccattggaagcagaagagttacctctgcccgatttgtgatctgagcttcggagagaaggagggattgatggatcattggcgcgggtataaggggaaagatttgtgtcaatcctcccaccacaagtgtagggtgattctggggcagtggctggggttctcccacgacgtccctacgatggcaggggaggagtggaagcatggtggggatcaatccccacccagaatccatactccccgcagacgggggctgagagaaaaggcctgtaagggggataaaaccaaagaagcggtcagcattctgaaacataagtag

SEQ ID NO: 141507 - DNA, 1551 bp, synthetic construct
  misc_feature 1..1551: note = Description of Artificial Sequence: Synthetic coding sequence
  source 1..1551: mol_type = other DNA
atgttcgagcaactcaagccgattgagcctagagactgctggagagaagctagagtcaagaaaaaacctgtcacttttgaagacgtagctgtgaacttcacccaggaagaatgggactgtttggacgccagtcagcgagtgctgtatcaggacgtgatgtcggagacgttcaagaacctcacttccgtggccagaatctttctccacaaaccagaattaatcaccaagctggaacaggaggaggagcagtggcgggagttcgtacacttaccgaacaccgagggcttatctgaggggaaaaaaaaggaactgcgcgaacaacacccttcactacgtgatgaagggacatccgacgacaaggtcttccttgcctgccggggtgcaggccagtgccccttaagcgcccctgcaggaaccatggaccgcaccagggtgttgcaggcctcgcaggcaggcccccctttcttctgctatacgtgcggaaaatgcttttcacggcggagttatctgtattctcaccagttcgttcacaatcccaagttgacaaactcatgcagtcagtgtggcaagctgttcagatcacctaagagtctgtcataccaccggaggatgcacctgggagaacggcctttttgctgcacactgtgcgacaaaacctattgcgatgccagcggcctgagcaggcaccgcagggtacatcttggctacagaccgcactcatgctctgtgtgtggcaagagtttccgggatcaaagcgagctcaaacgccatcaaaagatccaccagaatcaggaacccgtggatggcaaccaggagtgcacactgcgcatccccgggacccaggccgagttccagactcccatagctcgatcccagagaagtatccaggggctcttggatgttaaccatgccccggtcgctcgatcccaagagcctatattccgaactgaaggcccgatggctcagaatcaggccagcgtgctaaagaatcaagctccggttacacgcacacaggcgcctattaccggaacgctgtgccaggacgcgaggagtaattctcatcccgtaaaacctagccgtctcaatgttttctgctgcccacattgttccctcacattcagcaaaaaatcctacctgagtcggcatcaaaaagcgcaccttactgagcccccaaactattgctttcactgttccaagtcttttagctccttctcccgccttgtgcggcaccagcaaacgcattggaagcagaagagctacctctgtcccatctgcgacctgagctttggcgaaaaagaaggcctcatggaccattggcggggctataaaggcaaagatctatgccaaagttcacatcataaatgtagggttatcctcgggcagtggttaggcttcagccacgacgtgcccacaatggctggtgaggaatggaagcacgggggagatcaaagcccccctagaattcatacaccacgccgcagaggcttgcgcgagaaggcatgtaagggggataagactaaagaagcggtgagtatactcaaacataaatag

SEQ ID NO: 141508 - DNA, 1551 bp, synthetic construct
  misc_feature 1..1551: note = Description of Artificial Sequence: Synthetic coding sequence
  source 1..1551: mol_type = other DNA
atgtttgagcagctgaaaccaatcgaacctagggattgttggcgggaagccagagtaaaaaagaaacctgtaacttttgaggacgtcgctgttaattttacgcaggaggaatgggactgcctggatgcatcacaacgcgttctttaccaggatgtaatgtccgaaactttcaaaaatctcactagtgtggcccggatctttctccacaaaccagagcttattactaagttagagcaggaagaggagcaatggagagagttcgtgcacctgcccaacactgaggggctttcagaaggcaagaaaaaagagctccgcgaacagcacccaagcctgcgcgacgagggaacaagtgatgacaaagttttcctggcttgtcgcggcgctggccagtgccccctttctgccccagctggcacgatggatagaaccagagtgctgcaagcaagccaggctggacctcctttcttctgctatacatgtggaaaatgcttctcccggcgctcttacctttattctcatcagtttgttcacaaccccaagcttacaaactcatgctctcagtgcggcaaactcttcaggtccccgaaatccctgagttatcatagaaggatgcacttgggagaacgcccattttgctgcacactctgtgataaaacctattgtgatgcatccggcctctctcggcacaggagagtgcacctgggctatcgcccgcatagttgcagtgtttgcggaaaaagctttagagaccagtctgagcttaagcggcaccagaagatccatcaaaaccaagagcccgtcgacggtaaccaggagtgtactttgagaatacccggaacacaagcggagtttcagactccaattgcaaggtcacagcggtccatccagggcctccttgatgtgaaccacgctccagttgcgagatcccaggagccaattttcaggacagagggaccgatggcccagaatcaagccagcgtcctcaaaaatcaagcccccgtcactcggactcaggctcctatcaccggcacactgtgccaggatgcccgcagtaattcacacccagttaagcctagcagattaaatgtgttttgctgtccccactgttcgttaacctttagtaaaaaaagctatctgtccagacatcagaaggcccatctgacagaaccgccaaactattgtttccactgcagcaagagtttttcatcttttagcaggctcgtgcgccaccagcagactcactggaaacagaagtcctatctctgtcctatctgcgatctgtcttttggggaaaaagagggactaatggaccactggagaggttacaaggggaaggacctctgccagtcctctcaccacaagtgccgcgtgatcctgggtcagtggttgggcttctctcacgatgtcccaactatggctggggaggagtggaagcatgggggcgaccagtctccaccaaggatacataccccaaggcggcgcgggctgcgtgaaaaggcctgcaagggagacaaaaccaaagaagccgtctcaattctgaagcacaagtag

SEQ ID NO: 141509 - DNA, 1611 bp, synthetic construct
  misc_feature 1..1611: note = Description of Artificial Sequence: Synthetic coding sequence
  source 1..1611: mol_type = other DNA
atgttcgagcagcttaagcccattgagcccgtccaaaagactcttccatgggtaggggaggtggctgcaacactgcaggaggctatgaagagggattgttggcgcgaggcacgggttaagaagaaacccgtgacatttgaagatgtggctgtgaatttcactcaagaggaatgggactgtttggatgcttcccagcgggttctttaccaggatgtcatgagcgaaacgtttaaaaatttaacatccgtggctcgaatattcttacacaagccagaactaattacaaagctcgaacaggaggaggaacagtggcgcgagtttgtgcatttgcccaatactgaggggctctctgagggcaagaaaaaagaactgcgggaacaacatcccagcttgagagatgaggggacctctgacgacaaggtgttcctggcctgtcggggggcgggtcagtgccccctttccgcccctgccgggactatggacagaactcgggtgctgcaggcatcccaggccgggcctccctttttttgttacacctgtggcaagtgcttctcacgccgatcttacctgtactctcatcagttcgtacataatccaaagctgactaattcttgctcccaatgcggcaagctctttagatcccccaagtctttaagttatcataggaggatgcaccttggggaaagaccattttgttgcacactttgcgataagacgtattgcgacgcttcagggcttagtagacacagacgcgttcatcttggatatcgcccccactcttgcagtgtatgtggtaaaagtttccgcgaccagtccgaactaaagcggcaccagaagatccaccaaaatcaggaaccggtggacggtaaccaagagtgcacgttgcgtatccccggcacgcaggcggagttccagaccccgatcgcaagatctcagaggagcattcaggggcttcttgatgtgaatcatgccccagtggccagatcccaggagccaatcttccgcactgaaggtccaatggcccagaatcaggcctctgtactcaaaaaccaggctcctgtgactagaactcaggccccgattaccggcaccttgtgtcaggacgctaggtccaactcgcacccggttaagcctagtaggctgaatgtgttttgctgcccacactgctccttgactttcagcaaaaagtcgtatctgtcaaggcatcagaaggctcacctcacagagccccctaattactgttttcactgttcgaaatccttttccagtttcagccgactggtgaggcatcagcagacccattggaaacagaaatcctatctgtgtccgatatgcgacctgagctttggtgagaaggaaggattgatggaccactggaggggctataaaggaaaagacctctgtcagagcagtcatcataagtgcagagtgatcctcggacaatggctgggtttttcccatgacgtgccaacaatggccggagaagaatggaagcatggtggcgatcaaagcccacctcgcatccatacgccccggagacggggattaagggaaaaggcctgtaaaggggataaaactaaggaagcagtaagcatacttaagcacaagtag

SEQ ID NO: 141510 - DNA, 1551 bp, synthetic construct
  misc_feature 1..1551: note = Description of Artificial Sequence: Synthetic coding sequence
  source 1..1551: mol_type = other DNA
atgtttgagcagctcaaacctattgagcctcgtgattgctggagagaggccagggtgaagaaaaagcctgtgaccttcgaagacgtagccgtcaactttacacaggaagagtgggattgtctggatgcatcccaacgcgtattgtaccaggacgtaatgtcagaaacgtttaaaaatctgactagcgtggcccgcatattcctgcacaaacctgagctgatcaccaagctcgaacaagaagaggagcagtggcgcgaattcgtgcacctgcccaacaccgagggcctctccgaggggaaaaagaaggagctgagagaacagcatccatccctaagggatgagggaactagcgatgacaaggtcttcttggcttgccgcggagctggtcaatgtcctctttccgcccccgccgggactatggataggacacgcgttctgcaggcttctcaggctggtccgccgttcttctgctacacatgtggaaaatgcttttccaggcgaagctacttgtactctcatcagttcgtccataatcccaagctgactaacagctgctctcagtgcggtaaactgttcaggtctcccaaatcactcagttatcacagaaggatgcacctgggggagcggcctttctgttgtaccctgtgtgataagacctactgtgatgcttcaggtctgagcagacacagacgggtgcatttggggtaccgaccgcattcttgcagcgtctgcgggaaatcatttagggatcagtccgagttaaaaaggcaccagaagatacaccagaaccaggaaccagtggacgggaatcaggagtgtacgttgagaattccaggaacgcaggctgagttccagacacccatagcccggtcccaaaggagtatacaaggcctactggacgtgaaccacgctccagtagcgagatcccaggaaccgatttttcgtacagaagggccgatggcccagaatcaagctagtgtcttaaaaaaccaggcacctgtgacacgcacccaggcccccataacagggactctgtgtcaagatgcgcggtctaactcccatcccgtcaagccttccaggctcaacgtcttctgctgtccccattgttccttaactttctctaaaaagagctacttgagtcgtcatcagaaagctcacttgaccgagcccccaaactattgcttccactgtagcaagagtttctccagcttttccagattagtgcgccatcagcagacacactggaagcagaagagttacctatgtcctatttgcgatctgtcttttggcgagaaagaagggctgatggatcactggagaggctataaaggcaaagatttgtgccagtcttctcatcataagtgtagagtcatcctcgggcaatggttgggctttagccatgacgtgcctactatggccggcgaagagtggaagcatggcggtgatcagtcaccaccacgtatccacactccccgcaggcgggggctgcgcgagaaggcctgcaagggagataaaactaaagaggctgtgtccattcttaagcataaatag

SEQ ID NO: 141511 - DNA, 1356 bp, synthetic construct
  misc_feature 1..1356: note = Description of Artificial Sequence: Synthetic coding sequence
  source 1..1356: mol_type = other DNA
gcgggcggctcaccagaaagcctgttgttctttcagaagcccgtgacttttgaagatgtggcagtgaactttacacaggaggagtgggactgcttggatgcctcccagcgcgtgctctaccaggacgtaatgtccgaaaccttcaaaaacttaacatccgtggcacgaatcttcctccataagccagaacttatcactaaacttgagcaggaagaggagcagtggcgcgagacccgcgtgttgcaggcaagccaggctggacctccatttttttgttacacttgtggaaaatgtttttctcgccgatcttatctgtactcacaccaatttgttcataaccctaaactgaccaatagctgctctcagtgtggaaagcttttccggagccccaaatcattatcttaccacagaagaatgcatctgggtgagcgccccttttgttgcacactctgtgataagacttactgtgacgcctcgggactttccagacatcgccgagtacacctgggctaccgtccccatagctgctccgtttgcgggaagtccttcagggatcaatcagagctcaagagacatcagaaaattcaccagaaccaggagccagtggacgggaatcaggaatgtactttacgcataccaggtactcaggcagagtttcagacccccattgctcgaagtcagagatcgattcagggacttcttgacgttaaccatgcccccgtggcaagaagtcaagaacccatattccggactgaaggccctatggcgcagaatcaggcctcagtgcttaagaatcaagcaccggtgacacgtacgcaggcgcccatcaccggcactctgtgtcaagacgcacggtcaaattctcatccggtgaaaccaagcaggctcaatgtattctgctgccctcactgctctctgacatttagcaagaaatcttatctgtccagacaccaaaaagcccatctgaccgagccacctaattattgttttcattgcagcaagagtttctctagcttcagcagactcgtccgacaccagcagacccactggaagcagaagagctatctgtgtcctatctgcgacctcagcttcggtgagaaggaggggctgatggaccattggaggggatacaagggcaaggatctctgtcagtcttcacaccacaagtgtagagtcatcctcggtcagtggttgggattcagccacgacgtgcccaccatggctggcgaggaatggaaacatggaggagaccagtccccccctagaatacacacacctagaagaaggggccttcgggaaaaggcctgtaaaggcgataagacgaaagaggcggtttccattctcaaacacaaatag

SEQ ID NO: 141512 - DNA, 1551 bp, synthetic construct
  misc_feature 1..1551: note = Description of Artificial Sequence: Synthetic coding sequence
  source 1..1551: mol_type = other DNA
atgttcgaacagctaaagccgattgaaccaagagactgttggagagaggcccgagtcaagaagaagcctgtcaccttcgaagatgttgccgtcaattttacacaggaggagtgggactgcttggacgctagccagagggtgttgtaccaagacgttatgagcgagaccttcaagaacctaacaagtgtggcccgaatctttctccacaagcctgagctgattaccaaactcgagcaggaggaggaacagtggagagaattcgtacatctgccaaataccgagggattgtccgaggggaaaaaaaaggaattgcgagagcagcatccttctctgagggacgaaggcactagcgatgataaggtgttccttgcttgccggggcgctggacagtgtccgctaagtgccccagcagggaccatggacaggacacgggttttacaggcctcgcaggccggaccgcccttcttttgctacacgtgcggcaagtgcttctcacggcgctcttacttgtacagccatcagtttgtgcataaccccaaactgacgaacagctgtagccagtgcggaaagttgttccgcagccccaaatcccttagctatcatagacgaatgcacctgggggaaagacccttctgttgcaccctgtgcgataagacctattgcgacgcatccggactgtccagacataggcgggtgcacttagggtaccgacctcactcgtgttccgtatgcggcaagagcttccgcgaccagagtgagcttaaacgacaccagaagattcaccagaatcaagagcctgtggatggaaatcaggaatgcacactgcgcatcccaggcactcaagcagaatttcagactccaattgcacgctctcagagatcaatccagggtctcctggatgtgaatcatgctcccgtggcgcgttcgcaagaacccattttcagaaccgaagggccaatggcccagaaccaagcaagcgtgctgaagaatcaggctcctgtgacccggacacaggcgcctattaccggaactttatgccaagacgctaggtccaatagccaccctgtcaagccttcaagattgaatgtgttctgctgcccccactgtagcctgacattttcaaagaagtcctacctgtcccgccaccagaaggcgcacctgacggagcctccaaactactgttttcattgttctaagtcattttccagcttttcacgcttggtccgacaccagcagacccattggaaacaaaagtcctacttgtgtcccatatgcgacttatccttcggcgagaaggagggcctaatggatcattggcgggggtacaaggggaaggacctgtgccagagctcccaccataagtgtagagtgatattgggccagtggctaggcttcagtcatgacgtacccacgatggctggcgaagagtggaaacacggcggcgaccagtctccgcctagaattcataccccccgccggcgaggcctgagagagaaagcttgcaagggcgacaaaacaaaagaagcagtgtccatactcaagcataagtag

SEQ ID NO: 141513 - DNA, 1611 bp, synthetic construct
  misc_feature 1..1611: note = Description of Artificial Sequence: Synthetic coding sequence
  source 1..1611: mol_type = other DNA
atgtttgagcagcttaaacccatcgaacctgtccagaagacgctgccctgggtcggtgaggttgccgcgacactgcaagaggcgatgaaaagagactgctggcgcgaagctcgggtcaagaaaaagccggtgaccttcgaagacgttgccgtgaatttcacgcaggaggagtgggattgccttgacgcaagccagagggtgctctaccaggatgttatgagtgaaacattcaagaacttgacaagcgtggcacgtatttttctacacaaacccgagctgatcactaaactggaacaagaagaggaacagtggagagaattcgttcatttgccgaatactgagggactcagcgaagggaagaagaaagagctgagggagcagcacccaagcctcagagatgagggcacctctgacgataaggtcttccttgcttgtcggggtgccggtcagtgcccgctgtcagctcctgccggaaccatggatagaactcgtgtgcttcaggcttcccaagccggaccgccctttttttgctacacgtgcggcaaatgcttctccaggcgctcttatctgtacagccaccagttcgtccacaaccccaagctcacaaactcctgcagccaatgtggaaaattatttaggtctccaaagtctctgagttatcatcgcagaatgcatctcggcgagcgcccattctgttgcactctctgtgacaaaacctattgtgacgccagcggtctctcaagacaccgccgcgtgcatttaggctaccgacctcattcatgttcagtgtgcggcaagagtttcagggaccagtccgagctcaagcgacaccagaagatacatcagaatcaggagccagtggatggtaaccaagagtgcaccttgcgcatccctggaactcaagccgaattccagaccccaatagctcgcagccagcgctccatacagggattgctagatgtgaaccacgctcccgtggctaggtcacaagaaccaatttttcggactgagggaccaatggcacagaatcaggcaagcgtgctaaaaaatcaggccccggtgacgcgcactcaggcccccatcacaggcactctttgtcaggacgctcgctccaattcacacccagttaaaccctcccggctcaatgtgttttgctgtccccattgtagcctaactttctcaaaaaaaagctatctgtccaggcatcagaaggctcacctcaccgagccacctaattactgctttcattgcagcaagagtttctcttcatttagtaggctggtcaggcaccagcagactcattggaagcagaagtcatatctgtgtccgatttgtgatctgtcgttcggcgaaaaggaaggactcatggaccactggaggggctacaaaggtaaagacctttgccagagtagccatcataagtgcagagttatcctaggacagtggctgggatttagccatgacgtaccaaccatggccggcgaggaatggaaacacggtggcgaccagtctccccccaggatccacacaccaagaagaagggggttaagagagaaggcttgcaagggcgataagacaaaagaggccgtgagcatcctgaaacacaagtag

SEQ ID NO: 141514 - DNA, 1611 bp, synthetic construct
  misc_feature 1..1611: note = Description of Artificial Sequence: Synthetic coding sequence
  source 1..1611: mol_type = other DNA
atgttcgaacaactcaaacctattgagcctgttcaaaagactcttccttgggtgggagaggtggccgccacactacaggaggctatgaaaagagactgttggcgggaagctcgcgtcaagaagaagcccgtgacgttcgaggatgtggctgtgaacttcacgcaggaggagtgggactgcttggatgcctctcagagagtgctctatcaagacgttatgtctgagacctttaaaaacttgaccagcgtggcccgtatatttctgcacaaaccagagctcattacaaagttggagcaggaggaggagcagtggagggaatttgttcatttacccaatactgaggggctcagcgagggcaaaaagaaagagctgcgggagcagcatccctcgctacgtgacgaggggacttccgacgacaaagtcttcctggcttgccgaggcgcgggacagtgtcctttatcagctccggctggcacaatggaccgcacccgggtgctccaagcatcgcaggccggtccaccttttttttgctatacgtgtggtaaatgtttctcccgcagaagttatctgtattcacatcagttcgttcacaatcctaagctcacaaattcgtgcagccagtgtgggaaattgttccgaagcccaaagagcctgtcctatcatcgaaggatgcacttaggggagaggcctttctgctgcacgttatgtgataaaacatactgcgacgcttcagggctgtctagacatagacgagttcacttgggttacagaccccattcttgctccgtgtgcggaaagtcattccgcgaccagagcgagttgaagcgccaccagaagatccaccagaatcaagaaccagttgacggaaaccaggagtgcacactaagaatacccggcacacaggctgagttccaaactcccatcgctcgatcccagcgcagcattcaaggattgctggacgttaaccacgccccggtagcaaggtctcaagaacctatcttccgaactgagggccctatggcgcagaatcaggcttccgtgctgaagaatcaggcacccgtgaccaggactcaggctccaatcaccgggactctttgtcaggacgctagaagtaacagccatcctgtgaagccgagtcgtctgaatgtgttctgctgcccgcactgttcactaacattcagtaaaaaaagctatctaagcaggcaccaaaaggcccacctgacagaaccaccaaactattgctttcactgttccaagagcttctcgagcttcagcaggctggtccgacaccagcaaacacactggaagcagaagtcatatctttgtccaatttgcgatctgtcattcggagaaaaggagggcttgatggaccattggcgaggctataagggcaaggatctgtgtcaatcatcccaccacaagtgtcgtgtcattttagggcagtggctgggattttcacacgacgtccctaccatggccggtgaggaatggaaacacggcggggaccagagccccccgaggatacacacacctcgacgcaggggactcagagagaaagcgtgtaagggcgacaagaccaaagaagcagtttccatcctaaagcacaaatag

SEQ ID NO: 141515 - DNA, 1611 bp, synthetic construct
  misc_feature 1..1611: note = Description of Artificial Sequence: Synthetic coding sequence
  source 1..1611: mol_type = other DNA
atgttcgaacagctgaaacctatagaacctgttcagaagactctgccatgggtgggagaagtagctgctactctgcaggaagcgatgaagagagattgttggcgtgaggctcgcgttaaaaagaagcctgtaacattcgaagacgtggcggtgaatttcacccaagaggagtgggactgcttagatgcctctcagcgtgtgctttatcaagacgtcatgagcgagacgttcaagaatctcacatccgtggcacgcatctttctgcacaaacccgagctgattacgaaattagagcaagaagaggagcagtggcgcgaattcgtccacctccctaacacagaaggcctgagtgaggggaaaaagaaagagctccgtgaacagcacccttccttgcgggacgagggcacctccgatgacaaagtgtttttagcctgtagaggcgctggtcagtgccccctctcagcccctgcaggcacaatggataggacgagggtgctgcaagcatctcaagctggcccaccatttttttgctatacatgtggtaaatgcttctccagacggtcatatttgtactcacaccagtttgtccataatcctaaattaacaaacagctgctcacaatgtggtaaactgtttagaagccccaaatctctgtcttaccaccggaggatgcatctcggcgaaaggcccttctgctgcacactgtgcgataaaacatattgcgacgctagtggcctgtcccggcatagacgagtgcaccttggctacaggccccatagctgctctgtgtgtgggaagtctttccgggatcagtctgagctcaaaaggcaccagaagatccatcagaaccaagaacccgttgatggtaaccaagaatgcaccctgcgcatcccgggtacacaagcagaattccaaactcctattgcgagaagccaacggagtattcaaggtctgctagacgtcaaccatgcccctgtggcaaggagtcaggaacctattttccgaactgagggccccatggctcaaaatcaggcttctgtactgaagaatcaggctccggtcacgagaacccaagcccccataacaggtacgctttgtcaggacgctaggtctaactctcatcctgtaaagcccagccggttgaatgtgttttgttgcccccattgttcactgactttttctaaaaaatcctacctgtcaagacaccaaaaggcacacctgaccgaaccaccaaactattgcttccattgtagtaaatccttctcttcttttagcaggctggtgagacatcaacagacccattggaaacaaaaaagttatctgtgccctatatgcgacctcagcttcggagagaaagaaggcttgatggatcattggagagggtataaaggcaaggacttgtgccagtccagccatcacaagtgtagagttattctagggcaatggttgggattcagccacgatgtaccaaccatggcaggcgaagaatggaagcacggcggcgatcagtctcccccacggattcacaccccaagacgccggggactgcgggaaaaggcctgcaaaggggacaagaccaaggaggcagtctcaatcctgaagcacaaatag

SEQ ID NO: 141516 - DNA, 1611 bp, synthetic construct
  misc_feature 1..1611: note = Description of Artificial Sequence: Synthetic coding sequence
  source 1..1611: mol_type = other DNA
atgtttgagcaactgaagccgattgagcctgtgcagaagactctcccatgggtaggggaagtggccgccaccctgcaggaggctatgaagagggactgctggcgcgaggcacgagtaaagaaaaagcccgtgacgtttgaagacgttgccgtgaactttacgcaggaggagtgggattgtctggacgcctctcagcgcgtgctgtaccaggatgtgatgagcgagaccttcaagaatctcactagcgtggcccgcatattccttcacaagcccgagctgatcactaaactggagcaggaggaggaacagtggcgcgagtttgtgcatctgcccaataccgaagggctaagcgagggtaaaaaaaaggagctccgagaacagcacccaagtctcagggatgagggaaccagcgatgataaagtgttcctggcttgccggggcgctggtcagtgccccctgtcagcgcctgccggtactatggaccgcacccgggtgcttcaagccagccaggccggcccgcccttcttctgctacacatgtggtaaatgtttctccaggaggtcctatctgtatagccatcagtttgtccacaatcccaaactcacaaatagctgcagtcagtgtggaaagttatttcgatcccctaaatcactgagttatcacaggcgcatgcacctgggtgaaagacccttctgctgcactttgtgtgataagacatactgcgatgcatccgggctgtcccgacacaggcgcgtgcacttaggctatagaccacacagttgcagtgtgtgtggcaaatctttccgggaccagtctgagctgaagagacaccagaaaattcaccaaaaccaggaaccagttgacgggaaccaggaatgcaccttgcgtattcctggtacccaggcagaatttcaaacacctattgcacgctcccagcgcagtatccagggcttactagacgtgaaccacgcaccagtggccagatcccaggaaccaattttccgaactgagggaccaatggcccaaaaccaggcttcagtgctgaagaaccaggcccccgtgactcgcacacaggcccctatcactggcaccctgtgtcaggacgcaaggtcaaactctcatcctgtcaaaccttctcgcctcaatgtcttctgctgtccacactgttccctcactttcagtaaaaagagttacctctcgcgccatcaaaaggcccacttgaccgagcctcccaactactgtttccactgctccaagagcttctcttcgttctcccgactcgtcaggcaccagcagacccactggaaacaaaaaagctatctgtgtccaatatgtgacctatcgtttggggagaaggaaggccttatggaccactggaggggctataaaggcaaagacttgtgtcaatcgagtcaccacaagtgccgggtcattttaggtcagtggctcggcttcagtcatgatgtcccaacaatggcgggtgaggagtggaaacacgggggggaccaatccccacctcggattcacacccccagacgcagagggctcagagaaaaagcttgcaaaggggacaagactaaagaggcggtttcgattctgaaacacaagtag

SEQ ID NO: 141517 - DNA, 1551 bp, synthetic construct
  misc_feature 1..1551: note = Description of Artificial Sequence: Synthetic coding sequence
  source 1..1551: mol_type = other DNA
atgtttgaacaactcaagcccatcgagccccgagactgctggcgagaggcacgagtgaagaaaaagcccgtgacttttgaggatgttgccgtgaattttactcaagaagagtgggattgtctggacgcctcccaacgggtcctgtatcaggacgtgatgtccgagacattcaaaaatctcacatctgtcgccaggatctttctgcataaaccagaactgattaccaaactagagcaggaagaggaacaatggcgagaatttgtccatctgcccaataccgaaggtctgtcagagggcaaaaagaaagagctcagggaacagcacccttcccttcgcgatgagggcacttcggacgataaggtgtttctcgcttgccggggagctggccagtgccccttgtctgctccagccgggactatggatcgtacccgtgtattgcaggcctctcaggctgggccgccatttttttgctacacctgcgggaagtgtttcagcagacgctcttacctgtactcccatcagttcgtccacaaccctaaattaaccaactcttgcagccagtgcggtaaattgttcaggagcccgaaatctttatcttaccaccgcagaatgcacttaggcgaacggcccttttgctgcaccctgtgcgataagacatactgcgacgcgtcaggcctgagtcggcatcgcagggtgcaccttggctatcgtcctcattcctgctcagtgtgcgggaaaagctttagggatcaaagcgagctgaagagacatcagaagattcaccaaaaccaggaacctgtcgacggcaaccaggagtgcacactgcgaataccaggcacccaagcggagttccagacacctattgctaggtcccagaggagtattcagggacttctggatgtgaaccacgctccagtcgccaggagtcaagagcccatattccggacggagggccccatggcccagaaccaggcctccgtgctaaaaaaccaggcccctgtgacgcggacacaggctcccatcactggtactctgtgccaggacgcgagatccaactctcatcctgtgaagccttctcgcttaaacgtcttttgctgcccccactgctcgctcacgttttctaagaagagctacttatccagacaccagaaggctcacctgacagaacccccgaactattgcttccattgtagcaaatctttctcaagcttttctagattggtgaggcaccaacaaacccactggaaacagaagtcctatctgtgccccatctgcgatctgtctttcggcgagaaagagggactaatggatcattggcgggggtacaaaggaaaagatctgtgtcaatctagccaccacaaatgcagggtaatactggggcagtggctgggcttctcccatgatgtgccaactatggcaggtgaagaatggaagcatgggggcgatcagagtcctcccaggatccacaccccgcgccgcaggggactacgggagaaggcatgcaagggggacaaaaccaaagaggccgtatcgattctgaagcacaagtag

SEQ ID NO: 141518 - DNA, 1551 bp, synthetic construct
  misc_feature 1..1551: note = Description of Artificial Sequence: Synthetic coding sequence
  source 1..1551: mol_type = other DNA
atgtttgaacaactgaagccaatcgaaccccgagattgctggagggaggcacgcgtaaaaaaaaaacccgtcacctttgaggacgtggcagtaaattttacgcaggaagaatgggactgtttagacgcctcgcagcgtgtactttatcaggacgtgatgagtgagactttcaagaatctcacatctgtggcacgaatctttctgcacaaacctgagttgattaccaaactcgagcaggaagaggagcagtggagggagttcgttcacttacccaatactgaaggactgagcgagggcaaaaagaaggagcttcgagaacagcatccgtcactacgcgacgagggcacgtccgatgataaagtattccttgcttgcagaggggcggggcagtgcccactgtctgctcccgccggtacgatggacagaaccagggtcctgcaggcatcccaggccgggcccccttttttttgctacacctgcggcaagtgttttagcagaaggagctacctttactcccaccaattcgtccataaccccaagctgacaaattcatgttcacagtgtgggaagctttttaggtctcctaaatcgctcagctatcatcggagaatgcatctgggagagcgccctttttgttgtacgctctgcgataaaacatactgtgacgctagcggactttcaaggcatcgccgtgtacatctgggctataggccacattcatgcagtgtgtgcgggaaatcattcagagatcagtcggagctaaaaagacaccagaaaatccatcagaaccaggagcccgtggacggaaatcaggagtgtacattacgtattccagggacacaggccgagttccaaacccccatagcacgctcccagcgctcaatacaaggcctgctggacgtgaatcatgccccagtagcccgatctcaggagccgatattcaggacagagggtccaatggcccagaaccaggcctccgtgttgaagaaccaggcacctgtgaccaggacccaggcccctattaccggaaccctgtgtcaggatgcgagaagcaacagccaccctgtgaaaccctctcgcttgaatgttttttgttgcccccactgttcattgacttttagcaaaaagagctacctctccagacatcagaaggcccacctcacagagccccccaactactgcttccactgcagcaagtcttttagctccttctcacgcctcgtccggcatcagcaaacccattggaaacagaagtcatatctttgtcccatctgcgacctgagtttcggagaaaaagaggggctgatggaccactggagaggctataaaggaaaggacttgtgccagagctcacaccataagtgtcgcgtcatcctgggacaatggcttggattcagccacgacgtaccaacaatggccggggaagaatggaaacatgggggcgaccaatcaccacccaggattcatactccgcgtaggaggggcctgcgcgagaaagcatgtaaaggagacaagaccaaagaagcagtaagtatcctgaaacacaaatag

SEQ ID NO: 141519 - DNA, 1611 bp, synthetic construct
  misc_feature 1..1611: note = Description of Artificial Sequence: Synthetic coding sequence
  source 1..1611: mol_type = other DNA
atgtttgagcagctgaaaccaatcgagcccgtacagaagactttgccttgggttggtgaggttgctgctacactgcaggaagccatgaagcgagactgttggcgtgaggcacgcgtaaagaaaaagccagtgacgtttgaggacgtggccgtgaattttacacaagaagaatgggactgtctagacgcctcacaaagggttttatatcaggacgtgatgagtgagacgtttaagaatttaacctcggtggcccgcatctttctgcacaagccagaactcataaccaaactggagcaggaagaagagcagtggagagagttcgtccatctgcctaacacggaaggcctatcagagggaaagaagaaggagttgagagaacagcaccctagcctgagagatgaaggcacgtccgatgacaaggtttttctcgcttgccgcggcgctggacaatgcccactatccgctccagccggaaccatggaccgcacaagggtcctccaggcatctcaagcgggacctcctttcttctgctacacttgtgggaagtgtttttcgaggcgctcctacttgtactctcaccagtttgttcataatcctaaactgacaaacagttgttctcagtgcggaaaactcttccgatctccgaagtctctaagctaccatcggaggatgcatctgggagagcgtcccttctgctgcaccctttgcgataaaacatattgtgatgcctccggactgagtcggcacaggagagtgcacttgggttatcgacctcactcatgcagcgtgtgtggcaagtcattcagggaccagtcggaattaaagagacaccaaaagatccatcagaatcaggagccagtggatgggaatcaggaatgcaccctcagaatcccaggcacccaggcggaatttcagacgcctatcgcccgctcacagagaagtattcagggattgctcgacgtgaaccacgcgcctgtggcacgctcacaggaaccgatctttcgcactgaggggccaatggcccagaatcaggcaagtgtcctaaagaatcaggccccagtgactcggactcaggccccaattactgggaccctctgccaagacgctaggtccaattctcatccagtcaaaccgagtagactgaatgtgttttgctgcccccattgctctctgacattttccaaaaaaagctatttgtcccggcatcagaaagctcacctgacagaaccccctaattattgcttccactgcagtaaaagcttctctagcttctcccgcctggttcggcatcagcagacgcactggaaacagaagagctatctgtgccctatttgtgacttatcattcggcgagaaggaaggactcatggaccattggagggggtacaagggcaaggacctatgtcagagctcccaccataaatgtagggttattcttggccagtggctcgggtttagccatgatgttcctacaatggccggcgaggagtggaaacacggcggtgatcagagtccccctaggatccatactccacgtcgaagaggcctgcgcgagaaggcctgcaagggtgataagactaaggaagctgtgtctattctgaagcataaatag

SEQ ID NO: 141520 - DNA, 1551 bp, synthetic construct
  misc_feature 1..1551: note = Description of Artificial Sequence: Synthetic coding sequence
  source 1..1551: mol_type = other DNA
atgtttgagcagttaaagcctattgagcccagggactgctggagggaggcaagggtcaagaaaaagcccgtgaccttcgaggacgtcgcggtgaacttcacgcaagaagagtgggactgcctcgatgccagccagagagtactgtaccaggatgtgatgtctgagacttttaaaaatctcacaagcgtggcaaggatattcctgcacaagcctgagttaattaccaaactggagcaggaagaagagcagtggagagagtttgtacacttgccaaacacagagggactctctgagggaaaaaagaaagaactccgggagcagcatccctccctgcgcgacgagggtacttccgatgataaggtgttcctagcttgcagaggagcaggccaatgccctctgtcagcaccagcgggtacaatggacaggacccgggtccttcaggcctcccaggctgggcctccttttttttgctacacatgcggcaagtgtttctccagacgcagttacctgtattcccatcagttcgtacacaaccccaaactgacgaattcatgctcacagtgcggaaagctgttccgcagtccaaagtctctgtcttaccacaggcgcatgcatctgggagagcgaccattttgctgtactctgtgtgacaagacatactgcgatgcctccggcctttccaggcatcggcgcgtccacctgggctatcgccctcactcctgctccgtatgcgggaaaagttttcgcgaccagtcagaattaaagcggcaccagaaaatccaccaaaaccaggagcccgtggatggcaatcaggaatgtacactccgaatccctgggacacaagctgagtttcagaccccgatcgctagaagccagcgaagcatacaaggactgctagacgttaatcatgcccctgtggctaggtctcaggagccaatcttcagaaccgaaggtccaatggcccagaaccaggcttcagtgttgaagaaccaggcacctgtgacacgcacccaggcacccatcaccggaacactgtgccaggacgccaggtccaattcacaccctgtcaagccttctcgactgaacgtcttctgctgtccgcactgttcactgacgttctcaaagaaaagttacctgtctagacaccaaaaagcgcatcttaccgaaccaccaaattactgctttcattgttcaaagagtttctcatcattctctcggctggtgcgacaccaacaaacacactggaagcaaaaatcctacctttgtcctatttgtgacctctcctttggcgaaaaagagggcctgatggaccattggagaggttataaaggtaaggatctgtgccagagctcacaccacaagtgtcgcgtgatcctggggcaatggctggggttctcacacgacgtgccaactatggcgggcgaggaatggaaacatggaggagaccagagccctcctagaatccacactccgcgtcgccgggggttgagagagaaggcatgtaagggggataagaccaaggaagcggtgtcgatcttaaagcacaaatag

SEQ ID NO: 141521 - DNA, 1551 bp, synthetic construct
  misc_feature 1..1551: note = Description of Artificial Sequence: Synthetic coding sequence
  source 1..1551: mol_type = other DNA
atgtttgagcagctcaagccaatcgagccgagggattgctggcgtgaggctagagtcaagaaaaagccagtcacgttcgaggacgttgcagtcaatttcacacaggaagaatgggactgtcttgacgcaagtcagcgggttctatatcaagacgtgatgtctgagaccttcaaaaacctcacaagcgttgcgcggatcttccttcacaagcccgaactgataacgaagctcgagcaagaggaagaacaatggcgcgaatttgtacatctgcccaataccgaggggctatcagagggcaagaaaaaagagctcagagagcaacatccatctttgagagacgagggtactagtgatgataaggtgtttcttgcctgccgtggcgctggccaatgtccactgagcgctcccgcaggcactatggatagaacacgggtgttacaagcatctcaggctggcccccccttcttctgttatacatgcggaaagtgttttagccgtcgctcttacctgtactcacatcaatttgtacacaatcctaaactgactaatagttgcagtcaatgtggaaagctatttcggtccccgaaatctctatcttaccacaggagaatgcacctcggggaacgacccttttgctgcacgctgtgcgataaaacctactgcgacgccagcggactttcaaggcatcgacgagtccacctaggatacaggcctcattcatgtagcgtctgcggaaagagcttccgcgatcagtcagagcttaaacgccaccagaagatccatcaaaaccaagagcccgtcgacggcaatcaagagtgtactctgcgcattccagggacacaggctgaatttcagaccccaatcgcccgctctcagcggtctatccagggcctgcttgatgtaaatcatgccccagtagcacggtcgcaggagccaatattccgcacagagggacctatggcacagaatcaggccagcgttctcaaaaatcaggccccagtgacccggacccaagcaccaataaccggaacactttgccaggacgcaagaagtaacagccaccctgtgaagccctctagacttaatgttttttgttgcccacactgctcactcaccttttcgaaaaaatcctaccttagcagacaccagaaggcccacctgaccgagccgcccaattactgttttcattgttccaaaagcttttcaagttttagtcgactggtccggcatcaacaaactcattggaagcaaaagtcctatctgtgtccaatatgcgatctcagctttggtgagaaagaagggctgatggaccactggcgcggctataaaggaaaagatctttgtcagtcctcacatcacaaatgccgcgtgatcctgggccagtggctgggcttctcccacgacgtcccaaccatggcaggagaggaatggaagcacggaggcgatcagagcccccccaggattcacacccctcgtcgtcggggtctgcgggaaaaagcatgtaagggcgacaaaactaaagaagccgtgtctatcctcaaacataaatag

SEQ ID NO: 141522 - DNA, 1611 bp, synthetic construct
  misc_feature 1..1611: note = Description of Artificial Sequence: Synthetic coding sequence
  source 1..1611: mol_type = other DNA
atgttcgagcaactcaagccaattgaacccgtccaaaagactctgccctgggttggagaggttgccgctacactgcaagaagctatgaagagggactgctggcgggaagcgcgggttaagaaaaaacccgtaaccttcgaggacgtcgccgttaattttacgcaggaggagtgggattgcctggacgcctctcagagggtcttgtaccaggacgtcatgtccgagacttttaagaatttaacctccgtagctagaattttcctgcataagcctgaactcatcaccaaacttgaacaggaagaggagcagtggagagagttcgtgcatctgcctaacactgaaggtttgagcgaaggtaaaaaaaaggagctgcgggagcaacacccgtcccttagggatgaaggtaccagcgatgacaaagtgttcttagcttgtcgaggtgccggacagtgccccctaagtgctccagccggaaccatggaccggaccagggtgttgcaagcctctcaggccggacccccattcttttgttacacctgcgggaaatgcttcagtaggcgaagctatctgtactcacaccagtttgtacataatcctaagctcaccaattcttgctctcagtgcgggaaactatttcgaagcccaaaatctctctcttaccatcgccggatgcacctgggcgagcgtcctttttgctgtacactgtgtgacaagacatattgtgacgctagcggcctgagtcgtcacaggcgggttcatcttggataccgcccccatagctgctctgtctgtgggaaaagtttccgcgatcagtcggagcttaagcgccatcagaaaattcatcaaaaccaggaacccgtcgacggtaatcaagagtgcacacttaggattccagggactcaggcagagtttcagactcccatagctaggtcgcaaaggtcaattcaagggttactggatgtgaatcatgcccctgtagcccggtcccaggagcccattttccggacggagggacctatggcacaaaatcaggcttcagtgctgaaaaaccaggcccccgtgaccaggacccaggctcctatcaccggaaccctttgccaggatgcgcgctctaatagtcacccagtgaaacccagccgacttaacgtcttttgctgtccccactgctctctgaccttttcgaagaagagctatctgtcccgccaccaaaaagctcatttgaccgagccccctaattattgttttcactgctccaagagcttttcaagtttctcgcggctggttcggcatcaacagacacattggaaacaaaagtcttacttatgtcccatctgtgatttaagtttcggggaaaaagaagggctaatggaccactggcgtggctacaagggcaaagacttatgtcaaagctcacaccacaagtgtcgggtgatactgggacagtggttaggcttttcacacgatgtaccgaccatggctggggaagaatggaaacatggtggagaccagtctccacctcggatccacacacctaggagaagagggctgcgagagaaagcatgtaaaggcgacaaaactaaggaagctgtcagcatcctcaaacacaaatag

SEQ ID NO: 141523 - DNA, 1725 bp, synthetic construct
  misc_feature 1..1725: note = Description of Artificial Sequence: Synthetic coding sequence
  source 1..1725: mol_type = other DNA
atggccgccgctgtgccccggcggccgactcagggcactgtgactttcgaggatgtggcggttaatttctctcaggaagagtggtgtctgctctcagaggcccagcgatgtctctatcgagacgtgatgcttgaaaatctggccctaatttcttcccttgggtgctggtgcggctcgaaagacgaagaagcaccgtgcaaacaacggatctccgtacagcgcgagagtcagtctcggacaccgagagccggggtcagcccaaagaaggctcacccatgcgaaatgtgcggactgatcctggaagacgtgtttcactttgcagaccaccaggaaacccaccataagcagaagctgaaccggagcggggcctgcggcaaaaatctggacgatactgcctaccttcaccagcaccagaaacaacatatcggagaaaagttttatagaaaaagcgtacgggaggccagtttcgtgaagaaacgtaaactgagggtctctcaggaacccttcgtgtttagggagtttggtaaggacgttttgccctcatccgggctgtgtcaggaagaggccgctgtggaaaagacagattccgaaaccatgcacgggccccccttccaggaaggtaaaaccaactactcgtgtggtaagcgcaccaaagctttctccacaaagcactccgtaatcccacaccagaagctcttcactagagacggctgttacgtgtgctccgactgtggtaagtccttttccaggtacgtctccttctctaaccaccagagagatcatacagccaaggggccgtacgactgcggcgagtgcggtaagagctatagccgaaagagctcgcttatacagcatcaacgggttcatactggtcaaacagcctatccatgtgaagaatgcggcaaatccttctcgcagaaggggagccttatcagccatcaattggtgcacaccggcgaagggccttacgagtgccgagagtgtgggaagagctttggacagaagggcaaccttatccagcatcagcagggtcatacaggcgagcgggcctaccactgcggagagtgtggcaagagtttccgtcagaaattttgtttcataaaccaccagagggtccataccggagagaggccttataagtgtggagaatgcggtaagtccttcggccaaaaaggaaatcttgtgcaccatcagcggggtcatacaggagagcggccgtatgagtgtaaagagtgtggcaagagtttccgctatagaagtcacctgacggaacatcagcgcttgcatactggggaaagaccgtataattgccgggagtgtgggaagctgtttaaccgaaagtaccacctgttagtgcacgaaagagttcacacaggcgagagaccatacgcatgtgaagtgtgcggcaaactgttcgggaataaacactctgtgactatccaccaacggattcatacaggagaaagaccgtatgagtgtagtgagtgcggcaaaagtttcctaagtagtagcgcgctacatgttcataaaagagtgcacagtgggcaaaaaccatacaaatgctctgagtgcggaaagagcttctccgagtgttcatctctcataaagcaccggcggattcacactggagagaggccttacgagtgtaccaaatgtgggaaaacttttcagcgatcatctacattattacaccatcagtcttcccacagacggaaggcactgtag

SEQ ID NO: 141524 - DNA, 3804 bp, synthetic construct
  misc_feature 1..3804: note = Description of Artificial Sequence: Synthetic coding sequence
  source 1..3804: mol_type = other DNA
atgggggacatgaagactcccgactttgatgatttacttgccgccttcgacattcccgatcccacaagcctcgacgctaaggaagctatccagacccccagcgaagaaaacgagagccctctcaaacctccaggcatctgtatggacgaatccgtgtccctcagtcactccggaagcgcacctgatgttcctgctgttagcgtgatcgtgaaaaacacgagtcgccaggagtcttttgaggctgaaaaggaccatattaccccttcactgctgcacaatggtttccgggggtcagatctgcccccagatccgcataactgcggcaaatttgattccacttttatgaacggtgacagcgctcggtcctttcctgggaagttagaaccacctaagagtgagccgctgcccaccttcaatcagttctctcccattagcagccctgagccggaagaccctatcaaagataacggttttggcataaagccaaaacatagcgactcctacttcccccctcctctgggctgtggcgccgtgggaggcccagtcctcgaagcacttgcgaagttcccagttccagaactccatatgttcgatcacttttgtaaaaaagaaccaaagccagagccactcccccttggctcccagcaggagcatgagcagtctggtcagaatacagttgaaccacacaaggaccccgatgcaacacggttctttggcgaggcattggagtttaattcgcatccatcaaactccattggggaatcaaaggggctcgcacgggagctggggacctgtagcagcgtgccccccaggcagcggttaaagcccgcccacagcaaacttagctcgtgcgtggccgcactggttgcgctgcaggctaagcgagtggcatctgtgaccaaggaggaccaacctggacacactaaagacctttctggccctacaaaggaaagctcaaaaggaagtccaaagatgcccaagagtcctaaatctcccagatccccgctcgaagctactagaaagtctattaagccgagcgacagcccccgttctatctgttcagacagctcctctaaaggtagccctagtgtggctgcatcttctccgccagctatccccaaagtacgcatcaaaacaataaagacctcatccggggaaatcaaacggactgtaacccgaatcttgcctgaccctgatgatcccagcaagagtcctgtggggtcccctctgggatcagctattgctgaggcaccaagcgagatgccaggggacgaggtcccagtagaggaacattttccagaggcaggaaccaatagcgggagtccccagggcgccaggaagggagatgaaagcatgacgaaggcctcagacagttccagcccgtcttgctcctctgggccacgcgtgcctaagggagccgccccagggtcacagaccggaaagaaacaacagagtacagctctccaggcctctacactggctccagccaatctcttaccgaaggcggtacatttagccaatctcaatctcgttccacacagcgtcgccgcgtcagtgacggccaagagcagcgtgcaacgccgctcccagcctcagctcacacagatgtcggtgcccctggtccaccaagtgaagaaagcagccccattgatcgtcgaggtgttcaataaagtgctgcatagcagcaatcccgtccccctgtatgccccgaacttaagcccccccgccgatagccgcatccacgtgcctgcttctggatactgttgcttggaatgcggggacgccttcgcccttgagaagagtctctcacagcactatgggaggaggtccgtgcacattgaagtgctctgcacactgtgttccaagacccttctgttcttcaacaagtgttctctgctcagacatgcccgtgaccataagagtaagggcctggtgatgcagtgtagccagctgctggtcaagcctataagtgctgatcagatgtttgtgagcgcacctgttaactccacagcccccgcagcccccgccccatcatcctcccctaaacacggcctgacttcggggtctgcctcgccgcctccacccgccctgcccctgtaccccgaccccgtaagactgatccgttactctattaagtgcctggagtgccacaagcagatgagagactatatggtcctggctgcccattttcagaggacaacggaggagaccgaaggtttgacatgccaagtctgtcagatgctgctgccaaatcagtgcagtttttgcgcacaccaacgcatccacgcccataaatctccctactgttgccccgaatgcggggtgctgtgtagatcggcttactttcagacgcatgtgaaagagaattgcctgcactacgcgcggaaggttggctaccgatgcatacattgtggggttgtccatctcaccctcgccctgctaaaatcgcatatccaggagcgtcattgccaggttttccataagtgcgctttctgccctatggcttttaaaacagcctcttctacggcagatcacagtgcaactcaacacccaactcagccccacaggcctagccagcttatttataagtgtagttgtgaaatggtttttaacaagaagcgacacatccagcagcacttctatcagaacgtatctaagacacaggtgggagtgttcaagtgccccgaatgtcccttactgttcgtccagaaaccggagttgatgcaacacgtcaaatccacacacggggttcctcgcaacgtagacgagctcagctcacttcaatcttctgcggatacatcttcatcacgccctggctcacgggtccctactgagccacccgccacctccgtggcagctcgctcatctagtctgcccagcggccgatgggggaggccagaagcacatcgacgagtagaggctagacctcgcttaaggaacacgggttggacatgccaagaatgccaggaatgggtgcctgatcgagaaagttatgtctcccatatgaaaaagtcccacgggcgtactctgaagagatacccatgtaggcagtgtgagcagagcttccatacaccaaacagcctgcgaaagcacatccggaataatcacgataccgtgaaaaagttttatacatgtggctattgtactgaagactccccctcttttcctcgcccctcactactggagtcgcatatttccttgatgcatgggatcaggaacccggacctgagccagacctcaaaagtgaaacctccgggggggcactccccccaagtgaaccacctcaaacggccagttagcggggtgggggatgcccctggcacctctaatggcgccaccgtctccagcacgaagaggcacaaatctctttttcagtgcgcaaaatgcagtttcgctacagacagcggacttgagtttcagtcacatattccccagcatcaggtcgattcctccaccgctcagtgtcttctctgcggtctctgttacacttcagcttcaagtctaagtcggcacttatttattgtgcacaaggtgcgagatcaggaggaggaggaggaagaagaagctgcagctgcagagatggccgtcgaagtggccgaaccagaagagggctctggcgaggaggtcccaatggagaccagggagaatgggctcgaagaatgtgccggcgaaccactgtccgccgaccccgaagcccgacggcttttaggtccggcgcccgaggacgatggcggacacaacgatcacagccaaccccaggcatctcaggatcaagattcccacactctgtccccccaggtctag

SEQ ID NO: 141525 - DNA, 3804 bp, synthetic construct
  misc_feature 1..3804: note = Description of Artificial Sequence: Synthetic coding sequence
  source 1..3804: mol_type = other DNA
atgggggatatgaagacccctgattttgatgatcttctagcggcttttgatattccagatcccaccagccttgacgccaaagaggccatacagactccgtcagaggagaatgagtcccccctgaaaccaccaggaatatgcatggacgaatctgtttctttgagtcattcagggagtgcccctgatgtaccagccgtgtcagtgattgtcaagaacactagcagacaagagtccttcgaggcagagaaggatcatattaccccatctctcctgcacaacggcttccgaggatcagatctgccacccgacccccacaattgcggcaaatttgattctactttcatgaacggagactctgccaggtcttttccaggcaaactcgagcccccgaaatcagaacctctgccaacattcaatcagtttagccctatttctagtcctgagcctgaggacccaatcaaggacaatggatttggcatcaagcccaagcactcggactcatatttccctccgccattgggttgtggtgccgttggcggcccagtgctcgaagccctagcgaagtttcctgttcctgagctgcacatgttcgaccacttctgcaagaaggagccaaaaccagagcctttgcctctgggtagccagcaggagcacgaacaaagcggtcaaaatacagtagagccccataaggatcctgatgccaccagattctttggagaggctctggagtttaattcacatccatctaattccatcggagagagcaaagggctcgcgagagagttgggcacctgctcttccgtgccacctaggcagagactgaaacctgcacacagcaaactgtcatcctgcgttgcggctctcgtagcactgcaggcaaagcgagtcgccagtgtcactaaggaggatcagcccggccacaccaaggacttatctggccctaccaaagagtcctctaagggatcaccaaagatgcctaagtcccccaaaagcccgagaagcccattggaagcgacacggaaaagtattaaaccatctgacagtcctagatccatttgctctgacagcagttctaaagggtccccctctgtcgccgcaagctctcctcctgcaatacctaaagtgagaatcaaaactataaagaccagtagtggggaaatcaaacggacagttacacgcatcctccccgatcctgacgacccatcaaagtcccccgttggcagtccccttggctcagccattgccgaggccccaagtgagatgcctggggatgaagttcccgtcgaggagcactttcccgaggcgggcacaaattccggctccccccagggggctcgtaagggtgatgagtccatgactaaggccagtgacagcagctccccatcttgttcatcaggccccagagtccccaagggcgctgcaccaggtagccaaactggtaagaagcaacagtccactgctctccaggcatcaactctggcaccagcaaacctgctccctaaagccgtgcatttggcaaacctaaacctcgtgcctcatagtgtcgccgcaagcgtgacagctaaaagcagcgtgcagaggcgaagtcagccccaactgacccagatgagcgttccccttgtccatcaggtgaaaaaggcggcccccctgatcgtggaagtattcaacaaggtgctgcacagttcgaacccagttccgctgtatgcgcctaacctgtcccctccagcagatagtcgaattcacgtgccagcttcagggtactgctgtcttgagtgcggcgacgcattcgccctggagaagagtttatcccagcactacggtcggaggtctgtgcacattgaggtcctctgtacactgtgcagcaagaccctgctgttcttcaacaagtgcagtttgcttcgccatgccagggatcacaagagtaaaggactcgtcatgcaatgcagccaattgctggtgaagccgattagcgccgatcagatgttcgtgagcgctccagttaattcaacagctccagctgctccagcccccagttcatcaccgaagcacgggttaacatcggggagcgcgagccccccaccgccagctctccctctgtaccccgaccccgtgcggctaatccgctattccatcaaatgcctggaatgccacaagcagatgcgagactatatggtcctcgccgcacactttcagcgcacaaccgaggaaactgaagggctgacctgccaggtctgtcagatgctcctgcctaatcagtgcagcttctgcgcacatcagaggattcacgcccataaaagtccttattgttgcccggagtgtggtgtgctttgtcgaagcgcctattttcagactcacgtgaaggaaaactgcttacactacgcacggaaagtgggatataggtgtattcactgtggagtggtgcacttaaccctggctctattgaagtcccacattcaggagcgtcactgccaggtcttccataagtgtgctttttgcccaatggcgttcaaaacggcctcttccaccgcagaccactccgcaacgcagcatccgacacaaccacataggccgtcccagctcatttacaagtgcagctgcgagatggtgttcaataagaagcgtcacatccagcagcacttttaccagaatgtgtctaaaacccaagtgggggtttttaagtgccctgaatgccctctgctgtttgtccagaaacctgaattgatgcagcatgtcaagagcacgcatggagtgcctcggaatgtggatgagctctcatccctacagtccagcgcagacacttcctccagccggcctggatcacgtgtgcccaccgagcccccagctaccagcgtcgctgcacgaagttcatccctgcccagcggccgctgggggcgcccagaagcccaccggagagtcgaggcccgaccacggctgcgtaacactggctggacgtgccaggagtgtcaagagtgggtacccgaccgagagtcttacgtgtctcatatgaagaagagccatggtaggacactcaaacggtacccatgcaggcagtgtgaacagtcttttcatacaccaaatagcctgaggaagcacattcgcaacaatcacgataccgtcaagaagttttacacgtgtggttactgtacagaagattctccctccttccccagaccatcgctcctcgaatctcacatatccttgatgcatggaattcgaaaccccgacctgagccagacatctaaggtgaagcccccaggcgggcattcccctcaggtgaatcacctaaaacgtcccgtgtccggagtaggggacgctcccggtacgagcaatggcgcaacagtatcttctaccaaacggcacaagtcactattccaatgtgctaaatgctcgtttgctaccgactctggcctggaattccagtcccacatacctcagcaccaggtggattcctccacggcacagtgtctcttgtgtggcctctgctacaccagtgcatcctcattatcaaggcacttatttattgtgcataaagtgcgagatcaagaagaagaagaggaggaggaggcagcagcggctgaaatggccgtggaggtagctgaaccagaggaggggagtggtgaggaggtgccaatggagactcgggaaaacggactggaggagtgcgcaggggagccgttaagtgccgaccctgaagcacgtcggctgttgggccctgcaccagaggatgatggagggcacaatgaccattcccaaccccaggcttctcaggaccaagactcacacacactgagtccacaggtgtag

SEQ ID NO: 141526 - DNA, 2379 bp, synthetic construct
  misc_feature 1..2379: note = Description of Artificial Sequence: Synthetic coding sequence
  source 1..2379: mol_type = other DNA
atggctgcgataaacccctgggcttcctggggtgcgcttacagaccagagctggggcatgacagccgtggatccctgggcttcatgggcgctttgcccacagtacccggcctggcacgtagaaggcagtttagaggagggcagacgagctacagggctacctgctgcacaggtgcaggagcccgtgaccttcaaggatgtggctgtcgatttcacccaggaggaatggggccagctcgacctagttcagagaactctgtatcgggatgttatgctcgagacatatggacaccttctctctgtaggcaatcaaattgctaagccagaggttatttcactactcgaacagggtgaagaaccttggtccgttgaacaggcctgtccgcagcgaacatgcccagaatgggtgagaaatctggaatcaaaggccctgatccccgcacagtccatctttgaggaagaacagagtcacgggatgaaattggagcgctatatttgggatgacccctggttttcgagactggaagtgctggggtgcaaggatcaactcgagatgtatcacatgaaccagtccacagcaatgcggcagatggtgtttatgcagaaacaagtcctgagccagaggtcctctgagttttgcggcctgggcgccgaattctcacagaacctgaactttgtcccatcccaacgcgtgagccagatcgagcatttttacaaacccgacacacacgcccagagttggagatgcgatagcgccattatgtacgctgacaaggtaacctgtgagaataacgattacgacaaaaccgtctatcagtctatccagccaatttacccagctagaatccagaccggtgacaatctcttcaaatgtaccgacgccgtgaagagcttcaaccacataattcatttcggtgaccacaaaggaatacacaccggagaaaaattgtacgaatataaagaatgccatcaaatctttaatcagtctccgtccttcaacgagcaccctcgtctgcatgtgggcgagaatcagtacaactataaagaatacgaaaacatcttttactttagcagttttatggagcatcagaaaatcggtactgtggagaaagcctacaagtacaacgagtgggaaaaggttttcggctatgacagctttctcacccagcatacaagcacctatacagctgaaaagccctacgactataacgaatgcggcacttctttcatttggtcgagctatttgatacagcacaagaagactcatacgggagagaagccttatgaatgtgataaatgcggtaaggtctttagaaacagatccgccctgacaaaacacgagaggacccatactggaattaagccctatgaatgcaacaagtgtggcaaagcattttcgtggaatagtcatctgatcgtccacaaacgaatccataccggcgagaaaccctacgtctgcaacgaatgcggaaagagcttcaactggaacagtcacctcatagggcaccagcgtacacacaccggcgagaagccgttcgaatgcacagaatgtggcaagagtttctcctggtcaagtcacctgattgcccacatgcgaatgcacactggagagaagccctttaagtgtgacgagtgtgagaaagcgttccgcgattattccgcactgtctaagcatgagcgaacgcatagcggcgcaaaaccttacaaatgtacagagtgcggcaagagtttctcgtggtcttcccacttgatcgcacaccagcgaacacacaccggggaaaagccctataattgccaagagtgtggtaaggcatttcgggagcggagcgcgcttacaaagcatgaaattattcattctgggataaagccctacgaatgtaataagtgcggtaaatcttgttcccaaatggcgcatctcgtgaggcaccagaggacccacaccggagaaaaaccctacgaatgtaacaaatgcggcaagtcattttcccaatcttgtcatctggttgctcacagacgcatccataccggtgagaaaccctacaagtgcaatcagtgtgaaagatcctttaattgctcgtcccatcttattgcccaccggagaactcataccggcgagaagccctataggtgtaatgaatgcggcaaggcgtttaatgaatcatcttcattgatagttcacctgcggaatcacaccggcgaaaaaccttataaatgtaaccactgtgaaaaggccttttgcaagaactctagcctgatcattcatcagagaatgcatagcggcgagaaaagatttatttgctcggaatgcggtaaagcttttagcggtcatagcgctttgctgcagcaccagcggaaccactctgaagaaaagcttaactag

SEQ ID NO: 141527 - DNA, 2109 bp, synthetic construct
  misc_feature 1..2109: note = Description of Artificial Sequence: Synthetic coding sequence
  source 1..2109: mol_type = other DNA
atgctggagacttatggccatctgctgagcgtcgggaatcaaattgcaaagccagaggtcatcagtctactagagcaaggcgaagagccatggtccgtggaacaggcctgcccccagcgcacctgtcccgaatgggtacggaacctagagtcaaaagctcttatccccgcacagagtatcttcgaggaggagcaaagtcacgggatgaagctggaaaggtatatctgggatgatccctggttctctcgtttagaggtgctgggatgtaaagaccagttggaaatgtatcatatgaaccagtcaacggctatgcgccaaatggttttcatgcagaagcaggtgctttcccagaggtcatctgagttctgtggactgggagcagagttctcgcagaatctgaacttcgttccttcccagcgggtcagccagatcgaacatttttataaacctgatactcacgcccagtcttggcggtgcgactctgccattatgtacgcggataaagttacctgcgaaaacaatgattacgacaagacggtgtatcagagtatccagccgatatatcccgccagaatccagaccggggataacctgttcaagtgcacagacgccgtaaagagcttcaaccatatcatccactttggggatcataagggaattcacactggggaaaagctgtatgagtacaaggagtgccaccagattttcaaccagtcccccagtttcaacgaacatcctcgactccacgtgggtgagaatcagtacaactataaggagtacgagaatatcttctacttttcttcctttatggaacaccagaaaatcgggaccgtcgaaaaagcctataagtacaacgaatgggaaaaggtgtttgggtacgattcattcctcactcagcacactagcacttatacagccgagaagccctatgattacaacgagtgtggcacctccttcatctggtcatcctacctgatacaacataaaaaaacccacacaggcgagaagccttacgagtgcgataaatgtggtaaagtgttcaggaatagaagtgcccttacgaagcacgaacgaacacacaccggaatcaagccctacgaatgcaataagtgtggcaaggctttttcgtggaatagccatttgattgtgcataaacggatccacactggcgaaaaaccatacgtgtgtaatgagtgtggcaagagctttaactggaattctcacctgatagggcatcagagaacacacacaggagagaaacctttcgaatgcactgagtgcggcaagtctttcagctggagctcccacctgatagctcacatgcgcatgcacaccggcgaaaaaccgttcaagtgtgacgagtgcgaaaaagcattccgcgactatagcgcgctgtctaagcatgaacgcacacatagcggggcgaagccctataagtgtaccgaatgtgggaaaagcttcagctggtcgtcacacctcattgcacaccagcgaacccacacaggagagaaaccttacaactgccaggaatgcggcaaagcctttagagagagatctgccctaacgaagcatgagatcatccattccggcattaaaccatacgaatgcaacaaatgcggtaagtcgtgtagtcagatggctcatttggttaggcaccaacgcacccacacaggggaaaaaccctacgagtgcaacaagtgtgggaaaagcttcagtcaaagctgtcatctggtggctcaccgaaggatacacacaggagagaagccatataaatgcaaccaatgtgaaagatccttcaactgtagctcccatctgatagcacataggcgaacccacaccggcgagaaaccctataggtgtaatgagtgcgggaaggcctttaacgagagctccagcctaattgtgcatctgaggaatcacaccggtgagaagccctacaagtgcaaccattgtgaaaaggccttttgcaagaactccagcctcattatacaccaacggatgcacagcggtgagaaaaggttcatctgttctgagtgtggcaaggccttctctggccattccgctctcctgcagcatcaacggaatcacagcgaagaaaagctgaattag

SEQ ID NO: 141528 - DNA, 1527 bp, synthetic construct
  misc_feature 1..1527: note = Description of Artificial Sequence: Synthetic coding sequence
  source 1..1527: mol_type = other DNA
atggcagcaattaacccatgggcgtcctggggagccctcactgaccagagttggggcatgactgcggtcgatccctgggcctcttgggctctgtgcccccagtacccagcatggcacgtcgagggctccttggaggaaggaaggcgagccaccggactcccggcagcccaagtgcaagagccggtgacgtttaaggacgtcgccgttgacttcactcaggaggagtggggccagcttgacctggtccagagaaccctgtacagagatgtgatgcttgagacctacggccatctactgagcgtcgggaaccagattgccaagcccgaggtaatctcacttctggagcaaggcgaggaaccctggtccgtggagcaggcatgtccccagaggacctgtccagagtgggtcagaaatcttgaaagcaaagccctcatacccgcgcagagcattttcgaggaggagcaaagccacggtatgaagctggaacgttatatttgggacgatccctggttttctcggctggaggtcttgggttgcaaagatcagcttgagatgtatcatatgaaccagagcaccgccatgcggcagatggtgttcatgcagaagcaagttctgagccagaggagctccgaattctgtggtctgggcgctgaattcagccagaaccttaactttgtcccctctcagagggtttctcagattgagcatttttataaaccggatacccacgcacaaagttggcgctgcgattcagcgatcatgtatgctgataaagttacttgcgagaacaacgattacgataaaaccgtgtaccagtctatccagcccatttaccccgccagaatacagacaggggacaatttattcaagtgtactgatgcagtgaagagtttcaaccacatcatccatttcggagaccataagggtatacacacaggggaaaaactatatgagtataaggagtgccatcaaattttcaatcagagccctagctttaacgaacaccctcgactacacgtgggcgagaatcagtacaattataaggagtatgaaaatatattctatttctcttcctttatggagcatcagaagattggtacagttgaaaaggcctacaagtacaatgagtgggagaaggtgtttggctacgatagctttttaacgcagcacacttcaacatatacggccgagaaaccttacgactacaacgagtgcggaacttcttttatctggtccagctacctgatccagcacaagaagacccacactggtgaaaagccatacgagtgcgataaatgtggtaaggtgttcagaaatagaagcgccctcaccaagcacgaaaggactcatacaggaattaaaccatatgaatgtaacaagtgcgggaaagcgttcagttggaattcccatctcattgttcacaagcgtatccacactggggagaagccctatgtgtgcaatgaatgtgggaaatccttcaactggaacagtcatctgatcggtcatcagaggacacatacaggttag

SEQ ID NO: 141529 - DNA, 2523 bp, synthetic construct
  misc_feature 1..2523: note = Description of Artificial Sequence: Synthetic coding sequence
  source 1..2523: mol_type = other DNA
atgaaggaagataaaagtagtatccgagaggctatctccaaggcgaaaagtacagcaaatatcaagacagagcaggaaggcgaagcctctgagaagtccctgcatctaagccctcagcacataacacatcagacaatgccaatcgggcagcgggggagtgaacaaggaaagcgagtcgagaatattaatggcacatcttacccttcattgcagcagaagaccaatgctgtcaaaaaactacacaagtgcgatgaatgcgggaaaagttttaaatataactctagactggtgcaacacaagataatgcacaccggagagaagaggtacgagtgcgacgattgcggagggacctttagatcttcgagcagcctgcgagtacacaaacggatccatacgggcgaaaaaccttacaagtgtgaggaatgcggcaaggcttacatgtcctacagtagcctcatcaaccacaaaagtacacactctggcgaaaagaactgcaaatgtgatgaatgcggcaagtctttcaattacagctctgtcctagatcaacacaagcgaatccacacgggcgaaaagccctatgaatgtggagaatgcggtaaagcgttcaggaatagtagcgggctccgggttcacaagcggatccacacgggagaaaagccttatgagtgcgacatctgtggcaaaacgtttagcaacagttctgggttgagggtccacaaaaggattcatacaggcgaaaagccatatgaatgcgacgagtgtggaaaggcattcattacctgccggactttgctcaatcataagtcaatccattttggggacaaaccgtacaaatgcgacgaatgtgagaaatctttcaactattcctctctcctgatacagcacaaggttattcatacaggcgaaaagccgtacgagtgcgacgagtgtggcaaggcatttcgaaactcgtccggactcattgtgcacaaaaggatccacacgggggaaaagccgtacaagtgcgacgtatgcgggaaggcgttttcatattctagtggcctcgcagttcataagtctatccaccctggcaagaaagctcatgaatgtaaggaatgcggtaaatccttctcatacaattccctgctgctccagcacaggaccattcacaccggagagcggccatacgtgtgcgatgtttgtggcaaaacatttcggaacaatgcgggcctcaaagtccatcggagactccacaccggggagaaaccatataagtgcgacgtttgcggaaaagcttacatctctcggagttcccttaagaaccataagggaatacacctcggggaaaaaccttataagtgtagttattgtgagaaaagctttaattactcctctgcacttgaacaacataaacggatccatacccgggaaaagccttttggatgcgatgagtgcggaaaagcattccgaaataacagtgggctcaaagttcacaagcgcattcataccggggagagaccatacaaatgcgaagaatgcgggaaagcctacattagtctatcgagccttatcaatcataagtccgttcaccctggggaaaaacctttcaagtgcgacgagtgtgaaaaagcctttattacctacaggacgctgacaaaccataagaaggtacacctcggggagaaaccgtataaatgcgacgtgtgcgaaaaatccttcaactacactagcctgttatcgcagcaccgaagggtgcacactcgagaaaagccttatgaatgtgaccgctgcgagaaagtgtttaggaataacagcagtctcaaagtgcacaagcgaattcatacaggtgaaaggccatatgagtgcgacgtctgtggcaaggcctacattagccattcctctctgatcaaccacaagtcaacacatccggggaggactccacacacctgcgatgagtgcggaaaggcttttttcagtagtaggactctgatttcccacaaacgcgtgcacctgggagagaagcccttcaagtgtgtggaatgcggtaaaagcttttcttattcctccctactctcacaacacaaacgtatccatacaggcgagaagccctatgtgtgtgacagatgtggaaaagcttttcgcaatagcagcggcctgactgttcacaaacggatccataccggtgagaaaccttacgaatgtgacgagtgtggcaaagcatacatctcccactcttctctgatcaaccacaagtccgtccaccaaggtaagcaaccctacaactgcgagtgcggtaagagcttcaactacagatcagtcctggaccagcacaagcggatacacacaggaaagaagccatacaggtgcaatgaatgcggaaaagccttcaacatccggagtaatctgacaaagcacaagcggacccacaccggggaagagagcctgaacgtcatatatgtggggagttatagtggaacatcccagaaacgcacctatgaagggggcaatgccctagacggcggccgaatgaggatgccgctgtag

SEQ ID NO: 141530 - DNA, 1497 bp, synthetic construct
  misc_feature 1..1497: note = Description of Artificial Sequence: Synthetic coding sequence
  source 1..1497: mol_type = other DNA
atgtcatacagctctctcatcaatcacaaatccacgcactctggtgagaaaaattgcaaatgcgacgaatgtgggaaatcgttcaactactcatcagttcttgaccaacataaacggatccacaccggcgagaagccatacgagtgcggggagtgcggcaaagctttccgaaatagttctgggctgagggttcacaaacgtatccatacaggtgagaagccatatgaatgcgacatctgcggcaaaacgttctctaactcctcgggcttgcgcgtccacaagagaatccacaccggagaaaagccgtacgagtgtgacgagtgcggtaaagcgttcattacttgccgcacactcctgaaccacaaatctatacatttcggcgacaagccttacaagtgcgatgagtgtggcaaagcttttagaaataattctggcctgaaagtgcataaaaggattcataccggtgagaggccgtacaaatgtgaagaatgtggaaaggcctacatatcgctgtcaagcctgattaatcataaaagtgtgcatcctggcgagaaaccatttaagtgtgacgagtgcgagaaagccttcatcacctatcgcactctgaccaatcataaaaaggtacacttgggagagaagccttacaaatgtgatgtgtgtgagaaatcgttcaactatacatccttactgagtcagcataggagagtgcatacccgtgagaagccgtacgaatgtgaccgttgcgagaaagtctttcgcaataacagctcactgaaagtccataagcgtatccacacgggagagcgcccctatgaatgcgatgtgtgcgggaaggcttacatttcccattctagcctgataaaccataaaagtacccacccaggtcggaccccacacacctgtgacgagtgcgggaaggcctttttctcgtcaagaacacttatcagtcacaaaagagtgcatttaggcgaaaagccattcaagtgcgttgagtgcggaaagagcttctcatacagtagtctcttaagccagcacaaacggatacacactggggagaaaccctacgtctgtgatcggtgcggtaaggcctttcgaaatagcagcggccttaccgtacacaagcgtattcacaccggagaaaaaccatatgaatgcgacgagtgcgggaaagcctacattagtcacagctcactcataaatcacaaatccgtgcatcaaggaaaacagccctacaattgcgaatgcggtaagagctttaattatcgctctgtgctggatcagcacaagaggatccacactggcaagaagccgtacaggtgcaacgaatgcggaaaggcattcaatatccggtctaatctgactaagcacaaacgaactcacaccggcgaggaaagcctgaacgtaatttacgtcggatcctacagtggcaccagtcaaaagagaacctacgagggcgggaatgcactggacgggggtagaatgcgcatgcccctgtag

SEQ ID NO: 141531 - DNA, 2703 bp, synthetic construct
  misc_feature 1..2703: note = Description of Artificial Sequence: Synthetic coding sequence
  source 1..2703: mol_type = other DNA
atgtcacacctcaaaaccagcaccgaggatgaagagccaaccgaagaatatgagaacgtgggaaacgcagcctccaaatggccgaaagtggaggacccaatgcctgagagtaaggtcggggacacctgcgtgtgggactccaaagtggaaaatcaacagaagaagcccgtagaaaatcgaatgaaggaggataaaagtagcatccgggaagccatcagcaaggctaagtccacagcgaacatcaaaaccgagcaagagggcgaggctagcgagaaatccctgcacctatctccccagcacatcacgcaccaaacaatgcccattggccagcgtgggtcagaacaggggaaaagagtagagaacatcaacggaacctcctatccgagcctgcagcagaagacaaatgcggtgaaaaagctccacaaatgcgatgagtgtggcaagtcttttaagtataacagccggctagtgcaacacaagatcatgcacacaggggaaaaaaggtacgagtgcgatgactgcggcggaacttttcgcagctcttcaagtcttcgcgtacacaaacgcattcatactggcgagaaaccctacaagtgtgaagagtgtggcaaggcctatatgtcatactcttcactgatcaatcataagagcacacattctggcgaaaagaattgtaagtgtgacgaatgtggcaaatccttcaattactcaagtgtgctggaccaacataaacggatccacaccggcgagaagccctacgagtgcggggaatgtggaaaggcgttccggaactcctccggtctgagggtgcacaagcgcattcatactggcgagaagccctacgagtgcgatatctgtggcaagacattcagtaactcaagcggtttgcgcgtgcacaagcggatccataccggggagaagccttatgaatgcgatgagtgcggcaaggccttcattacgtgtcgtactttgctcaaccataaatctatacactttggagataagccgtataagtgcgatgagtgcgaaaagtcttttaattacagctctctgttgattcagcataaagtcattcacaccggtgaaaaaccatatgagtgtgacgagtgtgggaaggcatttcgcaatagtagcggactgatcgtgcataagcgtattcataccggagagaagccatacaagtgtgatgtttgcggaaaagctttctcctactccagcggacttgccgtacacaagtctatccatccggggaaaaaggcccacgagtgcaaagaatgcggaaaatccttttcttataatagtctgctgctgcagcatcgcactatccacaccggagagcggccatacgtttgtgacgtgtgtggtaagacgtttagaaacaacgcaggacttaaagtccaccgcaggctgcacacaggtgagaagccctacaaatgcgacgtgtgtggtaaggcctacattagtagatcgtcgcttaagaaccacaaaggtattcatctgggggagaaaccatacaagtgctcctattgcgagaaaagtttcaactatagtagcgcactcgagcaacataaaaggatacatactcgagagaagccctttggatgtgatgaatgcggaaaggcctttagaaataattcaggactgaaagttcacaagagaattcacaccggtgaacgaccatacaaatgtgaggagtgcgggaaagcctacatctcactttcctctttgattaatcacaagtctgtccatcctggtgagaagccatttaagtgcgacgagtgcgagaaagcttttattacctacagaacacttacaaatcacaagaaggttcatctgggcgagaagccttacaagtgcgatgtctgcgagaagtcttttaattacacctctctcctgtcccagcaccgacgggtacataccagagaaaaaccatatgaatgtgacagatgcgagaaggtgtttagaaacaactcctctctgaaggttcataaacggattcacactggggagcggccttacgaatgtgatgtctgcggcaaggcatatatttctcatagcagcctcattaaccacaagagtactcatcccggtaggaccccccacacctgcgatgagtgcgggaaggcctttttttccagcagaaccctcatcagccacaagagggtgcacctgggtgaaaaaccattcaaatgcgtggaatgtggcaagagtttctcttatagctcgctgcttagtcaacacaagaggattcatacaggcgagaaaccctatgtttgcgatcgttgtggcaaggccttccgtaacagttcagggctgactgtccacaagagaattcatacgggagaaaagccctacgagtgcgatgagtgtggtaaagcctatatcagccacagtagccttattaatcacaagagtgtgcatcagggaaagcagccatacaactgtgaatgtggcaagtcattcaattatagatcggtcctcgaccagcacaagaggattcacactggaaagaaaccgtaccgatgcaacgagtgcggtaaagcgtttaacatccggagcaacctcacaaaacacaaacgaacccacaccggcgaggagtctctaaacgtgatttacgtggggtcatactcaggcacaagtcaaaaacggacctacgagggagggaatgctctagatggtggccggatgcgaatgcctctctag

SEQ ID NO: 141532 - DNA, 483 bp, synthetic construct
  misc_feature 1..483: note = Description of Artificial Sequence: Synthetic coding sequence
  source 1..483: mol_type = other DNA
atgcctgaaagcaaagtgggtgacacttgcgtgtgggacagtaaggtggagaatcagcagaagaagcccgtggagaacagaatgaaagaagataaatcctccattcgggaggctatctcaaaagccaagtccacagctaatatcaaaacagaacaggagggggaggcctctgagaaatccctgcacctctcgcctcaacatattacacatcaaacaatgccgataggacaaaggggatccgagcaggggaaaagagtggaaaacataaacgggacctcctacccctcccttcaacagaaaacaaacgctgtgaagaagctccacaagtgcgacgagtgcggcaagagcttcaaatataactctcgacttgtccagcacaaaatcatgcacactggggaaaaaaggtacgaatgcgacgactgtggcggtacattccgatcttcctcttctctccgcgtccacaaaaggatccataccggctag

SEQ ID NO: 141533 - DNA, 315 bp, synthetic construct
  misc_feature 1..315: note = Description of Artificial Sequence: Synthetic coding sequence
  source 1..315: mol_type = other DNA
atgccggagagtaaggtcggcgacacatgcgtgtgggactcaaaagtcgaaaaccaacagaaaaagcctgtcgagaaccgtatgaaagaggataaatcgagcattcgggaagctatttctaaggccaagagtaccgccaacatcaagaccgaacaggaaggcgaagcctctgagaaatccctgcacctctctcctcaacatatcacccaccaaacaatgcccatcgggcagcgcggtagcgagcagggtaagagggtcgagaacataaatgggacctcctacccctcactccagcagaaaactaacgcggtgtag

SEQ ID NO: 141534 - DNA, 237 bp, synthetic construct
  misc_feature 1..237: note = Description of Artificial Sequence: Synthetic coding sequence
  source 1..237: mol_type = other DNA
atgcccgagtccaaagtcggtgatacttgcgtgtgggatagtaaggtagaaaaccagcaaaaaaaaccagtcgaaaacagaatgaaggaagataagagcagtattcgggaggcaatcagtaaagctaagagtacagccaatattaagacagagcaggagggcgaggccagcgaaaaatccctacacctcagtcctcaacatatcactcaccagaccatgcccattggtcagcgctag

SEQ ID NO: 141535 - DNA, 2604 bp, synthetic construct
  misc_feature 1..2604: note = Description of Artificial Sequence: Synthetic coding sequence
  source 1..2604: mol_type = other DNA
atgcccgaaagcaaagtcggggatacctgcgtgtgggatagcaaagtggagaaccagcagaagaagccagtcgagaatcgtatgaaggaggacaagagctccattagagaagccatcagcaaggctaagagtacagccaatattaagacggagcaggaaggagaggcctctgagaagtccctgcacctgtctccccaacatatcactcaccagacaatgcccatcggccagagaggcagtgagcagggtaaacgcgtcgagaacatcaacggaacctcttaccctagcctccagcaaaaaaccaacgccgtgaaaaaactgcataagtgcgacgaatgtggaaaatccttcaaatacaactcgaggctggtgcagcacaaaatcatgcacacgggagaaaagcggtacgagtgcgacgattgcggtgggacgtttagatcgagcagttccttacgggtgcacaagcgcatccacaccggtgagaagccttataagtgtgaggagtgtggcaaggcatatatgtcttacagtagtttgattaatcataagagtacccattcaggtgaaaagaactgcaaatgcgacgagtgcggaaagtctttcaactacagctctgtgctggaccaacacaagaggattcataccggtgaaaagccctatgagtgcggcgagtgcggcaaagctttccggaattccagcggccttagggtgcacaagaggattcatacgggcgagaagccctatgagtgtgacatctgcgggaagacatttagcaattctagcggcctgagagtccataaaaggatccacactggtgaaaaaccatacgaatgtgacgaatgcgggaaagccttcataacctgtcggacgcttttgaaccacaaatccatacatttcggggataagccttacaaatgcgatgaatgtgagaaatcgtttaactattcctcactgctgatccagcataaagtgatccatactggggagaaaccctatgagtgtgatgagtgcggcaaggcattccgcaattcctctggactgatcgttcataagagaatccacacaggggagaagccgtataaatgtgacgtatgtggaaaggccttttcttactccagcggattggctgtccataagtctattcatccagggaaaaaagcacatgagtgtaaggaatgcggaaagtccttttcctataactccttgctgctgcagcacagaaccatccatacaggagaaagaccatatgtgtgtgatgtttgtggcaaaaccttccgtaacaacgctgggttaaaggttcaccgccggctgcataccggtgagaaaccttacaagtgcgacgtgtgcggaaaagcatacatcagtaggtcatcactcaagaaccacaaagggattcatctgggcgagaagccatacaaatgctcgtactgtgaaaagtcatttaattacagcagcgctctggagcagcataagagaattcataccagagagaagcctttcggatgcgacgagtgtgggaaagcgtttcgcaacaacagcggtctgaaggtgcataagcggatccacacaggcgagaggccttacaaatgtgaagagtgtggtaaagcgtacatcagcctgtcatctttgatcaatcacaaatcggtgcacccgggggaaaagccctttaaatgcgacgagtgcgaaaaagccttcatcacctaccgtactctaactaatcataagaaggtgcacctcggggagaagccttataagtgtgatgtgtgtgaaaagtcttttaattatacttctctgctgagccaacaccgccgcgtccatacaagggagaaaccatatgagtgcgacaggtgtgaaaaggtatttcgcaacaatagctctctaaaagtgcacaagaggatccacaccggcgagaggccctatgaatgcgacgtatgtggtaaggcttatatctcccacagcagcttgatcaatcataaatctacacatcccggacgtacaccacacacgtgcgacgagtgcggcaaggccttcttttcgtcaaggaccttgatttcgcacaagcgtgtccatctgggcgaaaagccattcaaatgtgtggaatgtgggaaaagcttttcatacagcagtcttctgtcccagcacaagcggatacacacaggggagaagccctacgtctgtgacaggtgtggcaaagcttttaggaatagctccggactgactgttcataagcggatccacacaggtgaaaagccttacgaatgtgatgaatgcggcaaagcgtatatttctcactctagccttataaaccataagtccgttcaccaggggaagcagccctataactgcgaatgtggcaagtctttcaattaccggtcagtcctggatcagcacaaacggatccataccggcaaaaagccatacagatgcaacgagtgtggcaaggcttttaacattaggagcaatctaacaaagcataagaggacacacaccggtgaagaatcactgaacgtcatatacgttggcagctactccgggaccagtcagaagaggacatatgaagggggcaatgcactggatggcgggaggatgaggatgcccctctag

SEQ ID NO: 141536 - DNA, 1386 bp, synthetic construct
  misc_feature 1..1386: note = Description of Artificial Sequence: Synthetic coding sequence
  source 1..1386: mol_type = other DNA
atggattccgtggcttttgaggacgtggcagtgaatttcacactggaagaatgggccttactggaccccagccagaaaaacctgtatcgtgacgttatgagagagaccttcagaaacttagccagtgttggtaagcagtgggaagaccagaatattgaggaccctttcaagattccaagaagaaacatctcccacattcctgaaagattatgcgagtcaaaagagggcggtcagggcgaagagacctttagtcagatccccgatggaattctgaataaaaaaaccccaggtgtcaaaccctgcgaatcttccgtgtgcggggaggtgggaatggggccatcatctctaaaccgccacatccgcgaccacacaggacgagagccaaatgagtaccaagagtacggcaagaagtcatatacaaggaaccagtgcggacgtgcattgtcctatcaccgatctttccccgtgcgcgagaggacccaccccggaggcaaaccttatgactgtaaagagtgcggagaaacctttatttccctggtttccatccgccgccatatgttaacacacagaggtggggtcccgtataagtgtaaggtttgcggcaaggcgttcgattatccaagtttgtttcggatccatgaaagatcccacaccggggagaaaccgtacgagtgcaagcaatgtggtaaggcgttctcctgcagctcttacatacggatccacgaacggacccacactggtgataagccttacgaatgtaagcaatgcgggaaagcattttcatgcagcaaatatattaggatccacgagcggactcacactggcgagaagccctatgagtgtaagcaatgcggcaaagccttccgatgtgcaagcagtgtgcgctctcacgagcgtacacatacaggggagaaactatttgagtgcaaagagtgcgggaaggcccttacctgtttggcaagtgtgagaagacacatgatcaagcataccggtaacgggccatacaaatgcaaggtctgcggcaaagccttcgactttccgtccagctttcggattcacgagcgcactcacactggcgagaagccctacgattgcaagcaatgtggaaaggcattctcttgctcttcgagttttcgcaaacatgaacgcatccatacaggtgaaaagccctacaagtgcaccaagtgtggcaaagccttttcccgatcgagttattttaggatacatgagcgaacccatacaggggagaagccgtatgagtgcaagcagtgcggcaaggctttctcacgtagtacatactttcgagtgcatgaaaagattcacaccggtgaaaagccctatgagaaccccaaccccaacgcatccgtagtccctgttctgtcatag

SEQ ID NO: 141537 - DNA, 3168 bp, synthetic construct
  misc_feature 1..3168: note = Description of Artificial Sequence: Synthetic coding sequence
  source 1..3168: mol_type = other DNA
atggtgggctctcatgcagatatggctccagcctccacagccgagggcgcaggtgagaaaccggggcctgcagcccctgcgcctgccgcccagtatgaatgtggagagtgtggtaagagcttcaggtggagctcacgattattacaccatcaaaggactcacacgggggaaagaccctacaaatgcccagactgccccaaagcgttcaaagggtctagcgcattgctgtatcatcagaggggtcataccggcgagagaccatatcagtgccccgactgtcccaaggcatttaaacggagttcccttctacaaatccaccggtctgtgcatactggcttacgcgcgtttatttgcgggcagtgcggactggcattcaaatggtcttctcactatcagtaccatctgcgtcagcacacaggcgagagaccctacccatgtcctgattgtccaaaggcattcaaaaatagcagtagtcttcgaagacaccgacatgtgcatacgggcgagcgaccctatacctgcggggtgtgtggcaaatctttcacgcaatcgacaaacttgagacaacaccagcgcgtgcacacaggggagcggccttttcggtgtcctctgtgccccaagacctttacacattcatcaaatctgctcctccatcagcgcacacacggcgccgccccggcacccggaactgccagtgcagccccccccccccagagcagggagcctggaaaagtgtttgtctgtgatgcatatctccaacggcacctgcagccccactccccgcctgcccctccagcccccccacctcctccacctccagtcgtgccagaactgttcctggctgcagccgagaccaccgtggagcttgtgtatcggtgtgatggatgcgagcagggtttctcatcagaagagcttttgctggagcatcagccctgtccgggcccagatgcagctccccagccacaggaagcccctgctgaggcccctaaggccgatcaacccccaagccctctgccacagccaccacctcctgctgcagctcctgcaccaggatttgcctgcctaccatgtggcaagagcttccggaccgttgcgggcctctctcgccatcagcattctcacggcgcagctggcgggcaagcgtttcgttgtggatcgtgcgacgggagcttcccccagctggcctcactgctggcccaccagcagtgccacgtcgaggaggccgctgctggccgtccaccacctcaggcagaggccgccgaggtgacttgtccccaggagccattagccccagcagctccagtgcctccgccacccccctccgccccagcctccgccgaaagaccatacaaatgtgcagaatgcgggaagtcctttaagggcagctctggcctccggtaccacctgagagatcacaccggagagcggccgtaccaatgcggggagtgcggtaaagcttttaagcggtcctccttgctcgccatccaccaaagggtccacactggcctcagggcctttacatgtggccagtgtggtttaaccttcaaatggtctagtcattatcagtatcatctccgacttcatagcggagaacggccctacgcttgcggagaatgcgggaaggcctttcggaatacaagctgtttacgaaggcatcgccacgtgcacaccggcgaacggccgcacgcatgcggagtttgcggcaaaagcttcgctcaaaccagtaatctgcggcagcatcagagagtgcataccggagagagacccttccgctgtcccttgtgtccaaaaactttcacacactcaagtaatctactgctccatcagcggacacacagcgcagaaagacccttcacttgcccaatctgtggacgggggttcgttatggccgcgtacctccagagacatcttcggactcacgcacccgccaacacccctccttccacgactgccccggccgcaggcccccagccgccagccccactggctgctgctagagcccccccagccacgcaggatgtccatgtactgccacaccttcaagccacactcagcctggaggtcgccggaggcactgcccaagcaccctccctcgggccagcggcccccaattcccagacctttctgttggtacagacagcccagggactgcaactgattccctcatccgtacaaccccccacccccccccctcctcccgcccctcccaagctcatcctgttacccagctcgagcgctggcgcagggggtggcagggcacgccagggacctcgggccgtgggcaaggccggacagggggcgggtgttgtgtggctgcccggccctgggggtctgggcgtccagggcgccgcatccgctggagccagcggcaccgggcaaagtctgattgttctgcaaaatgtggggggcggagaagcaggccctcaggaaatgagcggcgtccaactgcagccactacggcccgcaccagaggtcacaaccgtgcagttgcaacctgcccaagaggtgacaaccgtgcagctccagccggcccaggaggtgactacggtacaactgcagcccgcacaggaggttaccacagttcaactccagcctgtggccggccaactcagcaattcctcagggggcgcagtggctactgaggctccaaacctgctcgtcgtgcagtctggtgctgccgaagagctgctaacggggcccggcccaggtgaagcgggcgacggcgaggctagcacaggtgtggttcaggatgtccttttcgaaacactacagactgacgagggcctccagagtgtgcttgtattgagtggggctgacggggaacagaccaggctgtgtgttcaagaggtggagacgctcccacccggcctgactgaaccaccagccacaggacctcctggacaaaaactgctcatcatcagatcagcgccggcaacagagctgctcgattcatccaatacagggggcggaacggctacactccaactgttagctccacctcccagtggaccagcgtcaggacccgccggcctcccaggcgcccctgccagccagatggtgcaggtggtgcccgcaggagccggcccgggagtgatgacgccccaggggctacccagcatccagattgtacaaactcttcccgcggtgcagttggtgcacaccttttag

SEQ ID NO: 141538 - DNA, 1602 bp, synthetic construct
  misc_feature 1..1602: note = Description of Artificial Sequence: Synthetic coding sequence
  source 1..1602: mol_type = other DNA
atggatagatatcagggtaaccaagacagagttctgaggcaggttactgtgatctcacgagagaccctgaccgacgagatggggagcaagtattctgcctttggcaaaatgtttaacaggtgcactgatttagcccccctgagtcagaaattccataaatttgactcctgcgaaaactcattaaaatcaaactccgacttgctgaattacaataggtcctatgccaggaaaaatcctacaaagcgcttccgatgcggccgccccccaaagtacaacgcttcatgtagcgttccagagaaagagggattcattcatactggcatggagccttacggcgattcacaatgtgagaaggttctgagccacaagcaggctcacgtccagtataagaagttccaggcaagagaaaaacccaacgtgtgtagcatgtgcgggaaagcctttattaaaaagagccagctcattattcatcaacgaatacacaccggggaaaagccctacgtgtgtggagattgcagaaaagccttctcagagaaaagtcacctgatagtgcatcaaaggatccacaccggtgaaaagccctatgaatgtactaagtatggcagagccttctctaggaagtccccctttaccgtgcatcagcgggtccacacaggagagaagccatatgaatgcttcgagtgccctaaggcctttagccagaagagccacctgattatacatcagcgcgtgcacactcgggagaaaccattcgagtgctccgagtgtcgaaaggccttctgcgagatgtcccatctgttcattcaccagatcactcacacagggaaaaaaccctacgaatgtacagagtgtggtaagacatttccaagaaaaactcagcttatcattcatcaacggacccacacaggcgaaaagccgtacaaatgcggagagtgcggaaagaccttctgccagcagtcccatttaattggacatcagcgaatacacacaggagagaaaccatatgtgtgtactgactgcggaaaagctttctctcagaagtcccacctcaccgggcaccagcggctccataccggcgagaagccctacatgtgtactgaatgtggcaaaagtttctcccaaaagtcccctttgattattcatcagcgcatccatacaggtgagaaaccttatcaatgcggcgagtgcggcaaaactttttcacaaaagtctctgcttattatccatctgagggtccatactggagagaagccttacgaatgcacagaatgcggacgggccttttccttgaagtcacacctgattctgcaccagcggggacacactggcgaaaaaccatacgaatgctctgagtgcggcaaggctttttgcggaaaatcccccctcatcatacatcaaaagacacaccctcgggaaaagacacccgagtgcgccgaaagtgggatgacatttttctggaagtcccaaatgatcacctatcaacgcaggcacacaggggaaaagccttcgaggtgttcggactgtggaaaggctttttgtcagcacgtgtactttactggacatcagaacccttaccggaaagatacattgtatatttgttag

SEQ ID NO: 141539 - DNA, 1974 bp, synthetic construct
  misc_feature 1..1974: note = Description of Artificial Sequence: Synthetic coding sequence
  source 1..1974: mol_type = other DNA
atgatcgagagtcaggaacccgtaactttcgaggatgttgcggtggattttacgcaggaagaatggcagcagttgaacccagcacagaaaaccttacaccgagacgtgatgctggagacttataatcatctcgtgtccgtgggctgttctgggatcaagcctgacgtaatattcaaactcgagcacggaaaggacccatggattattgagtcagagttaagccgatggatttatccagatagggttaaaggtttggaaagcagccagcagatcatcagtggtgagctgctgttccagagggagattctggaaagagctccgaaggacaacagcctctactcagtgttgaagatctggcacattgacaatcagatggacagatatcaggggaaccaagatagagtccttcggcaggtgaccgtaattagtcgagagactctgaccgacgagatgggtagcaagtattcagccttcggtaaaatgtttaatagatgtaccgaccttgccccgctgagccagaagtttcacaagttcgactcctgtgagaatagtctcaagagcaacagtgaccttctcaactacaaccggtcgtatgctagaaagaaccccacaaaacgtttccgctgtggcagaccccccaagtacaacgcatcctgcagtgtgcctgagaaagagggtttcatccatacaggaatggagccttatggggacagccagtgtgaaaaagtgctgtcacacaaacaagcccacgtccagtataaaaagttccaggcccgagaaaaacccaacgtgtgttcaatgtgtggcaaggccttcataaagaagagtcaactcatcatccatcagcgcatacacactggcgaaaagccatacgtttgtggcgattgccgaaaggctttctctgagaagagccatttaatagtccaccagcggatacatacaggcgagaaaccatacgaatgtaccaagtatgggagagctttttctcgaaagagtcctttcactgtgcatcagcgggtccacaccggagagaaaccgtatgagtgcttcgagtgccctaaagcgttctcacagaagagccatctcataatacatcagcgagtgcatacaagggagaaaccttttgaatgcagtgagtgccgcaaagccttctgtgagatgagccatttgttcatccatcagattacacacactggaaagaaaccctacgaatgcaccgagtgtggcaaaaccttccccagaaagacgcagctcattatacatcagcggacacataccggcgaaaagccttataagtgcggtgagtgtgggaagacattctgccagcagagccatctcatcggacatcagcggattcacactggcgagaagccatacgtatgcaccgattgtgggaaagccttctcacaaaaatcccaccttaccggacaccagaggctgcataccggcgaaaagccttacatgtgtaccgagtgtgggaagtccttcagtcagaagtcaccactaattatccatcagagaatccacacaggcgaaaagccataccagtgtggggagtgtggaaagaccttttcccagaaaagtttgctgattatccatttacgcgttcacaccggcgagaaaccctacgaatgtactgaatgtggtcgcgccttttcgctgaaatcacacctcatcctgcatcagaggggccacacaggggagaagccctatgaatgttccgaatgcggcaaggctttctgcgggaagtcgcctctcatcatccaccagaaaacccacccccgtgaaaaaaccccagagtgtgcagagtctgggatgacgttcttttggaagtcccaaatgatcacctaccagagacgtcatacaggcgaaaaaccctcccgctgtagtgattgtggaaaggccttctgtcagcacgtttattttacgggacatcagaatccttaccgcaaagacactctgtacatatgctag

SEQ ID NO: 141540 - DNA, 645 bp, synthetic construct
  misc_feature 1..645: note = Description of Artificial Sequence: Synthetic coding sequence
  source 1..645: mol_type = other DNA
atgattgagtcccaagagccagtaacattcgaagacgtagcagtggattttacccaggaggaatggcagcagctcaatcctgcgcagaaaactctgcatcgagacgtgatgctagagacttacaaccatctggtaagcgtggggtgctcagggattaagcccgatgtaatcttcaaattggagcacggaaaagatccttggataatagagagcgagctgtcccggtggatctatcccgatagggtgaaaggcctggagtccagccaacaaattattagtggagagttactgtttcagcgcgagatcttggaacgggcgcccaaagacaatagtttgtacagtgtgctgaagatttggcacatcgataaccagatggaccgttaccagggcaatcaggatcgggtgctgcggcaggtgaccgttatcagccgagagacactgaccgacgagatgggatccaagtatagcgcgtttgggaaaatgttcaatagatgcactgatctggccccactgtcgcagaagttccataaattcgactcctgtgagaacagcctgaagagcaattctgatctcctcaattacaatcggtcttacgcaaggaaaaatccgaccaaacgttttcgatgcggacgccccccaaagtag

SEQ ID NO: 141541 - DNA, 1932 bp, synthetic construct
  misc_feature 1..1932: note = Description of Artificial Sequence: Synthetic coding sequence
  source 1..1932: mol_type = other DNA
atgattgagtcgcaggaggagtggcagcaattgaacccagctcaaaagacgcttcatagggatgtgatgcttgagacttataaccacctggtctccgtgggatgttccggcatcaagcccgatgttatttttaaactggaacatgggaaggacccatggattatcgagagtgagctaagccggtggatctatccggaccgagtgaaaggccttgagtctagccagcagatcatttccggagagcttctgtttcaacgtgagatcctcgaaagagcccctaaagataactctctctacagtgtactgaagatttggcacattgataatcaaatggaccgctaccaggggaatcaagaccgcgtcttgagacaagtgactgtcattagtcgagagacccttacagacgaaatgggcagcaagtactctgcatttggtaagatgtttaatagatgtacagatctggcaccactgtcccagaaatttcacaaatttgattcttgcgagaacagtctcaagagcaactccgacctgctcaattacaatcggagttatgcacgtaaaaatccaaccaaaaggttccggtgtggccggccccctaaatacaacgctagttgctctgtacccgagaaagagggctttattcataccggcatggaaccctatggtgatagccagtgtgaaaaagtattaagtcacaagcaagcgcacgttcagtacaagaaatttcaggcccgagagaaacctaacgtctgctctatgtgcggcaaggctttcatcaagaagtcccagctcataattcaccagcggattcacaccggcgagaagccatatgtgtgcggcgattgtcgaaaagcctttagcgagaagagccatcttattgtacaccagcgcatccacacaggcgagaaaccttatgaatgtacgaagtacggccgagcctttagtagaaaatcaccctttacagttcaccagcgagtgcacacaggggaaaagccttacgaatgcttcgagtgccctaaggccttctcgcaaaaatctcacttgatcatccatcagagagtccacacccgcgagaaaccgttcgaatgttccgagtgtaggaaggccttttgcgagatgtcacatcttttcattcatcagataacccacaccggaaaaaagccttacgagtgcactgaatgcggtaagacttttccacggaaaacccaacttatcattcaccagcggacgcacaccggtgagaaaccatacaagtgcggagagtgcggaaaaactttctgccagcagtcccacctgattgggcaccagcggatccacaccggtgaaaaaccttatgtatgcacggattgcggcaaggcattttcccaaaagagccacttaacaggccaccagaggctgcacacgggggagaaaccttacatgtgcacagagtgcggcaaatccttcagtcagaaatcaccgttgattattcaccagcgaatacataccggagagaagccctaccagtgcggcgagtgtggaaagacttttagtcagaagtctttactcattattcacttgcgggtgcatactggcgaaaagccttacgaatgcacggagtgcggaagagcattttcactcaagagccacctgattctgcaccagagaggccataccggagagaaaccatatgagtgctcagagtgtggtaaagctttttgtgggaagagtcctctgatcatccatcagaaaactcaccctagggagaagacacctgagtgcgctgaatccggaatgacgtttttttggaagtcacaaatgataacctaccagcggcgtcacaccggcgaaaaaccaagcaggtgttccgattgcgggaaggctttttgtcaacacgtctactttacgggccaccagaatccgtaccggaaggatacactttacatttgttag

SEQ ID NO: 141542 - DNA, 5937 bp, synthetic construct
  misc_feature 1..5937: note = Description of Artificial Sequence: Synthetic coding sequence
  source 1..5937: mol_type = other DNA
atgtcaagaccgaggttcaatcccagaggcgatttcccacttcaaagacctcgtgcacctaatccatctgggatgaggcctccagggcccttcatgcggcccgggtcaatgggcttaccccggttttatcctgccggtcgagccagaggtatcccacatcgcttcgcgggacacgaatcctaccagaatatgggaccccagcgtatgaatgtgcaggtcactcagcaccgaactgatcccaggctgaccaaggagaaactagacttccatgaggcccagcaaaaaaaggggaaaccccatggctctcgttgggatgacgaaccgcatatctctgcctcggtggcagtcaaacaaagcagtgttacccaggtaacagaacaatctcccaaggtccagtctcggtacacaaaagagagtgcttccagcattctcgcctcttttggtctatctaatgaggatttggaggagctctccaggtacccagacgagcagttgaccccggagaacatgcccttaatcctgagagacattagaatgagaaaaatgggtaggcgtctgccgaacttacctagccaaagtagaaacaaagagaccctgggctccgaggccgtgtcttcaaacgtgatagattacgggcatgcgtctaagtatggctacacggaagatcctttagaggtcagaatctatgaccccgaaattcccactgacgaggtggaaaatgaatttcaatcgcagcagaacatctccgcctcagtgcctaacccgaacgtgatttgcaattctatgttccctgttgaagatgtgttcagacagatggattttccaggggagagtagcaacaatcggtctttcttcagcgtggaatccggtacaaagatgtcaggcctgcacataagcggaggacagagcgtccttgaacctataaaatcggtaaaccagtcaataaaccagactgtgtctcagactatgagccagagtttgattcctccctcgatgaatcagcagcctttctctagtgagcttatctcatcggtgtcccagcaagaacggatcccgcatgaacctgtgatcaactcttcaaatgttcacgtggggtccaggggcagcaaaaagaactaccagtcacaggcagacatcccaatcagatcgcccttcggaatcgtcaaggcctcttggctgcccaagttttctcatgcagacgcccagaaaatgaagaggttacccactccatctatgatgaacgattattatgctgcgtccccacgtatattcccccacctctgctcattgtgtaatgttgagtgctctcacctcaaggattggatacaacaccagaacacctcaacacatatcgagtcatgtagacagctgaggcagcagtatcccgattggaatcctgaaattctccccagccggagaaatgaagggaaccgcaaggagaatgaaacacccaggcgcaggagccattccccaagcccgcgtagaagccgtaggagctcgtcttcccacagattcaggaggagtcgcagtcccatgcactacatgtacaggccacgatcacgcagtcctcggatttgtcatcggttcattagtagatataggtcgcgaagcagaagcaggagcccgtaccgcattcggaatcccttcagaggatcaccaaaatgtttccgcagcgtgtctcccgagcggatgagccggagaagtgtgcgcagtagcgatcgaaaaaaggcacttgaggacgtggtgcagcgttccggccacggtactgaattcaacaaacaaaaacatctggaggcagcagacaagggccactctcccgctcagaaacccaagacgtctagtggaactaaaccgagcgtcaagccaacaagcgcgacaaaatccgatagtaatctggggggtcatagcatacgctgcaagtccaagaatctggaggatgatactctcagtgaatgcaaacaggtgtctgataaagcagtgtctctgcagcggaaactgcggaaagagcagagcctccactacggatcagttttactgatcacagaacttcccgaggatgggtgtaccgaggaagacgtgcgcaagttatttcagcctttcgggaaggttaacgacgtcctcatagtgccatacagaaaagaagcatatctcgagatggagtttaaagaggccatcacagccatcatgaagtacatcgagacgacacccttaacgattaagggcaagagcgtgaaaatttgcgtacccgggaaaaagaaggcacagaataaggaagtaaaaaaaaagacccttgagagcaaaaaggtttcggcctctacgttaaagagggatgccgacgcctccaaggccgtagaaattgtgacatctacatcagccgccaagacaggacaggctaaggcctcagtggccaaagtaaacaaatctacgggtaaaagcgcatcctccgtgaagtctgtagtgaccgtggccgtcaaagggaataaagcttccatcaaaaccgccaaatctggcggcaagaaatctctcgaggcaaaaaagacgggaaatgtgaaaaataaagactccaataagcccgtgactatacccgaaaactctgagatcaaaacttccatcgaggtgaaggccactgagaattgcgccaaagaggccatttcagatgcggccctggaggcgacagagaatgaaccactgaataaggaaacagaggagatgtgcgttatgttggtgtctaatctccctaataagggatattccgttgaagaagtgtatgacctcgcgaagccatttggtggacttaaagacatcctgatcctgagcagccacaagaaggcttacatcgaaatcaatcggaaggccgccgaatccatggtgaaattctatacatgctttcccgtcctcatggacgggaatcaactgtcaatcagtatggcacccgagaacatgaatatcaaggacgaggaggcgatcttcatcacactggtgaaagaaaatgaccccgaagctaatattgacactatttatgatagatttgtgcacctggataatctgccagaggacggcttgcagtgtgtgctttgtgtggggctgcagttcggtaaggtggatcatcacgtgttcatatccaacaggaacaaagcaatcctccagctggactctccagagagcgcccagagtatgtattcattccttaagcaaaacccccagaacatcggcgaccatatgcttacgtgttctctgtctccaaagattgatctccccgaggtccagatcgaacacgatcccgaactggaaaaggagtcaccggggttgaaaaattcacctattgatgagtcagaagttcagaccgcaaccgacagcccttcagtcaagcctaatgaactcgaggaagaaagtacaccttccattcagaccgagacccttgtccagcaggaggaaccatgcgaagaagaagccgagaaagccacctgtgactccgacttcgccgtggaaaccttagaactggaaacacagggagaggaagttaaggaggagatccccctggtggcctcagctagcgtttcgatcgagcagttcaccgaaaatgctgaagaatgcgccctcaaccagcagatgttcaattctgatctagagaagaaaggggctgagattatcaaccctaagactgccctgctgccatctgattccgtcttcgcagaagagcgcaatctcaaaggaatactggaagagagtccttctgaggccgaggattttatcagtggtatcacgcaaacgatggtcgaagcagtggcggaggtcgaaaaaaatgaaacagttagcgagatcctccccagcacatgtattgtcaccctcgtccctgggatccctaccggcgacgaaaagactgtggacaagaagaatatttccgaaaagaagggcaatatggatgaaaaggaggaaaaggaatttaacactaaagaaacccgcatggaccttcaaatcggtactgagaaggcagagaaaaacgagggcaggatggatgccgagaaggtggaaaaaatggcggccatgaaggagaagccggctgaaaatacccttttcaaagcctacccaaacaaaggggtaggacaggcaaataagccagacgaaacctcaaagacctccatactggcagtgtctgatgtgtcttccagcaaaccttctattaaggctgtgatcgtgagtagccctaaggctaaggcgaccgtttccaaaaccgagaaccagaaatccttccccaaatccgtcccaagggatcagattaacgccgagaagaaactgagtgccaaagaattcggcctgctgaaaccgacatctgcacgtagcggcttggccgagtcttccagcaagttcaagccgacccagtccagcctgacgagggggggcagcggcagaatcagcgctttgcagggcaaactgagtaaacttgactacagggacatcactaagcagtctcaggagaccgaagcgagaccctcaattatgaaaagggatgatagcaacaacaaaaccttggctgaacagaacacaaaaaacccaaagagtactaccggacggtctagcaaaagcaaggaagagccactgtttccatttaacctggacgagttcgtaaccgttgacgaggtcattgaagaggtgaatccctcacaagccaagcagaacccactgaaaggaaagagaaaagagactctcaaaaacgtccctttcagtgaactgaaccttaagaaaaagaaggggaaaacctccacccctcggggtgtggagggagagttgagttttgtgaccttggacgaaatcggtgaagaggaagatgctgccgcgcatctggcccaggcgctagtgactgttgatgaggtcattgacgaggaggagttgaacatggaggagatggtcaaaaactcaaactccctgtttactctggacgaattgatcgaccaggacgattgtatttctcacagcgaaccaaaagatgtcaccgtactctccgtggcagaggaacaggatctcctcaaacaggagcgcttggttacagtcgatgagatcggcgaggtcgaggaactccctctgaacgagtcagcagatattacattcgccaccttaaacacaaaaggcaatgaaggggacacggttagggactccattggctttatcagcagtcaggtgcctgaggatccgtcgacacttgtgacagtggacgagattcaggatgactcctccgatcttcatctagtcaccctggacgaggtcacggaggaggatgaagattccctcgccgactttaacaacttgaaagaggaactcaacttcgtgaccgtcgacgaagtcggcgaggaggaggacggcgataatgaccttaaagtagagctggcgcagtctaaaaacgaccaccctacggataaaaaagggaataggaaaaagcgtgctgtggacactaagaagacaaagttagagtcgctgagtcaggtgggacccgttaatgagaacgtcatggaagaggacctcaagacaatgatagagcgccatcttacagcgaaaacccctacgaaaagagttcggattggaaagaccctgccgagtgagaaggccgtggtgaccgagcctgcaaaaggcgaggaagcctttcagatgagtgaggtggatgaagagtccgggctcaaggacagcgagcccgagcggaaacggaagaagaccgaggacagctcaagtggcaaatcggtggccagcgacgtgccagaagaacttgattttctcgttcccaaggcagggttcttttgtcccatttgtagcctattttactccggggagaaggcaatgacaaatcactgtaagtcaaccaggcacaagcagaataccgaaaagttcatggcaaaacagcggaaggagaaggaacagaacgaagccgaggagcgatccagccgctag

SEQ ID NO: 141543 - DNA, 3420 bp, synthetic construct
  misc_feature 1..3420: note = Description of Artificial Sequence: Synthetic coding sequence
  source 1..3420: mol_type = other DNA
atgtcccgtccgcgctttaaccccagaggtgattttccactgcaacgtccaagggcgccaaacccttccgggatgcgacctcctgggccatttatgcggccaggttcaatggggttacctcggttctacccggctggcagggccagggggattccacatagattcgcaggacacgaaagttaccagaatatgggcccccagcgcatgaatgtacaggtcacacagcacaggaccgacccccgcctgaccaaggaaaaattggacttccacgaggcgcaacaaaagaaaggaaaaccacatggctcgcgctgggatgacgaaccccatatttccgcttcagttgcagtgaagcaatcttctgtaacacaggtaaccgagcagtcaccaaaggttcagagccggtacactaaggagtcagcctcctccatcttggccagcttcggtctgtccaatgaggatttggaagaacttagtcgatatcctgatgagcagctgacgcccgagaacatgcccctcatactcagagacatcaggatgaggaagatgggtcgaagactccctaatctgccctcacagagcaggaacaaagagactctgggttcagaagcggtgtcctctaacgtgattgattatggacatgcctcgaaatacggctataccgaagaccctctggaggtgcgtatttacgatcccgagatccctacagatgaggttgagaacgagttccaaagccagcagaacataagcgccagtgtacccaatcctaacgttatttgtaatagcatgtttccggtcgaggatgtcttcagacagatggattttcccggggagtctagtaataatcgttcctttttcagcgttgaatccggaaccaaaatgtccggtctgcacatatctggcgggcagagtgtacttgagcctataaagagcgttaatcagtctattaatcagacagtatcccaaactatgtctcagagcctgatccccccctccatgaaccagcagccgttttcgtcagagctgattagctccgtcagccagcaagaacgcattcctcacgagcccgtcatcaactccagtaatgtccacgtggggagccgggggtctaagaaaaattatcagtctcaggcggatatcccaattcgcagcccctttggtattgttaaggcatcatggctccccaaattctcacacgcggatgcacaaaagatgaagcgactgccaacaccatccatgatgaatgactactatgctgcttcgcccagaatctttccccacctttgcagtctctgtaatgtagaatgctctcacctgaaagattggatccagcatcagaataccagtacacacattgagtcgtgcaggcagctgcggcaacagtaccccgattggaatccagagatattaccttctcggagaaatgagggcaatcggaaagaaaacgaaaccccccgaaggcgatcccacagcccttcaccgcggcgcagcagacgaagttcaagttcgcaccgcttccgccggtcgcggtcccctatgcattacatgtacagacccagaagtcggtcacctcggatctgccacagattcatttctagataccgaagccgtagtcggtcgcggtcaccctaccggatccgtaacccttttcgtgggagcccaaagtgttttcgctctgtttctccggaaagaatgagccgtcggtcagtgaggtctagcgaccggaagaaggcactagaggacgttgtacagcgttccgggcacggaacagagttcaataaacagaagcacttggaagcagctgacaaaggccatagtcctgcccagaagccaaagacaagcagtggcactaagccttctgtgaaacccacatcagccactaaatccgattccaatctcggcggtcacagcattagatgtaaatcaaagaacctcgaagacgacaccctcagcgagtgcaagcaggtctctgataaggcagtaagtctgcagcggaaactgcgaaaagagcagagtctgcactacgggtctgttcttttaatcaccgagttacctgaggacggatgtactgaggaggatgtccggaaattgttccagccctttggtaaggtgaacgatgtgctgatcgtcccgtaccggaaagaagcttaccttgagatggagtttaaggaggcaatcactgcaattatgaagtacatcgagaccacccctctgacaattaaggggaagtctgtgaagatttgcgtccctgggaaaaaaaaggcccaaaacaaagaggtgaaaaagaaaacactcgagtccaagaaagtgtctgcatctactctgaagagggatgctgacgcttccaaagccgtggaaattgtcaccagcacctccgcagctaagactgggcaggctaaagcgtctgtcgcgaaggttaacaaatctacagggaaaagcgcttcatccgtgaagagcgtcgtgacggtagctgtgaagggcaataaggcaagtatcaaaaccgcaaagtctggcggcaaaaagtcactcgaggcaaagaagactgggaatgtcaaaaataaagattctaacaagcccgtcaccatccccgaaaatagcgagatcaagacgagcatagaagtgaaggctaccgagaactgcgccaaagaagcaatttcagatgctgcacttgaagctactgaaaatgagccactgaacaaggagaccgaagagatgtgtgtcatgctggtctctaatttaccgaacaagggatactctgtagaggaagtgtacgatctcgcaaaaccttttggcggcctaaaggatattctgatacttagtagccataaaaaggcctatatagaaattaaccgaaaggctgccgaaagcatggtgaaattttatacatgtttcccagttctaatggacggtaatcagctctcaattagcatggctcccgagaatatgaacattaaggatgaggaggccatatttattactctcgtcaaagaaaatgatcctgaggccaacattgataccatctatgaccgctttgtgcacctggacaatctgccagaagacgggctgcagtgtgtgttgtgtgtcgggcttcagttcggaaaagtcgatcatcacgtgttcatctcaaatagaaacaaggccatcctacagctggattctcccgagtccgcccagtctatgtattctttccttaagcagaacccgcaaaatatcggcgaccacatgctgacctgtagtctaagtccgaaaatcgacctccctgaggtacaaatagagcacgatccagaactggagaaagaacgtctgtggctgagcaaaacactccgtatcttgaaagccctcctggtggaggtcccaaaccttaaaaggtcacactactttcacctgatatggatgaacctccttctgtggatgagactgtag

SEQ ID NO: 141544 - DNA, 2445 bp, synthetic construct
  misc_feature 1..2445: note = Description of Artificial Sequence: Synthetic coding sequence
  source 1..2445: mol_type = other DNA
atgtcccgcccccggtttaatcctcgcggcgattttccgctgcaaagacctcgggcacccaaccccagtggaatgagaccccccggtcctttcatgcgacctggttctatgggtttgcctaggttttaccctgctggaagggctaggggtatcccccatagattcgctggccatgaatcttaccagaacatgggaccgcagcggatgaacgtgcaggtcacacagcaccggaccgacccgaggctaacgaaggagaagcttgatttccatgaggcgcagcaaaagaagggaaaaccccacggcagtaggtgggatgatgaaccccatatctcagcgagcgttgccgtgaagcagtcttcagtgactcaggtgaccgagcagagtccaaaggtccagtccaggtacactaaggaaagcgctagcagcatccttgcaagtttcggcctgtccaatgaggatcttgaagagctgtcgcgctacccggatgagcagctcacaccggaaaatatgcccctaatccttagggacatccgcatgcgcaaaatggggagaagattgccaaacttgccttcccagtcacgtaacaaggaaaccctgggaagcgaagcagtctcttccaacgtcattgattatggccacgcctccaagtatgggtacacggaagatccactcgaagtcaggatttacgatcctgaaatccccactgatgaagtggaaaacgagtttcagtcccagcagaatatcagtgcaagtgtccctaatcctaacgtgatctgcaactccatgttccccgtcgaggatgtgttccggcagatggatttccccggagagagcagcaacaataggtcctttttctctgtggagagtggaacaaaaatgagcggactgcatattagcggggggcagtccgtcttggaaccaatcaaaagcgtgaaccagtccatcaatcagactgttagtcaaacaatgtcgcaatcactcattccacctagcatgaatcagcaaccgttctcctccgaactcatttctagcgtgagccagcaggagagaatcccccatgaaccggtcatcaacagttcaaatgtgcatgtgggaagtcggggtagtaagaagaactaccagtctcaggcagacattcccattcggtcccctttcggcattgttaaggcaagttggctccccaagttctcccacgctgacgcccagaagatgaagcgcttgccaaccccatccatgatgaatgattattacgctgcctcgccaaggatctttccccatctgtgctccttgtgtaacgtggagtgtagccacctgaaggactggattcagcaccagaacacttcgacacatatcgaatcgtgcaggcagctcaggcagcaatatcctgattggaatcccgagatcttgccatcaaggaggaacgagggcaatcggaaagaaaacgagacccctcgccggagaagccactccccctcccccagaagaagccgccgaagttccagctctcaccggttccgtaggtcccggtcaccaatgcactacatgtatagacccaggagccgtagtcctcgcatttgtcacagattcatatctaggtatagatccaggtcacgcagtcgaagcccatatcgcattaggaacccgttccgaggctctccaaaatgcttccgcagtgtaagtcctgaacgaatgagccgccggagtgttagaagcagcgaccggaagaaagctctcgaagatgtggtccagcgctctggacacggcaccgagttcaataaacagaagcatttggaagcagccgacaaaggccactccccagcccagaaacccaagacatctagtggtaccaagccctctgtcaagccaaccagcgctacaaagagtgacagtaacctcggcggacactcaattaggtgtaaaagcaaaaacctcgaggacgatacactatcagaatgtaagcaggtatctgataaggcagtgtctctccagcgaaaattaaggaaggaacagtccctgcactatggatctgtgttgctaattaccgagctgcccgaagatggatgtaccgaagaagacgtgcgcaagctttttcagcctttcggcaaagtgaacgatgttctcattgtaccttaccggaaagaagcatatctggaaatggagtttaaggaggcaatcacagccattatgaaatacatcgaaacaactccactgactataaaggggaagagtgtaaagatatgtgtgcctggaaaaaaaaaagcccagaacaaagaggttaaaaagaagaccctcgagtcaaagaaggtgagcgcatccaccctgaagcgggatgctgatgcgtccaaagctgttgagatcgtaacatccacatccgcaggtctgttgccaacaggcggagggaacaattacccgcagatcgtgctcgccccaggcttgtgtcactag

SEQ ID NO: 141545 - DNA, 2643 bp, synthetic construct
  misc_feature 1..2643: note = Description of Artificial Sequence: Synthetic coding sequence
  source 1..2643: mol_type = other DNA
atgcctcgggatggagtacctgctggcaacactacacctgccgctgcacaggcagcggcacagtcaccggactctgcaactgcaggggcacctcaggtcctcgactctctgaagagataccctgattggaaccctgagatactcccatcgcgtaggaatgaggggaaccgcaaggagaacgaaacaccgaggcgaaggtcccatagcccctccccaaggcggagcaggagaagttcttcttcccacagatttcgtaggtctagaagtcccatgcattatatgtaccgcccccgatcgaggtcgccgcgcatctgtcatagattcatcagcaggtaccgctcccgctcccggagccgctccccttatcggataagaaatccatttagaggtagtcctaagtgctttcgctccgtaagccctgagcggatgagtcgtcggtccgtgagatcttctgaccggaagaaggcgctggaggatgtcgtgcagcggagcggtcacggcaccgagttcaacaaacagaagcacctggaggctgccgataaagggcatagtccagctcagaagcccaagaccagcagcggaacaaaaccaagcgtaaagcccacctctgcaaccaagtcagactccaaccttggtggacactctataaggtgcaaaagcaaaaatcttgaagacgacacgctctccgagtgtaaacaggtgagcgataaagcagtctccttgcaaagaaagttacgcaaagagcaatcactgcactatggatccgttctgctgataacagagctgccggaggatgggtgtaccgaagaggacgttcgcaagctgtttcagccattcggaaaggtcaacgatgtcctgatagtaccataccggaaggaggcataccttgaaatggagttcaaggaagccattactgcaattatgaagtacattgaaaccacaccgttgacaatcaaagggaagtctgtaaagatatgtgttcccggtaagaagaaagcccaaaacaaagaagttaaaaaaaagaccctggaaagcaagaaggtctcagcctctaccctgaaacgggatgctgatgcttctaaggccgtggagatcgtaacatctacatcagcagccaaaacgggccaggctaaggcctcagtggcaaaggtgaacaagtcgacagggaagtcagcaagttccgtcaagtctgttgtgaccgtggccgtgaaggggaacaaggctagcattaagactgcgaaatccgggggaaagaaaagtctggaggccaagaagacagggaatgtgaagaacaaagacagcaataagccagtgacgattcctgagaactctgagatcaagacaagcatcgaagttaaggccactgagaactgcgctaaggaagctatctcagacgcagctctggaggccacggagaacgagccactcaataaagagacggaggagatgtgcgtaatgttggtttccaatctgccaaacaagggctattctgtagaagaggtttacgacctggctaagcctttcggcgggcttaaggatatcctgattctgagttcccataaaaaagcttacattgagatcaatcgcaaggcagccgagtccatggttaaattttacacatgcttccctgtcctgatggacggtaatcagctcagtattagcatggcaccagagaatatgaacattaaagatgaggaggcaatcttcatcaccctcgtgaaggaaaatgacccggaagctaatatcgacaccatatatgatcgattcgtgcatctggataatctgcctgaggatggtttgcagtgcgtgctttgtgtgggcctgcagtttggcaaagtggaccaccacgtttttatcagcaataggaacaaggctattctgcagctcgactctccagaatctgcccaatccatgtacagtttcctcaaacagaatccacagaatatcggcgaccacatgttgacatgtagtctctcccccaagattgacctgcccgaggtccagatcgagcacgatcctgagctggagaaggaatccccaggcctgaagaattcccctattgatgagagcgaagtacagacagctaccgactctcccagcgtgaagcctaacgaattagaagaagagagtacccctagcattcagaccgaaactctagtgcagcaggaagagccgtgcgaagaagaagcggagaaagctacttgtgattcagactttgccgtggaaaccctggaattagaaactcagggcgaggaggtcaaggaggaaatacctctggtcgcctctgcgagcgtgagtatagagcagtttacagagaacgccgaggagtgtgctctgaaccaacaaatgtttaactccgacttggagaaaaagggggctgagatcattaaccctaagactgccttgctgccctccgattcagtattcgcagaggaaagaaatctgaaaggtatcctcgaagagtctccctcggaagctgaagattttatcagcggtataacacagactatggtggaggctgtggcagaagttgaaaaaaacgaaacagtttcagagattctccccagcacctgcatcgttacactggtgccaggaatcccaaccggcgatgaaaaaacagtcgataagaaaaatatcagctag

SEQ ID NO: 141546 - DNA, 2757 bp, synthetic construct
  misc_feature 1..2757: note = Description of Artificial Sequence: Synthetic coding sequence
  source 1..2757: mol_type = other DNA
atggacagccccccacttaaagccctcaactcaaactccatttacttccttctgttgtttcattgtatgctcatcagcgaagtgcagattgagcatgatcctgagctcgagaaagaatctccaggactgaaaaacagtcctatagatgaatccgaagtgcagacagctaccgacagcccatctgtgaaacccaatgaactagaagaggaaagcacaccatcaattcagaccgagacgcttgtccagcaggaagaaccttgtgaagaggaggcagaaaaagctacatgtgattctgattttgcggttgagacactagagttggagacccagggggaagaagtcaaggaagaaattcctctggttgcgagcgcatccgtgagcatcgagcagttcacagagaacgccgaagaatgcgcacttaaccagcagatgtttaactccgatctcgaaaagaaaggcgccgagatcataaacccgaaaaccgccctcttacctagtgacagcgtgtttgcggaggaacgcaacttgaagggcatcctggaggaaagccctagcgaggccgaggactttataagtggtattactcagacgatggttgaggcggtggctgaggtcgagaagaatgaaactgtttctgaaatcttgccaagtacatgtatcgtgacattagtcccagggattccgactggagatgagaaaacagtggacaagaaaaatataagcgagaagaaaggaaacatggatgagaaagaagagaaggaattcaacactaaagagaccaggatggatcttcagatcgggacagaaaaggccgagaagaatgaaggccgaatggacgcggagaaggtggaaaaaatggcagccatgaaagaaaaacccgccgagaatactttgttcaaagcctaccctaataaaggggtgggccaggcaaataagcctgacgagacctcaaaaaccagtatcctagcggtgtcagacgtgtcctcatcaaaaccgtccattaaggctgttatagtgagctcccctaaagccaaggccacagtgagtaagacagaaaatcagaaatcattcccaaagtccgtgccccgcgatcagatcaatgcagaaaaaaagctctctgcgaaggaatttggactcttaaagcctacctccgccaggtctggattagctgaaagcagctccaaattcaaaccgacacaatcctctcttactcgtggtggctcaggaagaatctctgcccttcaaggaaaattgagcaaacttgactaccgcgacattactaagcagagccaggagaccgaggcccgcccctccattatgaagcgggatgattctaataacaagaccctggccgagcaaaacacaaagaatcccaagtcaaccaccgggagatcttcgaaatcgaaagaggagccccttttccctttcaacctggatgagttcgtcacagtcgacgaggttatcgaagaagtcaatcctagtcaagccaaacaaaaccccctgaaaggtaagcgaaaggagactctaaagaacgtcccattctcagagctgaatctgaagaagaagaagggaaagactagtactccacgaggtgtggagggcgaattgtcgtttgtgaccttggacgagattggcgaggaagaggatgccgctgcgcatctggcccaagcactggtgacggtggacgaggtgatcgacgaggaggaacttaatatggaggagatggtgaagaatagcaacagcttgttcactctggatgagctcattgatcaggatgactgcatctcacactctgagccgaaagatgttactgtgctgtcggtagctgaagagcaggaccttctgaagcaggaacgtctcgtgacggtcgacgaaattggcgaggttgaagaactgcccctcaatgagtcagcagacatcacgttcgcgacactgaatacaaaaggaaacgaaggcgataccgtacgtgattctattggcttcatctctagtcaggtccccgaagaccccagtacactcgtgaccgttgatgaaatccaggacgactcttctgacctacatttggtgactctggacgaagttacagaagaggacgaggactctttggcagactttaacaatctgaaagaggaactgaatttcgtcacagttgatgaagtgggagaggaagaagacggggacaacgatctgaaggttgagcttgcacagagcaagaatgatcacccaacggataagaaaggcaaccgaaaaaaacgggcagtggataccaaaaagacgaagctcgagagcctgtcacaggtggggcctgtcaatgaaaatgtgatggaggaggatcttaaaactatgattgaacggcatctgaccgctaagaccccaacgaaacgcgtgcgaatcggcaagacacttccatctgaaaaggcggttgtgactgaacctgcaaagggggaagaggcattccaaatgagcgaggttgatgaggaatccggactaaaggactccgagccagagcgcaagcgcaaaaaaactgaggattcatcatcgggcaagtccgtggcttctgacgtgcccgaggagctggacttcttagtacccaaagccggttttttctgtcctatttgctccttattctactctggcgagaaggctatgaccaatcactgtaagtcaaccagacacaagcagaacacagaaaaattcatggctaagcagaggaaggagaaggaacaaaacgaggctgaggagaggtcctcccggtag

SEQ ID NO: 141547 - DNA, 5937 bp, synthetic construct
  misc_feature 1..5937: note = Description of Artificial Sequence: Synthetic coding sequence
  source 1..5937: mol_type = other DNA
atgtcgaggccccgattcaacccccgcggggatttcccattacagaggccacgtgcgcctaatccctcgggcatgaggccgcccggcccgttcatgcgaccagggtccatgggcctgccaagattctaccccgctggacgcgcccgcggaattccccaccggtttgctggacacgaaagctaccaaaacatgggtccccagcgcatgaatgttcaggtaactcagcaccggactgatccaagattaaccaaagaaaagctggattttcacgaggcacagcagaagaagggcaaaccacatggatctcggtgggacgacgagccgcacatctcagcctccgtagccgttaaacagtcaagtgtgacacaggtgaccgaacagtcccccaaggtgcagtctaggtacaccaaggagtcagcttcctcgatactcgcgtcgtttgggctttccaatgaagatttagaagaattgtctcgctaccccgatgagcaactgacccctgaaaacatgccactgatccttagagacattcggatgcggaagatggggcggcgcctccccaacctgccttcacagtccagaaacaaagagaccttgggttcagaagctgttagctcgaacgtcatagactatgggcacgccagcaaatacggatacaccgaggatccgctggaagtgaggatctacgaccccgaaattccgacagacgaggttgagaatgaatttcagtcacagcagaacattagtgcaagcgtcccaaaccctaacgtgatttgcaactccatgtttccagtagaggacgtgttccgccaaatggattttcccggcgagtcatctaataacagatccttcttcagtgtggagtctgggacaaaaatgtctggtttacacatttcaggcggccaatctgtgctagaacccattaaatcagtcaaccagtctatcaaccagactgtaagccagaccatgagtcagtctctgatcccaccaagtatgaaccagcagccgttcagcagtgagctgatttcctccgtgagccaacaggagagaattccacacgaacccgtcattaattcttcaaacgtgcatgtcggatcccggggttccaaaaaaaattaccagagtcaggccgacattcctatcaggtcccccttcggaatcgtcaaagccagctggctgccaaaatttagccatgcagatgcccagaagatgaaaagactacctacaccctctatgatgaatgactattacgccgccagccccagaatctttccccatctgtgcagcctgtgcaatgtggagtgcagccatcttaaagattggatacagcaccaaaacacttctactcacattgaaagttgcagacagttgcggcagcagtaccctgactggaaccctgagattctgccttccaggaggaacgaaggaaataggaaagagaacgaaaccccacggagacgaagccattctccttctccgagaaggtctcgacggtcctctagcagccaccgtttccgccgctccaggagcccaatgcattatatgtaccgacctcgaagccgctcccctcggatctgtcatcgctttatttcaagataccgctcacggtcgcgctccaggagcccctatagaattaggaaccccttccgaggaagtcccaaatgttttcgtagtgtaagcccagaacgcatgagccgtagaagtgtccgctctagcgataggaaaaaagccctcgaggatgtggtgcagcgctcggggcacggcactgagtttaacaagcaaaagcacctcgaggccgctgacaagggccactccccagcccagaagcctaagaccagctcaggaactaagccttcagtcaaacctacaagcgcaacaaaaagtgactctaacctggggggacatagcattcggtgcaagtcgaaaaacttggaagatgacactctcagcgagtgcaagcaggtcagtgataaagcagtatcccttcagcgaaaactgcgcaaggagcagagtttgcactatggctctgtacttcttattacggagctccccgaagacggttgtactgaggaggatgtgcggaaacttttccagcctttcggcaaagtgaatgatgtcctgatcgttccttaccggaaagaggcatatctggaaatggagtttaaggaggccatcactgctattatgaaatacatcgagaccacccctttgaccataaagggtaagtctgtaaagatctgcgtgccagggaaaaaaaaggctcagaacaaagaggtaaaaaagaagactttggagtctaagaaggtgtctgcctcaactcttaagcgggatgcagatgcgtcgaaagccgtagaaattgtgacatccaccagcgccgccaagaccggacaagccaaagcaagcgttgccaaagtgaataaatcgactggaaagtccgcctcctctgtgaagagcgtggtgacggtggcggtgaagggaaacaaagcctctattaagaccgccaaatccgggggtaagaaatctctggaagcgaaaaaaacagggaacgttaaaaacaaggattcaaacaagccagtcacaatcccagaaaatagtgaaatcaaaacctctatcgaggtcaaagcaaccgaaaattgcgcaaaagaagcaatttcggatgcagcgctggaagctacagagaatgagccactgaacaaggaaactgaggaaatgtgtgtcatgctcgtgagtaacctgcccaacaaaggttacagcgttgaagaggtttatgatcttgccaaaccttttggcggcttgaaagatattcttattctcagcagccacaagaaagcatacatcgaaattaatcgcaaagcggcggagtcaatggtgaagttttatacatgtttccctgtccttatggatggaaatcaactctctatcagcatggctcctgagaacatgaatattaaggacgaggaggccatcttcataaccctggtgaaggagaacgatcccgaagctaacatcgataccatctacgaccggttcgtacatctcgataatctgccagaggacggactccaatgtgttctctgcgtcggacttcaatttgggaaggtggaccaccacgtctttatttcaaatagaaacaaggcgatcctgcagctcgattcacctgagagtgcccaatccatgtacagttttctgaaacagaacccacaaaatatcggggaccatatgctgacatgctccttgtctcccaaaattgatctgccagaagtgcagattgagcacgaccccgaactggagaaggaatcccccggactcaagaatagtcctatcgacgagagtgaggtgcagacagctactgatagcccctcagtgaagcccaacgaacttgaggaggagtccactccctcaatccagaccgaaaccctagtgcaacaggaggagccttgtgaagaggaagcagagaaggcgacctgcgattccgattttgcagtggaaacgttggagctggaaacccaaggcgaagaggtcaaagaggagattcccctcgtagcgtctgctagcgtttctattgagcaatttacggagaacgcagaagaatgcgctttgaatcaacagatgttcaatagtgaccttgagaaaaaaggcgcggaaattatcaatccaaaaacagcactgttgcctagcgactccgtctttgcagaggagagaaacctgaagggcatcctcgaagagagcccctctgaagccgaggatttcattagcggaatcacccagacaatggtggaggcggtggccgaggtggagaagaacgagacagtttccgagatcctgccttccacttgtatcgtaacgctggtgcctggaattcccacaggcgacgaaaagacggtagacaagaagaacatctctgagaaaaaaggaaatatggacgagaaggaagaaaaggaattcaatactaaggagactcgtatggaccttcagattggtactgagaaggccgagaaaaacgaggggcgcatggatgcggagaaggtggagaagatggcagccatgaaagagaagcctgccgaaaacacactgtttaaggcttaccctaataaaggcgtcggtcaggcaaataaacctgacgagacatcaaaaacgagcatcctcgccgttagcgacgtctcaagcagcaagcctagcatcaaagcagtgatagtgtcaagcccaaaggctaaggcaaccgtctcaaagacagagaatcagaagtcattccccaagtctgtgcccagagatcagattaatgctgagaagaaacttagtgcaaaagaattcgggctcctcaaaccgacctccgctcgatcaggcttggcagaatctagttccaaatttaagccaacgcaatccagcctcacgcgtggtggatctggccggatttccgcccttcagggtaaactgagcaagttggactaccgggatatcacaaagcagagtcaggaaactgaggccagaccgagtatcatgaagcgggacgattccaacaataagaccctagccgaacagaatacaaagaatccgaagagtactaccggcagaagtagcaagtccaaggaggagcctctctttcccttcaacctcgatgagttcgtgaccgtggatgaggtcatagaggaggtgaacccttctcaagcaaaacaaaatccactcaaggggaaaagaaaagagactttaaagaatgttcccttttcagaactcaacctgaagaaaaaaaaggggaagacaagtacgccgcgaggggtggagggcgaactaagctttgttacccttgacgagatcggcgaagaagaagacgctgccgctcatctggcccaggctcttgtgactgtggacgaggtgatcgatgaagaagagttgaatatggaggagatggtgaagaacagcaattccctgtttacactagacgagctcatagatcaggacgattgcatcagccatagcgagccgaaggacgtgacagtactctcagtcgcagaggagcaagacctcctgaaacaagagagactcgtgacagttgatgagattggcgaggtagaagaattgccgctgaacgagagtgcagacatcacttttgcaaccctaaatacaaagggcaatgagggcgacaccgtacgtgactccattggattcatctcgtctcaggtgcccgaagacccctctacgttagtgaccgtcgacgaaatacaggacgactcctccgacctgcatctggttacgctggatgaagtcaccgaggaagatgaagacagcctcgctgatttcaataacttgaaagaagagttgaactttgttacagtcgatgaggtgggcgaggaggaggacggcgacaatgacctgaaggtggagctggctcagagtaaaaatgaccaccccactgataagaagggaaatcgcaaaaagcgggctgtcgacaccaagaagaccaaattggaatctctgtcccaagtaggaccagtgaacgagaatgttatggaggaggacttgaagaccatgatcgaacgacatctcactgctaagacaccgacgaaaagggtgcgaatcgggaaaactctgccctccgaaaaggccgttgtcactgagccagcgaaaggggaggaggccttccaaatgtccgaagtggacgaagagtcagggctgaaagatagcgaaccagagcgtaaaagaaaaaagaccgaggactcaagcagcggtaagagcgtggcctctgacgtccctgaggagctggactttctcgttcctaaagccggatttttttgcccgatctgctccctgttctactcaggcgagaaggctatgacgaatcattgtaaatcaaccagacacaagcagaataccgaaaaattcatggcaaaacagcggaaggaaaaagaacagaatgaggctgaggagcgcagcagcagatag

SEQ ID NO: 141548 - DNA, 90 bp, synthetic construct
  misc_feature 1..90: note = Description of Artificial Sequence: Synthetic coding sequence
  source 1..90: mol_type = other DNA
atgtctaggcctaggtttaaccccaggggggactttcctctgcaaaggccacgggccccaaacccttccggaatgaggccacccggttag

SEQ ID NO: 141549 - DNA, 594 bp, synthetic construct
  misc_feature 1..594: note = Description of Artificial Sequence: Synthetic coding sequence
  source 1..594: mol_type = other DNA
atgagcagacctagatttaacccccgcggcgatttccctttgcagcggcccagggctccgaacccgtccggtatgcgtccccccggacctttcatgcgacctggaagcatggggctgcctcgattctaccctgctggtagagctcgaggaataccccacagatttgcaggccatgagtcctaccaaaatatgggtccacagcgaatgaatgtccaggtcacccagcaccgaactgatcccaggctgacgaaggaaaagcttgatttccatgaggcccagcagaagaaggggaaaccccacggcagccgctgggatgacgaaccccacatctcagcttctgtggcagtgaaacagtccagtgtaacccaggtcacggagcagagtccaaaagtgcagagtcgctacactaaggaaagcgcttcatccatcttagcatctttcggtctcagtaatgaggacttggaagaactgagcaggtatcctgacgaacagctgaccccggagaatatgcccctgatactgcgggatatcagaatgcgaaaaatggggcggaggctgcctaacctgccatcccagtctagaaacaaggaatag

SEQ ID NO: 141550 - DNA, 111 bp, synthetic construct
  misc_feature 1..111: note = Description of Artificial Sequence: Synthetic coding sequence
  source 1..111: mol_type = other DNA
atgagcaggccaaggtttaatccccgtggagattttccattacaacgccccagggcccctaacccctctgggatgagacccccaggcccatttatgcgccccggaagctag

SEQ ID NO: 141551 - DNA, 189 bp, synthetic construct
  misc_feature 1..189: note = Description of Artificial Sequence: Synthetic coding sequence
  source 1..189: mol_type = other DNA
atgagcagaccccggtttaacccacgcggtgatttccctctgcagagacctagagctcccaatccatctgggatgaggccacccggcccgttcatgaggccaggctctatggggctccctcgattttacccagccggcagagctcgtggcatcccacaccgattcgcgggacatgaatcgtaccagtag

SEQ ID NO: 141552 - DNA, 189 bp, synthetic construct
  misc_feature 1..189: note = Description of Artificial Sequence: Synthetic coding sequence
  source 1..189: mol_type = other DNA
atgtcgcggcccaggtttaatcctcggggcgactttccgctgcagaggccaagagctcctaacccttccggcatgagaccccctggtccttttatgagacctggctccatggggctgccacgcttctatccggccggcagggcccgggggataccgcatcgtttcgctggccatgagagctatcagtag

SEQ ID NO: 141553 - DNA, 1758 bp, synthetic construct
  misc_feature 1..1758: note = Description of Artificial Sequence: Synthetic coding sequence
  source 1..1758: mol_type = other DNA
atggacagccctccgcttaaggccttgaacagcaattctatctacttcctgctcctgtttcactgcatgctgattagcgaggtgcagattgaacatgatccggagctcgagaaagagtccccagggctgaagaattcacccattgatgagagcgaggtgcagacagctacagactctcccagcgtcaaacccaatgagctcgaggaggaatctacaccctccatccagacggagacactcgtacagcaggaagagccttgtgaagaagaggctgaaaaggccacttgcgattccgattttgctgtcgagaccctcgagctggaaacacagggggaggaggtgaaggaggaaatccctctagtggcaagcgcaagcgtctctattgaacagttcactgagaatgctgaggagtgcgccttgaatcagcagatgttcaactccgaccttgaaaaaaagggagctgagataattaatcctaaaaccgcactgctgccatccgattcggtcttcgccgaggagcgcaacctgaaaggaatcttagaggagtccccttctgaggcggaagatttcataagcggcattacacagactatggtagaggcggttgctgaggttgagaagaacgagactgtgtcagagattttgcctagcacctgcattgttacattagtacccggtatccctacaggcgacgaaaaaactgtggataagaagaatataagtgaaaagaaaggaaacatggacgaaaaagaggaaaaggaattcaacacaaaggagaccagaatggacctgcaaatcgggaccgaaaaggcagaaaagaatgagggccgtatggatgctgaaaaggtggaaaaaatggctgccatgaaagagaaaccagccgagaacacactattcaaagcctacccgaacaaaggggtcgggcaggctaataagccagatgagactagtaagacgtcgatcctggccgtgtccgatgtgtcaagctccaagcctagcatcaaagctgtcatcgtgtctagccccaaagctaaggctactgtttctaaaacagaaaaccagaagtcctttcctaagagtgtccctcgagatcaaattaatgccgagaaaaaactgtccgcgaaggaatttggcctgcttaagccaacatcagctcggagtggtcttgcagagtcctcgtcaaaatttaaaccaacccaaagcagtctgacgcgtggggggagtggacgcatttccgctttgcaaggtaagctcagcaaactggattatcgcgacatcaccaagcagagtcaggagaccgaagccaggcccagtatcatgaagcgcgatgacagtaataacaaaaccctagcagaacagaacacaaaaaatccaaaaagcacaactgggcgctcttctaagtctaaggaagagccgctttttccttttaacctggacgaatttgttacagtcgatgaggtgatcgaggaagtaaatccctcccaggctaagcagaaccctctcaagggcaagagaaaagagactctgaaaaatgtgccatttagcgagttgaacttgaaaaaaaagaaggggaagacaagtacccccaggggggttgaaggggagctgtccttcgtcacacttgatgagatcggggaggaggaagacgccgcagctcatctggcccaagcccttgttaccgtcgacgaggtcatcgacgaagaggagctgaatatggaagagatggtaaagtttaaatttaccttttatataaggtag

SEQ ID NO: 141554 - DNA, 3075 bp, synthetic construct
  misc_feature 1..3075: note = Description of Artificial Sequence: Synthetic coding sequence
  source 1..3075: mol_type = other DNA
atgcctcgggacggcgtaccagcaggcaacactactccggccgctgcacaagctgccgcacagtcacccgacagtgcgaccgccggagccccccaggtattggactcactgaagcggtttgtgctgttccttgagaactttgcccccctggtcaattctctgaatttaggcatcgctaacccactcctgctgggcccgagtccgctgcactttgcacaaatcaagacacagttggccctgcaacagctgaacgccgtagcctcgcatggctccactcccccatacactcttcttaaccaagccttcttgaaaattgccatgtccaggcctcgttttaacccccgtggagacttcccgttgcagcggccgagagctcctaacccgtccggcatgcggcctcccggacctttcatgaggcccgggtcgatgggacttcctaggttttaccccgccggaagagcaagagggatcccacaccggttcgccgggcacgaatcctatcagaacatgggcccgcagaggatgaacgttcaggtgacgcagcacaggacagacccaaggttgacaaaagaaaagctggactttcacgaagcccaacaaaagaaaggcaaaccccatggcagccgctgggacgatgagccacacattagtgccagtgtggccgtgaagcaatcgtctgtaactcaggtcaccgagcagtcgccaaaggtgcaatcccggtatacaaaggagtcggccagcagcattctggcctctttcggcctatcaaacgaggatcttgaagagttaagccgttatcccgacgagcagcttacaccggagaacatgccactaattcttagagatattaggatgagaaagatgggccgaagactccctaatctccctagccaatctaggaataaagaaactctggggtcagaggctgtgagttcaaacgtgattgactatggacatgcgagtaaatatggctatactgaagatcccctggaagtaagaatatatgacccagagattcctaccgacgaggtcgagaacgagtttcaaagccagcagaacatatcagcatctgttcccaaccctaatgttatctgcaactctatgtttcctgtggaagacgtgtttcgccaaatggattttcccggggaaagcagtaataaccgcagtttcttttccgtggagtccggcactaagatgtcggggttgcatatttcgggaggtcagtcagtgctggagcccattaagtccgtgaatcagagcataaaccagactgtgagtcagactatgagccaaagcctgataccaccttccatgaatcagcaaccattcagtagcgagctgatctcaagtgtcagccaacaggagagaatcccacacgagcctgtgataaattctagcaacgtgcacgttgggtcacgcggttccaaaaaaaattaccagtctcaagctgacatacccattcggtctccttttggcatcgtgaaagcctcttggctgcccaagttttcacacgcagacgcacagaaaatgaagcgcctgcccacacccagcatgatgaacgattattacgccgccagccctagaatttttccacacctgtgctcgctgtgcaacgtggagtgttcccacttgaaggactggatacagcaccagaacaccagcacacatattgaatcctgccgacagttgcgtcagcagtacccggattggaatcctgaaattcttccgtccaggcggaatgagggaaatcgtaaggagaatgagacaccccggcggcgctcccactccccgagcccccgtcgctctagacgtagctcaagcagtcatcgttttcgcagatccagaagccctatgcattacatgtatagaccgcgctctcggagtcctaggatctgccatcgtttcatcagccggtacaggtctcggtcgcggtcgcgcagcccttaccgaatccgcaaccctttcagagggagccccaagtgcttccgctctgtttctcccgagcggatgtctaggcggagtgtccgctcaagtgaccgaaagaaggccctagaagacgtcgtccagaggagcggccacgggacagaatttaacaagcagaaacacctagaagcagccgataaaggccactctcctgctcagaagccaaagacaagttcaggcaccaagccttcagtcaagcccacctctgccacaaaatccgactccaatctgggcggccactccattcggtgcaagtctaagaacttagaagatgataccctttctgagtgtaaacaggtttctgacaaggctgtctcccttcagcgcaagttgcgcaaagagcagtcacttcactatggaagcgtcttgctgatcacggagctgcctgaagacggttgcacagaggaggacgtccgaaaactcttccaaccattcggtaaggtcaatgacgtgctgatcgtcccatatcggaaggaggcatatctggagatggagtttaaggaagccattacagcaatcatgaagtatatagagacaacgccactaaccattaagggcaaaagcgtgaaaatatgtgtccctggaaaaaaaaaagcccagaacaaagaggttaagaagaagactctcgagtcaaagaaagtcagtgcaagcaccctgaagcgagatgcagacgcatcaaaggctgtggagatcgtgacctccacatctgcagaaagtgtggaccagacccagcagcttgtaccgctggttcgtaatactgctcgcgaccatgacgggactcctgagaacgagggggaggagacggtacagtctgccctgttcggttttcagtatgacgcaagcgaccataccatggcttggcttggcccgaacacagtcccagaagtcaaagaaatgattctgcaggatccgcagctccagactacacagctgcctcagactacacaggctcccgacataacatggggcatgctgaagaagactacatataaggcagagcagatccttctgcagacacagaaacccttcacacccgacaatctgttcctagcgctgcttagcggggatgcaaagcctgagtatgagcagtag

SEQ ID NO: 141555 - DNA, 1317 bp, synthetic construct
  misc_feature 1..1317: note = Description of Artificial Sequence: Synthetic coding sequence
  source 1..1317: mol_type = other DNA
atgcaagctgaagacaggagccagtttggaagtgctgccgagatgctgagcgaacagacagcagcattgggtactggctgggagagcatgaacgtgcagctcgatggagccgagccacaggtggaaaggggttctcaggaagaacgcccatggagaacagttccaggccccctggaacacctctgctgcgacttagaggaggaaccgcagtctctacaagaaaaggctcagagtgctccgtgggtgcctgccattccccaggaaggcaataccggtgactgggagatggccgccgccttgctggccgcaggctcgcagggtttggtcaccataaaagacgtatctttgtgcttttctcaggaggagtggcgcagcctggacccttcacaaaccgacttctacggcgaatacgtaatgcaggaaaactgcggcattgtcgtcagcctgagattccctatccctaagctcgacatgctatctcagctggagggcggggaagaacaatgggtgcccgacccccaagaccttgaggagcgtgatatcttaagagtgacttacacgggtgatgggagcgagcacgagggcgacacccccgaactggaggcagagccacctcgaatgctcagctcagttagcgaagatacagtcttgtggaatcccgagcatgacgaatcatgggactccatgccatcttctagccgcggcatgctgttgggccctccttttcttcaggaagactccttctccaatctcctctgtagtactgaaatggattccttattgcgcccgcacacctgtccccagtgtggaaagcagttcgtatggggctctcacctcgctaggcaccaacagacccacacaggcgagcggccctactcctgcctgaaatgtgagaaaacattcgggagacgacatcatctaatcagacaccagaagacccacctgcatgacaaaacgtccagatgctcagaatgtggcaagaacttccgctgtaactctcatctagcgtctcatcagcgcgtccatgccgagggcaagagctgcaagggacaggaagttggagaatcacctggcacccgaaaaagacaacgagctccgcctgtgcccaaatgtcatgtgtgtacagaatgtggtaagtctttcgggcgtaggcaccatctagtgcggcactggttgacacatactggggagaaaccgttccagtgccctcgatgcgagaaaagcttcggcagaaagcaccaccttgacaggcacctattgacgcaccagggacaatcacctcggaacagctgggacaggggaacttcagtgttttag

SEQ ID NO: 141556 - DNA, 1248 bp, synthetic construct
  misc_feature 1..1248: note = Description of Artificial Sequence: Synthetic coding sequence
  source 1..1248: mol_type = other DNA
atgctgagtgagcagacagccgctctcggaaccggctgggagagcatgaacgtccagctcgatggagccgagccgcaggtggagcgtggctctcaggaagagcgcccctggagaacggtccctggcccattggaacatctgtgctgcgacctcgaggaagaaccccagtccttgcaggagaaggcgcaaagtgctccttgggtgcctgccatcccacaggaagggaacacgggcgattgggagatggcggcagccctcctcgccgcaggttctcaggtgtcctcggcttcactgggcgtgtcatgtggacccattacagctgcctttgtcctgctgagccaccagcccattgacgagctcgcccatatgataatcaatggcttcccaatccctaagctcgatatgctaagtcaattggaaggaggcgaagagcaatgggtgccagatccacaggacctcgaggagcgggacatcctgcgcgtcacatataccggcgacggcagcgaacacgaaggtgatacaccagaactagaggccgaaccaccaaggatgctgtcctctgtgagcgaggataccgttctgtggaatcctgaacacgatgagtcctgggatagtatgcccagttcatctcgaggaatgctgctgggcccaccatttctgcaggaagacagcttctcgaatttgctgtgcagcacagaaatggactccctcctccgtcctcacacatgcccccaatgcggcaagcagttcgtctggggttcacatctggcgcggcatcagcaaacccatactggcgagagaccttattcctgtttgaaatgcgaaaaaaccttcgggagacgacaccacctgatcagacatcaaaaaacgcatctacacgacaagaccagccgctgcagcgaatgcggtaaaaattttcggtgcaatagtcaccttgccagccaccagagagtgcatgctgaaggcaaaagttgcaaaggccaagaggtcggtgaatcacctggtaccagaaaacgacagcgagctccaccggttccaaagtgtcacgtttgcacagaatgtggcaagtccttcggtcggcggcatcatctggtgaggcactggctgactcacaccggggagaagcctttccagtgcccacggtgtgaaaaaagcttcggcagaaagcatcatttagaccgccacctgcttactcaccaaggccagtcaccccgcaatagctgggaccggggaacgtcagtgttctag

SEQ ID NO: 141557 - DNA, 1317 bp, synthetic construct
  misc_feature 1..1317: note = Description of Artificial Sequence: Synthetic coding sequence
  source 1..1317: mol_type = other DNA
atgcaggctgaggaccgatcccaatttggaagcgcagccgaaatgctctcagaacagaccgccgctctaggcaccggatgggagagtatgaatgtgcagctcgatggcgccgagcctcaggtggagcggggatcacaggaggagagaccatggagaactgtccctggccccctcgagcacctatgttgtgacctggaagaagagccccagagcctccaggaaaaggcccagagtgctccatgggttccagcaattccccaggagggaaatactggcgactgggagatggctgctgccctccttgctgccggcagccagggcctggtgaccattaaggatgtgagcctctgttttagccaggaggaatggaggtcactggacccgtcacagaccgatttttatggggagtacgtgatgcaggagaactgcggaattgtcgtgtcgctgcgctttcccattcctaagctggatatgctgtcacagctggaaggtggcgaggagcaatgggtaccagatccacaggacctggaggaacgggatatcctgagggtgacatacacaggtgatggctcggagcatgagggagatacccctgagctggaagcggaaccaccgcggatgctatctagcgtgtcagaggacactgtgctgtggaaccctgaacacgacgaatcctgggatagcatgcccagcagtagtcggggcatgctactgggacccccctttttgcaggaagactctttcagtaatttactgtgctccacggaaatggattcactgcttcgaccacacacctgccctcagtgcgggaagcagttcgtgtggggctcgcatctcgcgagacaccagcaaacccacacgggagaacgtccgtacagctgtctcaaatgcgagaaaacttttggtcggaggcatcatttgatccggcatcaaaaaacacacctgcacgataagacatcccgatgcagcgaatgtgggaaaaatttccggtgtaactcccatcttgcctcccatcagagggtccacgccgagggtaaatcctgtaaagggcaggaagttggggagtcccctggcacccgaaagaggcagcgcgctccaccagtgccgaaatgccatgtctgcactgaatgcggcaaaagttttggacgccgtcaccaccttgtgcggcattggttgacccacaccggggaaaaaccattccaatgtccccggtgcgagaaatctttcggtcgcaagcaccatcttgaccggcacctgttgacacaccagggccagtcgcctcgaaacagctgggaccgaggaacctccgtgttttag

SEQ ID NO: 141558 - DNA, 1275 bp, synthetic construct
  misc_feature 1..1275: note = Description of Artificial Sequence: Synthetic coding sequence
  source 1..1275: mol_type = other DNA
atgctcagtgaacaaacagctgcactgggaaccggatgggaaagcatgaatgtgcagctcgacggagccgaaccacaggttgaaaggggtagccaggaagagagaccttggaggactgtgccaggccccctggaacacctctgttgcgacctcgaggaagaacctcagagtctccaagagaaagcccagagtgccccgtgggtaccagccatccctcaagaaggcaacactggggactgggaaatggcagccgccctgctggccgccgggtcgcaaggactcgtgactatcaaagacgtttccttgtgtttttcacaggaagaatggagaagtctcgacccctcacagacagacttttacggagaatacgtgatgcaggagaactgtggcatagtagtcagcctgcggttccccatcccaaaactggacatgctttcccagctcgaaggaggggaagagcaatgggtgccggaccctcaggacctggaggagagagatattcttcgagtcacctataccggcgatggctccgagcatgagggagatacacctgagttagaagctgagccacctcggatgttgtcctcggtgtccgaagacaccgtgttgtggaaccccgaacatgacgagtcctgggacagcatgcccagttccagcagaggaatgctattggggccccccttcctgcaggaggactcattttcaaatctcttatgctctactgagatggattctttattgcgcccacatacctgcccccaatgcgggaaacagttcgtgtggggcagccacctggccaggcaccagcagacacatactggtgagcgtccttacagttgcctgaagtgcgaaaagacctttggaaggcgacatcatctcattaggcatcaaaaaacgcatctccatgacaagaccagtcgctgttctgaatgcggaaagaattttaggtgtaacagtcaccttgcctctcatcagagagtccacgcagaaggcaagagctgcaaaggccaggaggtcggtgaatctccggggacccgcaaacgccagcgtgcccctcccgtgcctaagtgccatgtatgtaccgaatgtggcaagtcctttggacgacggcatcacctggtccgtcactggctgactcacacaggtgagaagccattccagtgtcctcgatgtgaaaaatcgtttgggaggaagcatcacttggaccgccatcttctgacgcatcagggccaaagcccccgaaattcatgggacaggggaaccagtgttttttag

SEQ ID NO: 141559 - DNA, 411 bp, synthetic construct
  misc_feature 1..411: note = Description of Artificial Sequence: Synthetic coding sequence
  source 1..411: mol_type = other DNA
atgcaggctgaggaccgatcacaattcggttccgccgccgaaatgctgagcgagcaaactgctgcactagggactggctgggagagtatgaacgtccagttagatggggccgagccccaggtggaacgcggcagtcaggaggagaggccgtggcggactgtccccggccccctggaacacctttgctgcgatctggaggaggagcctcaatccctgcaagaaaaggcacagagcgctccatgggtcccagctattccacaagagggcaacactggtgattgggaaatggccgctgccctcctggcagccggttcccagggactggtcacgatcaaagacgtaagtctatgttttagccaagaagaatggagaagtttggatccctcacagactgacttctacggggaatag

SEQ ID NO: 141560 - DNA, 324 bp, synthetic construct
  misc_feature 1..324: note = Description of Artificial Sequence: Synthetic coding sequence
  source 1..324: mol_type = other DNA
atgctatcagaacagaccgcagccttaggcactgggtgggagtctatgaatgtccagctggatggagctgagccacaggtggagcgcggctcacaggaggagagaccatggcgcacggtgcctggaccattggagcatctctgttgcgatctggaggaagagccacagagcctgcaggagaaggcgcagagcgcgccttgggtgcctgccatccctcaggagggaaataccggagactgggaaatggctgctgctctgctcgcggcaggctcccagggactggtgacaattaaagacgtttccttgtgctttagccaggagtag

SEQ ID NO: 141561 - DNA, 234 bp, synthetic construct
  misc_feature 1..234: note = Description of Artificial Sequence: Synthetic coding sequence
  source 1..234: mol_type = other DNA
atgctctctgaacaaacagcggccctaggcaccggttgggaaagtatgaacgtccagttagacggggctgaaccccaggtcgaaaggggatcacaggaagagcggccatggcgtactgttccaggccctcttgagcatttgtgttgtgatctggaggaggagccccagtccctgcaagaaaaggcccaaagtgcaccctgggtccccgccatccctcaagagggtaacacttag

SEQ ID NO: 141562 - DNA, 3984 bp, synthetic construct
  misc_feature 1..3984: note = Description of Artificial Sequence: Synthetic coding sequence
  source 1..3984: mol_type = other DNA
atgagatcttttctgcaacaggacgttaataagactaaatccaggctaaatgttctgaacggcctggccaacaatatggatgatctgaaaatcaataccgacattaccggcgcaaaagaagaactgttggatgacaataacttcatttcagataaggagtctggagtgcataaacccaaggattgccaaacatcgttccagaaaaacaacaccctgacactgcccgaagagctgtccaaagacaagagtgagaacgcactttcaggcggtcagagttccttgttcatccatgcaggcgctcccactgtctctagtgagaacttcatcttgcccaaaggagccgccgttaatgggcccgtctcccatagctcactcactaaaacatctaatatgaacaagggctccgtctctctgacaactggccagcctgtagatcaacccacgacagaatcgtgtagtaccctgaaagtggcagcagatctgcagctttctacgccacagaaggcatcgcagcatcaagtgcttttcctcctgagcgatgttgcccacgcaaagaatccaactcatagtaataagaagcttccaacgagcgctagcgttggctgcgacatacagaattccgtggggagcaatataaaaagcgacggaaccttgatcaatcaggtggaggtaggggaggatggcgaggatctgctggtgaaggacgactgcgtgaacacagtgaccggcattagcagcggaacagacggcttcagaagcgagaacgacaccaactgggacccacagaaggagtttattcaatttctgatgaccaatgaggaaaccgtggacaaggcacctccacactccaagatcggactagagaagaagagaaaacgcaagatggatgtttcaaaaattacacgatacaccgaagactgcttctccgatagtaattgcgtgcctaacaagagcaagatgcaggaggtggattttcttgaacaaaatgaggagctccaagcggtcgatagccaaaaatacgctctctccaaggttaagccagaaagcaccgacgaggatctggaaagtgtggacgctttccagcacctcatctataatcctgataaatgtggtgaggaaagcagtccagttcacacatcaacgtttttgagcaacactttgaagaaaaaatgcgaagagagtgactcagaatcgccggccacgttctcaaccgaagaaccatccttctacccttgcacgaaatgtaacgtgaatttccgggagaagaaacacctacaccggcacatgatgtaccacctcgacggaaatagccacttccgacacctgaacgttccccgcccttatgcatgtagagaatgtggccgaacttttcgcgaccggaactcgttgttgaagcacatgattatccaccaggagcgccgccagaagttaatggaggaaatcagagaactgaaggaattgcaggatgaaggacggagcgcgagactacaatgtccacagtgcgttttcggtacgaactgtcctaagacctttgtccagcacgctaaaacacacgaaaaagataaacgctattattgttgtgaggagtgtaatttcatggctgtgacagaaaatgaactagaatgtcatcgtggaatagctcacggggccgtagtgaagtgtccgatggtcacgtccgacattgcacaaagaaagacacagaaaaagactttcatgaaagacagcgtggtgggcagctccaaaaagtctgccacttacatctgcaaaatgtgcccgttcacaacatcggctaagagcgttctaaagaagcatactgaatacctgcacagctcctcttgcgtagattcctttggatctccattagggctggataaacgcaagaatgacatcctcgaggaacccgttgatagtgatagtaccaagactctgactaagcaacagtccactaccttcccgaagaattctgcccttaaacaagatgtgaaacgtaccttcggcagcacatcccagagttctagcttttctaaaatccataagcgcccccatagaattcagaaggccaggaaaagcatcgcacagtccggagttaatatgtgtaatcagaattccagccctcacaagaatgtgaccataaagtcttcagtcgaccagaaacctaaatattttcaccaggcggccaaggagaagtccaatgcgaaggcaaatagccactacctatatcgccacaaatacgagaattacaggatgattaagaagagtggcgagtcttatcctgtgcacttcaagaaggaagaggcctctagccttaactccctccatctgttttctagctccagcaatagtcacaataacttcatttctgacccacataaacctgatgctaagagaccagaaagtttcaaggaccaccgcagagtggccgtaaaaagagttattaaggagtcgaagaaggagtcttcagttggtggggaggatcttgacagttatcctgactttcttcacaaaatgaccgtcgtggtgcttcagaaattaaatagcgctgagaagaaggatagttacgagactgaagatgagtcctcttgggataatgtggagctcggtgattacactacacaggccatcgaggatgaaacctactcagacatcaaccaggaacatgtgaatctgtttccactctttaaatccaaggttgaaggtcaggaacccggagaaaacgctacgctgagctacgaccaaaatgacggattttacttcgaatattatgaagatacgggttccaataactttcttcacgagattcacgatccccagcaccttgaaacagcggatgcttccctgagtaaacacagtagcgtgtttcactggaccgacctctcactggagaagaagagttgcccttattgcccagccacattcgaaaccggggtcggattgagcaatcacgtcaggggccatttacaccgggcaggcctcagctatgaagcccggcacgtggtgtcccccgaacagatcgcgacctccgataagatgcaacacttcaaacgcactgggaccggcaccccagttaaaagagtgcggaaggcgattgaaaaaagtgagaccactagtgaacacacttgccagttatgcggcggctggttcgacactaagattggactttctaatcatgtcaggggacacttgaagcgtttggggaaaaccaagtgggatgctcacaaatctccaatatgtgtgctgaatgaaatgatgcagaacgaggaaaagtacgaaaagattctgaaagccctcaattccaggcgtataatcccacggccctttgttgctcagaaacttgcctcctcagatgacttcataagccagaacgtaattccactggaggcttatagaaacgggctaaagacagaagccttgagcgtttctgctagcgaggaggagggcctgaactttctcaacgagtacgacgaaaccaagccggagctccctagtggaaagaagaatcagagcttaaccctcatagaactgctgaaaaataagcggatgggcgaggagcggaactcagccattagcccccaaaagatccacaaccagaccgcgcgcaagcgctttgtgcagaaatgtgtgctgcctctaaatgaggactccccacttatgtaccaaccacagaagatggacctcaccatgcatagcgctctggattgtaaacaaaaaaagtcgaggtctcgctctggtagtaaaaagaagatgctgaccctaccccatggcgccgacgaagtatacattctgagatgtcgattttgcggcctggtgtttcgtggtcccctctctgtacaagaggactggattaagcatttacaacggcacatcgttaatgcgaatctgccacggactggcgctggcatggtggaggtcacctcgctcctgaaaaagcctgcttcgataactgaaacaagcttttcccttctgatggcagaggccgcaagttag

SEQ ID NO: 141563 - DNA, 318 bp, synthetic construct
  misc_feature 1..318: note = Description of Artificial Sequence: Synthetic coding sequence
  source 1..318: mol_type = other DNA
atgttaattaggcagaacctcgctctggattgtaagcagaaaaagtcccgcagtcgcagtgggagcaagaagaagatgttgacactgccgcacggagccgatgaggtctacatactgcgatgtaggttctgcggccttgtgtttcgaggaccactgtcagtacaggaagactggattaagcaccttcagaggcacatcgtgaacgccaacctcccacgcaccggtgccggaatggtggaagtgaccagcctcctcaagaagccggcctctattacagagacctctttcagcttgctgatggctgaggcagctagttag

SEQ ID NO: 141564 - DNA, 318 bp, synthetic construct
  misc_feature 1..318: note = Description of Artificial Sequence: Synthetic coding sequence
  source 1..318: mol_type = other DNA
atgctcattcgtcagaacctagccctggattgcaaacagaaaaagtctagatcacggtctggctcaaaaaagaagatgttaacactcccccacggcgcggatgaggtttacatccttcggtgtagattctgcggcctggtctttagaggtccactgtctgtgcaggaggactggattaaacatctccagagacacatcgttaacgccaacttgcctcgcactggcgcaggtatggtcgaggttacttccctcctgaagaagccggcatcaatcacagaaacctcattcagcttgctgatggccgaggctgccagttag

SEQ ID NO: 141565 - DNA, 3984 bp, synthetic construct
  misc_feature 1..3984: note = Description of Artificial Sequence: Synthetic coding sequence
  source 1..3984: mol_type = other DNA
atgcgcagctttctccagcaagatgtcaacaaaaccaagtccagattgaacgtcctcaacggactggccaacaacatggatgacctcaaaatcaatactgatatcaccggggccaaggaagagcttttagacgataataattttatctccgacaaggagtccggggtgcacaaaccgaaggattgccagacatccttccagaagaataacacccttacactccctgaggagctatctaaggacaaatctgagaacgctctgtccggcgggcagagcagcctgttcatccacgctggcgctccaacagttagtagtgagaatttcatcctaccaaagggcgccgccgtgaatggccccgttagtcatagcagtttgacaaaaacgtcgaacatgaacaaaggtagcgtgtccctgaccacgggtcaacctgtggatcagcctaccacggaaagctgcagcaccctaaaagtggccgccgatctgcagctgagtacccctcagaaagcaagccagcaccaggtactctttctactgtcggatgtagcacatgcaaagaatcccactcacagcaataaaaagctccccaccagcgcgagtgtgggctgtgatatccagaattctgtgggatcgaatataaagtccgacggcactttaattaaccaggttgaggtgggcgaggatggggaagatctgctagttaaggacgactgcgttaacacagtgactggcatctcttccggtaccgacggctttagatctgagaatgacacaaactgggaccctcaaaaggaatttatacaatttctcatgacgaacgaagaaacggtggacaaggcacccccccattccaaaatcggactggagaagaaaagaaagcggaagatggacgtttcaaagattacacggtacaccgaggactgtttctccgacagcaactgcgttcccaacaagtccaaaatgcaggaagtcgattttctggaacaaaacgaggagttgcaggccgtggactcacagaagtatgctttatcaaaggtgaaaccggagtcaaccgacgaagacctggagtcagtcgatgcatttcagcatcttatttataatcctgacaagtgtggagaggaatcctcccccgtccatacttccactttccttagcaacacactgaagaaaaagtgcgaggagtcagattcagaatctccggccaccttctctaccgaggagcctagtttttacccgtgtacaaaatgcaacgtgaacttccgtgaaaaaaaacacctgcaccggcatatgatgtaccaccttgatgggaactcccactttaggcacctgaatgtccctcggccctatgcctgtcgggaatgcggcagaaccttcagagacagaaactctctcctgaaacacatgatcattcaccaggagaggaggcagaaactgatggaggagatcagggagctaaaagagctccaggatgagggcagatcggctcgtttgcagtgtccacagtgcgtctttggcacgaactgcccaaagaccttcgtgcagcacgctaaaactcacgagaaagacaagcggtattactgttgcgaggagtgtaatttcatggctgtgaccgagaatgaactggagtgccatcgcggaatcgctcacggtgcagtggtgaaatgtccaatggtgacctctgacatcgcacagagaaaaactcagaaaaaaactttcatgaaagatagtgttgtcggctcatccaaaaagtccgcgacgtatatctgtaagatgtgtccattcacgaccagcgccaagagcgtcctcaagaagcacacagagtatctacattcctcttcttgcgtcgacagctttggcagtcctctagggctggacaagcgaaagaacgatatcttggaggaaccagttgactccgattctaccaagactctgactaaacaacagagtactacttttccgaagaactccgcactgaagcaggacgtgaaaagaaccttcgggtcgacaagtcagtcttccagttttagcaagatccataagagaccacacaggattcagaaagctcgcaaatccattgcccaaagcggcgtcaacatgtgcaatcagaattcatcccctcacaagaacgtaactatcaagtctagtgtcgaccagaagcctaagtacttccatcaggctgccaaagagaagtcgaacgctaaagccaattcacactacctgtaccggcacaagtatgagaattacagaatgatcaaaaagtctggcgagagctatcccgtgcacttcaagaaggaggaagcaagctctctcaatagccttcacctgttctcatcctcctctaacagtcataacaatttcattagcgacccacataagccggatgccaaacgccccgagtctttcaaggaccacaggagggtggccgttaagcgagtgattaaagagtccaagaaagaaagtagcgtgggcggcgaggatctagactcatatcctgacttcctgcataaaatgaccgtggtggtgctgcagaaattgaatagcgccgaaaagaaagattcctacgagacagaggacgagtctagctgggataatgtggagctgggtgactacacaacccaggcaatcgaggatgagacctacagcgacataaaccaggagcacgttaacctatttcctctattcaaatccaaagtggaaggccaggagccaggcgaaaatgctaccttgtcgtacgatcagaatgacggattttactttgaatactacgaggataccggttcgaacaacttcctgcacgagattcacgatcctcagcatctggaaactgcagacgcctccctcagtaagcactcctccgtatttcactggaccgatcttagcctagagaaaaagagttgtccgtactgccccgccactttcgagaccggagtgggtctgtcaaaccacgtgagaggccatctacacagggctgggttgtcatacgaagctaggcatgtggtttctcctgagcagattgccacctcggacaagatgcagcacttcaaacggactggtactggtacacccgtgaagcgggtccgtaaggccatagagaaaagtgaaaccacatccgaacacacgtgtcagttgtgcggaggctggtttgacactaagataggactttctaaccatgtacgaggccatctcaagcgactgggcaaaacgaaatgggacgcccataagagtcctatttgcgttctgaatgagatgatgcagaatgaggaaaaatacgagaagatcttgaaagctctaaactcccgtcgcattattccccggccattcgtggcccagaagttagcatcttcagatgatttcatatctcaaaacgtaattccacttgaggcataccggaatgggctcaagaccgaagccctctccgtatccgccagtgaagaggaagggctaaattttctgaatgagtacgacgaaactaagccagagctgcctagtggcaagaaaaaccagtccctgaccctcatcgagttgctgaaaaataagcgaatgggcgaagaacgaaacagtgcgattagtcctcagaagattcacaaccagaccgcccggaagcgctttgtgcagaaatgtgtgctgcccctaaacgaagattccccacttatgtatcagccacagaagatggaccttacgatgcacagcgccctcgactgcaaacagaaaaagtctcggagcagaagcggatctaagaaaaagatgttgactctgcctcacggggcagatgaggtatatattctgcggtgtcgattctgtgggctggtttttagagggccattgtctgtgcaggaggactggattaaacatctccagagacatatcgtgaacgctaacttgcccagaactggcgctggaatggtggaggtgacatcccttctgaagaagccagcttccattaccgagacctcattttcattactgatggcagaagctgcttcatag

SEQ ID NO: 141566 - DNA, 1953 bp, synthetic construct
  misc_feature 1..1953: note = Description of Artificial Sequence: Synthetic coding sequence
  source 1..1953: mol_type = other DNA
atgatgtaccacctggacggaaactcacattttcggcacctgaacgtacccagaccctacgcttgccgagaatgcggccggacgtttagggataggaactccctgctgaagcatatgattatccatcaagagcgccggcaaaaattaatggaggaaatccgcgaactgaaagaattacaggacgaaggtcgctctgctcggctccagtgtccccagtgcgtttttgggaccaactgcccaaaaacattcgtacaacacgccaaaacacacgagaaagacaagcgctattattgttgtgaagaatgcaatttcatggccgttacggaaaatgagctcgagtgtcaccgagggatcgcccatggcgcggtcgtgaagtgtccaatggtgacctctgacatagcccagcggaagacacaaaagaagacgttcatgaaggacagtgtggtggggagcagtaaaaagagcgccacatacatctgcaagatgtgcccattcacaacttccgccaaatccgttttgaagaagcacactgaatacctgcactccagctcctgcgtcgattcatttgggtcacctcttggactggataaaaggaagaacgacatactcgaggagcctgtagattccgacagtactaagacactgacaaagcagcagagcaccaccttccccaagaactcagcactgaaacaggacgtgaagcgaaccttcgggagcaccagtcagtcttcatccttcagtaagatccacaagcggcctcaccgtattcaaaaggccagaaaatcaatagctcaaagcggcgtaaacatgtgcaaccagaattcttccccccataaaaatgtcacaatcaagtcttctgtggaccagaaacctaaatacttccaccaggccgcaaaggagaagagtaatgccaaggctaacagccactacctgtataggcataagtacgaaaactatagaatgattaaaaaaagcggtgaaagctacccagtgcatttcaaaaaggaggaggcgtcttcactgaatagcctccatctgttttcatccagctccaactctcacaataactttataagtgacccgcacaagcccgacgcaaagcggccggagtccttcaaagaccatcgtagggtggccgtgaagcgagtgatcaaagaatcaaagaaggagtcgtctgtggggggcgaggacttggacagttacccagatttcttacataaaatgacggtggtagtcttgcaaaagctgaactctgccgagaaaaaggactcctatgaaaccgaggacgagtcaagttgggacaacgtggagctcggcgactacacaactcaagcgatagaggatgagacctattctgacataaaccaagaacatgttaacctgtttcccctgttcaaatcaaaggtcgaaggacaggagccaggcgagaatgccactctgagttacgaccagaatgacgggttttacttcgagtactatgaggacactggcagcaataattttctgcacgagatccacgatccccagcatctcgagacagctgatgctagtctgtctaagcatagttccgtgttccactggactgaccttagcctagagaaaaaatcatgtccctattgcccagctaccttcgagacaggcgtgggactgagtaatcatgtccgggggcacctgcaccgagccggactaagctatgaggcccgtcacgtcgtgagcccggagcaaattgccacctccgataaaatgcagcacttcaagcgtaccggcaccggaactcccgtgaaacgcgtgagaaaggccattgagaaatctgagacgacgtctgaacatacgtgccagctatgtggaggctggttcgacactaaaatcggattgtcaaaccacgtcaggggccaccttaagagactcggtaaaactaaatgggacgcccacaagtcgcctatctgcgtatag

SEQ ID NO: 141567 - DNA, 924 bp, synthetic construct
  misc_feature 1..924: note = Description of Artificial Sequence: Synthetic coding sequence
  source 1..924: mol_type = other DNA
atgcggagtttcctgcagcaagacgtcaataagacaaaatccagactgaacgtattgaatggccttgccaacaatatggatgatctcaagataaatacagatattacgggcgctaaggaggaactgctcgatgataataactttatctccgataaagaaagcggcgtgcataaaccgaaggactgccagacaagtttccagaagaataataccctaacactgcccgaggaactgtccaaggacaaaagtgaaaatgctctgtctggtggtcagtcaagccttttcatccatgccggagctcccacagtgtcaagtgagaattttatactccctaagggcgcagcagtcaacggaccagtaagtcactcgagcctgacaaagacaagtaacatgaacaaaggcagtgtctctctcacaaccggacaacctgtggaccagccaacgaccgaatcatgctccaccctaaaagtggctgctgacctgcagctgtctacgcctcagaaagcttctcagcaccaggtcctgtttcttctgtctgacgtggcgcatgcaaagaacccaacccactccaacaaaaaactgccaacatccgcatcggtcggctgtgatatccagaactctgtaggctctaatatcaagtcagacggtacactaatcaatcaggtcgaggtgggggaggatggagaggacctgctcgttaaagatgattgcgtgaatacagtgaccggaattagctccggaaccgatggcttccgaagcgaaaatgacacgaactgggacccccagaaagaattcatccagtttcttatgacaaacgaggagacagttgacaaggcccctcctcactcaaagatcggcttggaaaagaagaaagctaagaatggttgcaaacaagacaattctctctaccggggccttttgtag

SEQ ID NO: 141568 - DNA, 1518 bp, synthetic construct
  misc_feature 1..1518: note = Description of Artificial Sequence: Synthetic coding sequence
  source 1..1518: mol_type = other DNA
atgactaaggcccaggaatccctcaccctcgaagacgtagctgtggacttcacctgggaggaatggcagttcttgtctccagcccagaaagatctgtacagagacgtgatgctggagaactacagtaatctggttagtgtggggtatcaagcggggaagcccgacgctctaactaagttagagcagggggagccactctggaccctggaagatgaaatacactctcccgctcatcctgaaatcgagaaggctgatgatcacctgcaacagccacttcagaatcagaaaatcctcaagagaacgggccaacggtatgagcacggcagaacactaaaatcctatctcgggctaaccaaccagagccgacgatacaatcggaaggaacctgccgagttcaatggcgacggtgcatttctgcatgataatcacgagcaaatgcctactgaaattgaattccctgagtccaggaagcctatatccacaaaatctcagttcctaaagcaccaacagacccacaatatagagaaggcccacgagtgcacagactgcggcaaagcctttctcaagaagtctcagcttacagaacataagaggattcacacaggaaagaagccgcacgtctgcagtctgtgcggaaaggctttctacaaaaagtacaggctgaccgaacatgagagagcacataggggagagaagcctcatgggtgctctttatgtgggaaagccttttacaagcgataccgtctgacagaacacgagcgggcccacaaaggcgagaaaccatacggatgtagcgagtgtgggaaagctttccccaggaagagtgagctcactgaacatcagcggattcacactggtattaagccccatcagtgctccgagtgcggacgtgcgtttagtcgaaagtctctgctcgtggtccatcaacgaacacataccggagaaaagccccatacgtgttccgagtgcggtaaaggcttcatccagaaaggcaatcttaatattcaccagcgcacccacactggagaaaagccatacggatgcattgactgtggcaaggcattcagccagaagagttgcctggtggctcatcagcgctaccacacagggaaaactcccttcgtgtgcccagagtgcggacagccttgttcccagaagtctggcctgatcaggcaccaaaaaatccatagcggcgaaaaaccgtacaaatgttccgactgcggcaaagcgtttttaacaaagacaatgttgatcgtacatcacagaacgcatactggggaaagaccatacggatgcgatgaatgtgagaaggcctacttctacatgtcttgcctggttaagcacaagcgtatccacagccgcgaaaaacgcggggactcagtgaaggtcgagaatcctagcacagcgtcacatagcctgagtccttcagaacacgtgcaggggaaatcccctgtgaatatggtgaccgtggccatggtggcaggacaatgtgaatttgcacacatcttacactcgtag

SEQ ID NO: 141569 - DNA, 1833 bp, synthetic construct
  misc_feature 1..1833: note = Description of Artificial Sequence: Synthetic coding sequence
  source 1..1833: mol_type = other DNA
atgccctcggccagagggaagagtaagtcaaaagccccaatcacatttggcgaccttgccatctacttttcccaggaagagtgggaatggctgtcgcccatacaaaaggatctttatgaagatgtgatgctggaaaattatcgcaacctggtgagtttaggtctgtcttttcggaggccgaacgtgatcactctcctggaaaaggggaaggcaccatggatggtggaaccagtacggaggcggcgtgccccagactcggggtccaagtgcgaaacaaaaaaactgccccccaaccagtgtaacaagagtgggcagtcgatatgccaaaagttggtgtcagctcagcagaaagctcccactcggaagtccggatgtaacaagaattccgtgctcgtaaagccgaaaaaaggacacagtggcaagaagccactgaagtgtaacgattgtgggaagacattctctcgttccttttctctgaagctgcatcagaacatccatacaggcgaaaagccatttgaatgttctaattgccgaaaggcatttcgccagataagcagtattttgctacaccagcgtattcattccggcaaaaaatcccatgagtgtaataaatgtggcgaaagttttaatcaaagaaccacactgatactgcacatgcgaatacacgatgggaaggagattctggattgcgggaaagcattgtcccaatgtcagtcttttaacatccaccagaagatccacgtggtgggcaatgtctgccagtgtcgcaagtgtggcaaggcatttaaccaaatgtcgtccctgctacttcacaagaaaattcataacggcaagaaaacacacaaatataataaatgcgggagaggatttaaaaagaagtcagtcttcgtcgtccataagcgtatacacgcgggggaaaaaattccggagaatgctaaagccctgagtcagagccttcagcagaggtctcatcacctcgaaaacccctttaaatgcagaaagtgtggaaaacttttcaatcggatctctccattaatgctacaccaacggatccacaccagcgaaaaaccatacaaatgtgataagtgcgataagttcttcagaagacttagcaccctgatccttcatctgaggattcacaacggcgagaaactctaccgctgtaataagtgtgagaaggtgtgcaacagacactcctctctgattcaacatcaaaaggtgcacacgaaaaagaaaaaactctttgagtgtaaggagtgtggcaagatgttttctggaactgctaatctgaagatccatcaaaacatccactccgaggaaaaaccattcaaatgtaataaatgctccaaagtgttcggccgacagtcatttctcattgagcatcagagaattcacactggtgagaagccatatcagtgtgaggaatgtggaaaagccttttcccacagaatttcactcacaaggcataagcgcattcacaccgaggatcggccatacgaatgtgaccagtgtggaaaagccttctctcagtcagcccatctggcgcagcacgaaaggattcacacaggagaaaaaccttatacatgcaaaacctgcggcaaagccttctctcagcgaactagcctcatcttacacgagcggagccatacgggagagaaaccctacgagtgcaacgaatgcgggaaagccttttctagcggttcagacttgatcaggcaccaacgctcccactcaagtgagaagccctatgaatgctcaaaatgtgggaaggcttattctagatccagcagcctgattcggcatcaaaacacccatagcgaggagaaggcgtag

SEQ ID NO: 141570 - DNA, 2217 bp, synthetic construct
  misc_feature 1..2217: note = Description of Artificial Sequence: Synthetic coding sequence
  source 1..2217: mol_type = other DNA
atgaggactcttgtcaatgctcttagtggcggcgggcaggagattaagcccgaagggaaatgcgctcataatggaatgtgttttagatgtgaggaggtggccccagatacttgcgaggcttacccatacccaggtcttgttgtgtcggtggcgggcaaggaggggccgaatcctgaccacaaacgcgggtttctcgacctcgctcaggagggcatccaggccctcccataccagctgtcagcacatctttcggtctggactttaaagggagaggagcgaatgcctagtgcccgaggtaaatcaaaaagcaaggcacccattacctttggggatttggccatatatttctcgcaagaagagtgggagtggttatcccctattcagaaagatttatacgaggacgtaatgcttgaaaattatcgtaaccttgtttctctgggcctgagttttcggagacctaatgttataactttgctggaaaaaggcaaggctccttggatggtcgagcctgtgcgcagacggagagcccctgaacttgtcaccgtggccctcttttcctcgttcggtgaggtcatgttcagccggatggtgcttatgctgatggatgtgtgccagtacctggtgatagacgaattggacagcggcagcaaatgcgagaccaaaaagttgccccctaatcaatgtaataagagcggtcagagtatttgtcaaaagctggtgtccgcccagcagaaggcgcccacaagaaagagtggttgtaataaaaatagcgtgcttgtcaaaccaaaaaaggggcactccggcaaaaaaccgctaaaatgcaacgactgtggaaagacctttagcagaagcttcagcctcaaactgcatcaaaatatacatacgggggaaaagccgtttgaatgctctaactgccgcaaggccttccggcagatatcatccatcttgctccatcagaggatccatagtggtaagaagtcacatgagtgcaacaagtgcggagaatcctttaaccagcgtaccactcttatcttacacatgcgcattcacgatgggaaagagatactggactgcggcaaggctttgtcccagtgccagagcttcaatatacatcagaagattcacgtagttggaaatgtgtgtcagtgcagaaagtgcggcaaggcttttaaccagatgtcaagcttattgctgcataagaagattcacaacggaaagaagacccacaaatacaacaagtgtggacgcggatttaagaagaagtccgtatttgtggtgcacaaacggatccacgctggcgagaaaattcctgagaacgccaaggctctaagccagtctctccagcagcgatcccaccacctggagaacccctttaagtgcaggaagtgcggtaaactgttcaatcgtatctccccactgatgcttcaccagcggattcatacaagtgagaaaccttacaagtgcgataagtgtgacaagttcttccgcaggttatccaccttaattctgcatctgcgtattcacaatggcgagaagctttacaggtgcaacaaatgcgagaaagtatgcaaccgtcacagttcactgatacagcaccagaaggtacacaccaagaagaagaaacttttcgagtgtaaggagtgtggtaaaatgttttctggcactgcgaatctcaaaattcaccagaatatccacagcgaagagaaaccgtttaaatgcaacaagtgctccaaagtgttcggccgacaatcctttctgatagaacatcagcggatccacacaggagagaaaccttaccagtgcgaggaatgtgggaaagctttttcccatagaatcagcctcactcgacacaaaaggattcataccgaagacagaccttacgaatgcgatcagtgcggcaaggcatttagtcagagcgcgcacctcgcacagcatgaacggatccatacgggggagaaaccctatacctgcaagacatgcggcaaggcattctcccagagaacctctctgattctgcacgagcgaagccacacaggcgaaaaaccttacgagtgcaacgagtgtggtaaggcattctcaagcggctccgatctcatcagacatcaacggagccattcctctgagaagccttacgaatgttctaagtgcggtaaggcctactcaagatcgtcctccctgattaggcaccaaaacacccattccgaagagaaggcctag

SEQ ID NO: 141571 - DNA, 975 bp, synthetic construct
  misc_feature 1..975: note = Description of Artificial Sequence: Synthetic coding sequence
  source 1..975: mol_type = other DNA
aagaatagcgtgctggtgaagcctaaaaagggacactctggcaagaaaccactcaagtgtaatgactgcggtaagacattttccaggagcttttccttaaagctgcatcagaacatccacactggcgagaagccgtttgaatgctcgaactgtagaaaggccttccgacagattagctctatattgcttcaccagcgtatacactctggaaaaaaaagccatgagtgcaataaatgtggtgagagtttcaatcagcgcaccactctcattttgcatatgagaattcatgacggaaagaatccttttaagtgcagaaaatgcggcaaactgttcaataggatatcccctctcatgctccaccaaaggattcacacgtctgagaaaccatacaagtgtgaggaatgcggcaagatgttttcaggcactgcaaatctcaagattcaccagaatatccacagcgaggagaagccttttaagtgcaataagtgtagcaaggtgttcggaagacagagtttcctaatcgagcatcagagaatacatacaggcgaaaaaccataccagtgtgaagagtgtgggaaagcgtttagccatcgtatcagccttacccgacataaacggattcacactgaggacagaccctatgaatgcgatcagtgtggtaaggccttcagccagtctgcccatctcgcacaacatgagcgaatccacaccggagaaaaaccctatacctgcaagacctgcggcaaagcctttagtcagagaacaagtctgattctgcacgaacgttctcacaccggcgaaaagccctatgaatgtaacgaatgcggcaaggcttttagctccggctcagacctgatcaggcaccagagatcacacagcagtgaaaagccatacgagtgcagtaaatgtggcaaagcctactctagaagctcctcactcatccgccaccagaatactcacagcgaggagaagtag

SEQ ID NO: 141572 - DNA, 1179 bp, synthetic construct
  misc_feature 1..1179: note = Description of Artificial Sequence: Synthetic coding sequence
  source 1..1179: mol_type = other DNA
atgcgcatacacgatggaaaagaaattcttgattgtggtaaagcactctcccagtgccagagcttcaatattcatcagaagatccacgtggttggcaacgtttgccagtgccggaagtgtgggaaagctttcaaccagatgtcatcgctcctcctgcacaagaagattcacaacggaaagaagacgcacaagtataataagtgcggccgggggttcaagaaaaagtcagttttcgtagtccacaagcggattcacgccggcgagaagatccctgagaatgctaaagcactgtcacagtcactccagcagagatctcatcatctggagaaccctttcaagtgtcgaaagtgtgggaagttgtttaatagaatttcgcctctgatgttgcaccagcgcattcatacatctgagaagccgtacaagtgcgataagtgtgataagttttttcggaggctttctaccttgatacttcacctgagaatccataacggagagaaactttataggtgtaataagtgcgagaaggtgtgcaatagacattcgtccttgatccagcatcagaaggtacacaccaagaagaagaagcttttcgaatgtaaagaatgtgggaaaatgttcagtggtacagccaatttgaaaattcatcagaacatacactccgaagaaaagccgtttaagtgtaacaagtgcagtaaggtatttggacgccagtcttttctaatcgaacatcaacgcatccatactggcgagaagccctaccaatgcgaagagtgcgggaaagccttctcccaccggattagtctcacacgccataagagaatccatactgaagacagaccctacgagtgcgaccagtgcggcaaggctttctctcagtctgcacatctggcacaacatgagcgtatccatacaggggagaaaccttacacttgcaaaacatgtggcaaggcattctcccagaggaccagtcttattcttcatgagcgcagtcatacaggggaaaagccctatgaatgtaacgaatgcgggaaagccttttcaagcggtagcgacttgattcgtcaccagaggagtcactcaagtgaaaagccctacgagtgtagtaaatgtgggaaggcttattctagaagcagctccttaattcggcaccagaacacgcatagtgaagagaaagcctag

SEQ ID NO: 141573 - DNA, 1833 bp, synthetic construct
  misc_feature 1..1833: note = Description of Artificial Sequence: Synthetic coding sequence
  source 1..1833: mol_type = other DNA
atgccgagcgcaagaggaaaatctaaaagtaaagctccaatcacctttggcgatttagccatctacttttcacaggaagagtgggagtggctttcccctattcagaaagacctgtacgaggatgttatgttagagaactatcggaatctcgtgagtctggggctgtctttccggagacccaacgttattaccctgctggagaaaggaaaggctccctggatggtcgaaccagtgcgtagaagacgagccccagatagcggatcgaaatgcgaaacaaaaaaactgccccctaatcagtgtaacaagtccggccagtcaatatgtcagaaactggtgagtgctcagcaaaaggccccaacccggaagagcgggtgcaataagaatagcgtcctggtaaagccgaagaaggggcactctgggaagaaaccactcaagtgcaatgattgtggaaaaacattttcgcgatctttttctctcaagttgcaccaaaatatccatacaggcgagaagcctttcgaatgctcaaactgcaggaaggcctttcgacagatctcgtctattctactgcaccagagaattcactctgggaagaagagtcatgaatgtaacaagtgtggcgagtctttcaatcaaagaactacactaattctgcacatgaggattcacgatggcaaggaaatcctggactgcgggaaagccctctctcagtgtcagtcttttaacatccaccagaaaatccacgtcgtcgggaacgtgtgtcagtgtaggaaatgtggaaaagcttttaatcagatgtcttctctactgttacacaagaagattcataacgggaagaaaactcataaatacaataagtgtggcagagggtttaaaaagaaaagcgttttcgtcgtgcacaaaaggattcacgctggggaaaaaattccggaaaacgccaaagctttaagccaatcactccagcagcggagtcaccacctggaaaatccctttaagtgcagaaaatgcggcaagctattcaacagaatctctccgctaatgctgcaccaaagaatccacacatctgaaaagccttataagtgcgacaaatgtgataagtttttccgtagattgagtacactaatcctgcatctgcggatccacaacggcgagaagctgtatagatgtaacaagtgtgagaaggtatgtaaccgccactcttctctcatccaacaccagaaagtgcacactaagaaaaagaagctcttcgaatgtaaggagtgtggtaaaatgttcagtggaaccgctaatctgaagatccatcagaatatacactctgaggaaaagcccttcaagtgcaacaagtgctccaaggttttcggccggcagtcttttttgatcgaacaccagcggattcatacgggcgaaaaaccttaccagtgtgaagaatgtggaaaagccttctctcatagaatatcgctcacccgccacaagcggattcacactgaggacagaccttacgagtgtgatcagtgtgggaaggcctttagccaatccgctcacttggctcagcatgaacggattcacacaggcgagaagccctacacttgtaagacgtgcggtaaggcgttttcacagcgcacttccctgattcttcacgaacggagtcacacaggcgaaaagccttatgagtgcaatgaatgcggaaaagcattcagctctggttccgacctgattaggcatcagcgatctcactcaagcgaaaagccatacgaatgtagcaaatgcggtaaggcatactcccgctcgtccagtctgattcggcaccagaacacacactcagaggagaaggcatag

SEQ ID NO: 141574 - DNA, 1728 bp, synthetic construct
  misc_feature 1..1728: note = Description of Artificial Sequence: Synthetic coding sequence
  source 1..1728: mol_type = other DNA
atggccatgtcccaggagtctctaacctttaaagacgtgtttgtcgatttcaccctggaggaatggcagcagctcgactctgcgcagaaaaatctgtaccgagacgtgatgctggaaaattactcacacctcgtcagcgtgggccaccttgtgggcaaacctgatgttatcttccgactgggcccaggggacgagagttggatggccgatggcggaacaccggttcggacgtgcgcagtgtgggaagttgacgaacagatcgatcattacaaggaaagccaggacaaatttctgtggcaggccgcgtttatcggcaaggaaactctcaaggacgaatcaggccaggaatgtaagatctgccgcaagataatttacctcaacacggacttcgtgtccgtgaaacagcggctgcctaaatattactcttgggaaagatgcagcaaacatcatctgaacttcctcgggcagaaccggtcttacgtaaggaagaaagatgatgggtgcaaggcctactggaaggtgtgtttgcattacaatctgcacaaagcccaacctgccgaacgctttttcgatcccaaccagcgggggaaggcgctgcatcagaaacaggcactgcggaaaagccagcgctcacaaacaggcgaaaaactctacaagtgcacggaatgcggcaaagtcttcattcaaaaagccaatttggtcgtacaccaacggacccataccggagagaagccctacgagtgctgtgagtgcgcaaaagcctttagccaaaaaagcaccctcattgcccatcagcgaacgcacacaggcgaaaaaccctacgagtgcagcgaatgcgggaaaacattcatccaaaaaagcacactcattaagcaccagaggacacacaccggcgaaaaaccctttgtctgcgacaaatgtccaaaagcctttaaaagtagttatcaccttattaggcacgaaaaaacccacatacgccaggccttctacaaggggatcaagtgcacaaccagctcactaatttaccagcggattcatacctctgagaagcctcagtgctccgagcatgggaaagcttccgacgagaagccttcacccacgaagcactggaggacgcacacaaaagaaaacatctatgagtgctctaagtgtggaaagagctttaggggcaaatctcatctttcggtacatcagaggattcacactggagaaaagccatatgaatgttctatctgtgggaaaaccttctcaggcaagagccatctgagtgttcatcacaggactcataccggcgaaaaaccttacgagtgcaggcggtgtggcaaagcctttggggagaagtccacactgatcgtgcaccagcggatgcacactggcgagaagccctataaatgcaatgagtgcggaaaggcctttagcgaaaaaagcccactcattaagcaccagcggattcataccggggaacgcccttacgagtgcacagattgcaagaaggccttctccaggaaatccaccttaatcaagcaccagagaatccatacgggagagaaaccctacaagtgctctgaatgcggtaaagcattttccgtgaaatcaacactcatagttcaccatagaactcacactggagagaaaccctatgaatgccgtgattgcgggaaggccttttctgggaaatccactttgatcaaacaccagcgatcccacactggggataagaatctgtag

SEQ ID NO: 141575 - DNA, 1746 bp, synthetic construct
  misc_feature 1..1746: note = Description of Artificial Sequence: Synthetic coding sequence
  source 1..1746: mol_type = other DNA
atggctatgagccaggaatccctgaccttcaaggacgtttttgtggactttactctggaggagtggcaacagctggatagcgcacagaaaaatctgtatcgggacgtaatgctggaaaactacagtcacctcgtctcagtgggtcacttggtgggaaaacctgacgtgattttcagactgggcccaggcgacgaaagctggatggcggacggggggactccagtcagaacctgtgctggcgaggatagaccagaggtttgggaagttgatgagcagatcgatcactacaaggagagccaagacaagttcctgtggcaggcagcctttatcggcaaggaaactctcaaggacgagagcggtcaggaatgcaagatatgcagaaaaattatctatctcaacacagacttcgtttctgtgaagcaacgccttccaaaatattatagctgggagcgctgctcgaagcaccatctcaattttctcggtcaaaaccgctcctacgtgagaaagaaagatgatggctgtaaagcgtactggaaggtttgtctacactacaacctgcacaaggcccagcctgccgagcgcttttttgacccaaatcagcggggtaaagctctgcaccagaaacaggcactgcggaagagccagagatctcagactggcgaaaaactgtataagtgtacagaatgcggaaaggtgttcattcaaaaggccaatctggtggtgcatcagaggactcataccggggagaagccatatgagtgctgcgagtgcgccaaggctttctcccagaagagcacactgattgctcatcagagaacccataccggcgagaaaccctatgagtgttccgaatgcggaaaaactttcatacagaagagcaccttaattaagcatcagaggactcacaccggagaaaagccgtttgtgtgcgacaagtgccctaaggcattcaagtcctcctaccaccttatccggcatgaaaagacccatatccggcaggctttttacaaaggcatcaaatgtacaactagcagcctgatttatcagagaatacatacgtcggaaaaacctcagtgcagtgaacatggaaaagcaagcgatgagaagccctctccaactaaacactggagaacccatactaaggaaaatatctatgaatgtagcaaatgcggaaagtcattccggggtaaaagtcatttgtcagtccatcaacgcatccataccggcgaaaaaccgtatgaatgttccatttgcggcaagaccttctcaggcaagtcccatctctctgttcatcaccgaacccatactggcgaaaaaccctacgagtgccgaaggtgcggcaaagcattcggcgagaaatctacattaatcgtgcatcagcgcatgcacactggcgagaagccctacaaatgcaacgaatgtggaaaggctttctcagaaaagagtcctctaatcaaacaccagcgcatccacactggcgagaggccctatgagtgcaccgattgtaagaaggcctttagtagaaagagcactctcatcaagcaccaacgcattcacaccggagaaaaaccttataaatgtagcgagtgcggcaaggccttctcagtgaaaagcaccctcatagtgcaccaccggactcacacaggggaaaagccatatgagtgtcgtgattgcggaaaggcattcagtgggaagtccacccttatcaaacaccagagatcgcatacaggtgacaagaacttatag

SEQ ID NO: 141576 - DNA, 3714 bp, synthetic construct
  misc_feature 1..3714: note = Description of Artificial Sequence: Synthetic coding sequence
  source 1..3714: mol_type = other DNA
atgggagacatgaagaccccagacttcgacgacctgctggctgctttcgatatccccgatatcgacgccaacgaggcgatccactccggcccagaagagaatgaggggcccggaggtccaggtaaaccagagcccggcgtcggaagcgagtcagaggacaccgccgccgcttccgcaggtgacggcccgggtgtccctgcccaggcgtctgaccacggactcccaccacccgacattagcgtggtatctgtgattgtgaaaaatacggtgtgtcccgagcaatctgaagctttggcaggaggaagtgccggcgacggcgctcaggcagccggagtgactaaagagggcccagttggaccacatcgtatgcaaaatggattcgggtccccagaaccctcactgccgggaacacctcattcgcccgcaccaccaagcggggggacttggaaggaaaaaggcatggaaggaaaaactcccctggatttattcgcccactttggaccagagcccggagaccattctgatcccctccccccttccgccccatctcccactcgagagggagctctcacgcctcccccatttccatcaagctttgagttagcacaggagaacgggccagggatgcaaccacctgtttccagcccacccttaggggccctgaagcaagagtcatgttcaccacaccatcctcaggtgctggcccagcagggaagtgggtcatcaccaaaggcaactgacataccagcctccgcctcgcctccacccgtcgctggagtgccgttctttaaacagagccccggtcatcagtcccctctcgcctcacccaaggtcccggtatgtcagcccttgaaagaggaggatgatgacgaggggccagtcgataaaagctctcctgggagtccccagtctccctcgagtggggcagaggctgccgacgaggactcaaatgacagcccggcctcttcctcaagtcggcccctcaaagtccggattaagaccatcaagactagttgcgggaacattacccgcacagttacgcaggtcccctccgacccagatcccccagctccgctcgcagagggcgccttccttgcagaagcctccctgctgaaactcagccctgccacccccacctcagagggacctaaggtggtttcagttcaactcggtgacggcacccgcttgaaggggaccgtattgccagtcgccactattcagaatgcctccacggccatgctgatggccgcgagtgtcgcccggaaggctgtagtgttaccgggaggaactgcaacatcacccaaaatgattgctaaaaacgtgctgggcctcgtgccccaggcactgcccaaagctgacggaagagctggccttggcactggcggacagaaggtgaacggggctagcgttgtgatggtgcagccaagcaagactgctactggcccttcgacggggggcggaaccgtgatttcccggacacagagctctctcgtggaagcatttaacaagatccttaattccaagaacctgctccctgcatatcgtcctaatctgtctccgccagcagaagccggactagccttaccccccacagggtaccgctgcctcgagtgcggtgatgcattttccctggaaaaatcacttgctaggcattacgaccgccggagcatgcgaatcgaggtcacctgcaatcactgtgcacggcggctggtcttcttcaataaatgttctttactgttgcacgcccgcgaacataaagacaaaggattggtcatgcagtgtagtcacctcgtaatgagacctgtcgctctggatcagatggttggtcagccagacatcacaccactgctgcctgtcgccgttccccccgtttccggacctctagctctgccggctctcgggaaaggcgaaggcgcaataacctcctccgctatcacaaccgtggcagccgaagcacctgtgctccccttatcaacggagcctcctgccgctccagccacctccgcctacacatgttttaggtgcctcgaatgtaaggagcagtgtcgtgataaagcaggtatggcagctcactttcaacagctcggacctcctgcacctggtgccacttccaatgtctgcccgacatgtccgatgatgctgccaaacagatgttctttcagtgcacatcaacgaatgcacaagaatcgaccccctcacgtctgccccgagtgtggaggcaacttcctgcaggccaatttccagactcacctgcgcgaggcatgcctccatgtctcaaggcgagtcgggtaccgctgcccaagctgctccgttgtgttcggtggcgtcaattccatcaagtctcacatccagacttctcactgtgaggtgttccacaagtgtcctatctgcccaatggcgttcaagagcggcccctctgcccacgcccacctgtactcacagcatccaagctttcagacccaacaagccaagcttatttataaatgcgccatgtgcgatactgtgtttacacacaagcctctcctgagctcccattttgatcagcaccttctgccacagagagtatccgttttcaaatgcccctcatgtcctctgcttttcgctcagaagagaactatgctggaacacctgaaaaacacccaccagtcagggcggttggaggaaactgctggcaaaggagcagggggggccctgctcacaccaaagaccgagcctgaggagctggccgtgtcacagggaggagccgcccccgctaccgaggaatcatcttcttctagtgaagaggaagaggtgcccagttcccctgaaccccctcgaccagctaagagaccaagaagagagctgggaagtaagggtctcaaggggggtggcggaggccctggtggatggacatgtggactgtgccattcctggtttcccgaaagggacgagtacgtcgcacacatgaagaaagagcatggaaaatctgtcaaaaagtttccatgcagactctgtgaaaggagcttctgtagtgccccctctcttagacgccatgtgagagtaaaccatgagggcattaagagagtgtacccctgccgatactgcactgaggggaaacgaacattctctagtcggctgatcctggagaagcatgtacaggtccgtcacggactccagctaggtgcccaaagtcccgggagggggacaaccttggcacgagggagctccgctcgcgctcagggaccgggccgaaagcggaggcagtcttccgacagttgctcagaggagccagactcaactacaccgcctgcaaagagtccaagaggagggcctggaagcgggggacacgggccattaaggtataggtccagcagtagtaccgagcaaagccttatgatgggtctacgcgtggaggacggagctcagcagtgtctcgactgcggactctgtttcgcttctcctggctcattgtcaaggcaccggttcatcagtcataaaaaacgaaggggcgtgggcaaggccagtgctctgggcctgggcgatggagaggaggaggccccccccagcagaagcgacccagatggtggagattccccactgcccgcttccggcggaccactcacttgcaaggtgtgtggaaagtcctgtgactccccattaaacctcaaaactcacttcagaacacacggaatggccttcatcagagcgaggcagggcgctgtgggcgacaattag

SEQ ID NO: 141577 - DNA, 3714 bp, synthetic construct
  misc_feature 1..3714: note = Description of Artificial Sequence: Synthetic coding sequence
  source 1..3714: mol_type = other DNA
atgggggatatgaaaactcccgacttcgacgatttgttagccgcttttgatatcccagacatcgatgccaacgaagcaatccacagcggacctgaggaaaatgagggacctgggggccctggcaaacctgaaccaggtgtcgggtcagaatccgaagacaccgctgcagcaagcgccggcgacggaccgggagtgccggcacaggcttccgatcacgggctgccgccccccgatatatctgtggtgagcgtgatcgtgaagaacactgtgtgtcccgaacaatctgaagcacttgctggaggctccgctggcgacggggctcaggccgccggcgttaccaaagaagggcctgtgggtcctcatagaatgcaaaacggttttggaagtccagagccctccctgcccggcaccccccattctcctgccccaccgtccggcggtacgtggaaagagaaaggcatggagggcaagactcccctggacctgtttgcccactttggccctgagcctggagaccacagtgaccccctccccccaagtgcgccctcacccactagagagggtgcacttacccccccgccattcccaagtagtttcgagttagcacaggagaatggccctggcatgcagccccccgtcagtagccccccattgggtgccctcaagcaggagagctgctctcctcatcacccacaggtgttggcacagcaggggtcaggttcaagcccaaaagctaccgatattccagctagtgcatcaccacccccagtggctggcgtgccgttctttaaacagagcccaggacatcagagccctctcgcttctccgaaagtgcccgtctgtcaacctctgaaggaggaggatgatgacgagggacctgtcgataagtcttcccccggctccccccagtctcctagctctggtgctgaagccgctgacgaagactccaacgattctcctgcgtccagcagctctagacccttgaaggtgcgcattaaaaccattaagaccagctgtgggaatatcacccgcacagtgacgcaggtaccttccgatcctgatccaccggctcctctggcagagggcgcatttctggcagaagcctccctccttaaactctcaccggcaacgcccacctcagagggtcccaaagtggtgagcgtgcaactcggagacggcacccgtctgaaggggactgtgttgcctgttgccacgatccagaacgcctccaccgccatgctaatggccgcctctgtggccaggaaggcagtggtgctccccggcggaaccgccactagtccaaagatgatcgccaaaaacgtgttgggcctagtgccccaagctctgcccaaagcggatggccgagcggggctgggcacaggcgggcagaaagtgaatggggctagcgtcgtcatggtgcagcccagtaagacagcgaccggcccaagtacaggaggcggcacagtgatctcaaggactcaaagctctctcgtggaggcgttcaacaaaatcctcaacagcaaaaatctgctgcccgcctacagaccaaacctgtcaccaccagcagaggccggcctcgctctgccacctacaggatatcgctgccttgaatgcggcgacgccttttctctggagaaatcactggctaggcactacgatcgcaggagtatgagaattgaggtaacctgcaaccactgcgccaggagactagtcttttttaataagtgtagcctgctacttcatgctcgagaacataaggataagggtttagtgatgcagtgttcccacttagtgatgcgacccgtagcactcgatcaaatggtcgggcagccagacattactccactcttgccggtcgccgtccccccagtgagcggtccactagctctgcctgctttgggcaagggagaaggcgcaattacttcatctgccatcacaactgtggcggcagaagccccagtactgcctctatcaacagagccgccagcagccccggccacaagcgcttatacatgcttcagatgccttgagtgtaaggagcagtgcagggacaaagcaggcatggcagcgcactttcaacagcttggccctcccgcacctggtgcaacctccaatgtgtgccccacttgtcccatgatgctgcctaatcgctgctcatttagcgcacatcagcggatgcataagaaccggccacctcatgtttgcccagagtgtggaggcaatttcttgcaggccaattttcagacacatctgagagaggcttgcctacacgtgagcagaagagttggctacagatgtcccagctgttctgtggtgtttggtggtgtgaactctataaagagtcacatacagacttctcactgtgaggttttccacaagtgtccaatttgtcctatggcctttaaaagcggaccgagcgcccacgcacacctgtactctcaacacccttccttccaaacccagcaggcgaaactgatttacaaatgcgcgatgtgtgacaccgtgttcactcacaagcccctgctaagttcacattttgatcagcaccttctcccacagcgggtgtctgtatttaaatgcccaagctgcccacttcttttcgcccagaaacgcacgatgctggaacacctcaaaaatactcatcagtcgggacgtttggaggagacagctggaaagggggccggaggcgcactcctcaccccgaaaaccgagcctgaggaactggcagtttctcaaggcggcgcagcacccgcaactgaagagagtagtagtagttccgaagaggaagaggtgcctagctcccctgagcctccaagaccagcgaaacggcctaggagggagctcgggagcaaaggtcttaaaggcggaggaggcgggccaggtggctggacatgtggtctatgtcacagttggttcccagagcgggatgaatacgtggcacacatgaagaaagagcacggcaaatctgtaaagaagtttccgtgccgcttgtgtgaacgcagcttttgctcagctccgagtctccgaaggcatgttagggtcaatcacgagggtatcaaacgagtgtatccctgtcgatattgcacagaaggcaaaagaactttctccagcagactaattctcgaaaagcatgtgcaagttcgccacggtctgcagctgggcgcacagtctcctggccgaggtaccacactagccagggggagctcggctcgcgcccagggacctggtaggaaacggcggcagagctccgacagttgttcagaggagcctgactccacaactccgcccgccaaatcaccccgcggtggcccgggttcaggggggcacggtcccctgaggtatagatcaagcagctctacagaacagtccctcatgatgggattgagagtcgaagacggagcccagcagtgcttagattgtggcctgtgcttcgcatcgcccggcagcttgagtcgccacagatttattagtcacaaaaagcgccggggggtgggcaaggcgagtgcattgggcttaggcgacggcgaggaagaggctcctccttcccggagcgatccagatggaggagacagcccgttgcctgcctctggtggtcctctgacatgcaaggtgtgtggaaaaagctgcgactctcctctgaatttgaagactcacttccggacccacggaatggcatttatccgggcccgccagggcgcagtaggagacaactag

SEQ ID NO: 141578 - DNA, 3312 bp, synthetic construct
  misc_feature 1..3312: note = Description of Artificial Sequence: Synthetic coding sequence
  source 1..3312: mol_type = other DNA
atgggagatatgaaaactcctgattttgacgacctccttgctgctttcgacatccccgatatcgacgccaacgaagcaattcactcaggtcctgaggagaatgagggccccggcggcccgggcaaacccgaacctggggtcggtagtgaatccgaagacactgccgccgcctcagccggagacggtccaggcgtgcctgcacaagccagcgaccacggtctgccccctcctgacataagtgttgtgagtgtcattgtgaaaaatacagtgtgtcccgagcagagcgaagccctggctggaggatccgccggcgatggagcgcaggccgcgggtgtgacaaaggaaggtcctgtgggaccacaccgtatgcagaatgggtttggctcccccgagccttccctaccaggcaccccccacagtccagcaccgccatccggaggaacatggaaagaaaaagggatggagggaaaaacccccttagacttatttgctcattttggtcctgagccaggagatcactcagatcctctgcccccatccgcccctagccctacacgggagggagccctgacaccaccccctttcccctcttcctttgagctggcacaagagaacggacctggcatgcagccgccagtcagctctccaccacttggggctctgaagcaggagagctgttcccctcatcacccccaagtgctggcccagcagggcagcggcagcagcccaaaggcgacagacataccagccagtgctagcccaccccctgtcgcgggagttccatttttcaaacaaagccctggccatcagtcaccccttgcttcacccaaggtgcctgtctgtcagccactgaaagaggaggatgacgatgaaggtccggtcgacaagagcagtccaggctccccacagagccccagttctggtgcagaggccgccgatgaggactcgaatgacagtcccgccagcagcagctccagacccctgaaggtgcgcatcaaaacgatcaaaaccagctgtggaaacatcacaagaacagtcactcaagtgccctccgatcctgatccacccgcaccgttggcagagggcgccttcctggccgaggctagtctcttaaaactgagtcctgcaacccctacatccgagggccccaaggtggtgagtgtccaactgggagacggcacaagattgaagggaaccgtcctaccggtggccactatccaaaacgccagcacagccatgctcatggccgctagcgtggcccggaaagcagtcgtgctcccaggtggcaccgctacgagtccaaaaatgattgcaaagaatgtgctgggactcgtaccacaggcactaccaaaggcagacggcagggcgggtcttggcactggaggtcagaaagttaacggggcttcagtcgtgatggtacagccatccaagaccgccacaggccctagcacaggcgggggaacggtaatatcccgaacccagagctctctagttgaagccttcaataagattctgaacagcaagaatctgctgcctgcttatcggcctaacctgtctccccctgccgaagctggactggccttgcccccaactggctatagatgtcttgaatgtggcgatgcctttagcctggagaagagcctggcaagacattacgacaggagatcaatgcgcatcgaagtcacatgcaaccactgtgcccggcggcttgttttctttaataaatgctccttactgttgcacgcgagggaacacaaggacaaaggtctagtgatgcagtgtagtcacctggtaatgcgtccagtagccttggaccagatggtgggtcagcccgatatcacgcctcttctccctgtagccgttcctcccgtttctggccctctggccctgccagcacttggaaagggcgaaggcgccattacaagcagcgcgatcaccaccgttgcagcagaagccccagtgctgccactgtctacggagccacctgcggctcccgccacatctgcctacacttgttttagatgcctagagtgcaaggaacagtgccgcgacaaggccgggatggcggcccatttccagcagctcggcccccccgcacctggcgccactagtaacgtttgtcctacctgcccaatgatgcttccaaacaggtgctccttctccgcacatcagagaatgcacaagaaccgtccgcctcatgtttgtcctgaatgtggtggcaactttttgcaggccaatttccaaacccacctaagagaggcttgtctgcatgttagtaggcgggtgggatataggtgtccatcttgtagtgtggtgttcggcggagtcaatagtattaagagtcacattcagacatcccactgtgaggtcttccataagtgtcccatctgcccaatggcatttaagtctggcccaagtgctcatgctcatctgtactctcagcacccatcatttcagacccagcaagccaaactcatctacaagtgtgctatgtgtgacacggtttttactcataaacctctgctcagtagtcattttgatcagcatctcctgccacagagagtgtctgtcttcaaatgcccctcctgtcccctgctttttgctcagaaaagaacaatgttggagcacctaaaaaacactcatcagagcggtcggctggaggaaaccgctgggaaaggagctgggggagcactgctaacccctaaaactgaacctgaggagctagccgtgtctcagggcggggcagcacctgcgactgaagagtccagtagttcgtcggaggaagaggaggttccgtcatctccagagccaccccggccagctaagcgaccaaggcgtgagctgggaagcaagggcctgaagggaggtgggggtggacctgggggttggacctgtggactgtgccactcctggtttccagaacgcgatgagtatgtggcacacatgaagaaagaacatgggaaaagtgtgaaaaaattcccttgccgactctgtgagcgttcattctgctccgctccctccctacggaggcacgtgagagtgaaccatgaagggatcaaacgcgtatacccatgccggtccaaaggcccaggactacgcgcagtgcccttgctcccctcctgccctcttcccttccaggtgcttcatagaggtaaaacacacctgcagcaaccaccagatccccgagaaacctgtccgggaccggctcgtctggccgcctgggggccggtgccatggccaggggaccacctcggaagtgggttccaatgccagtcccccggggccaggtccgaaacccccccggtgttctag

SEQ ID NO: 141579 - DNA, 2121 bp, synthetic construct
  misc_feature 1..2121: note = Description of Artificial Sequence: Synthetic coding sequence
  source 1..2121: mol_type = other DNA
tgaaccgtactaccggtggcgaccatccagaatgccagtacagcaatgttgatggccgccagtgtggcacggaaagccgtcgtgttgcctggcggaaccgcaactagccctaagatgatcgctaaaaacgtgttagggctagtcccccaagccctccctaaggccgacggacgggcgggccttggtacgggcgggcaaaaggtaaacggggcatccgtagttatggtccagccttctaagaccgcaacaggacccagcactggaggaggaacagtcattagccgaacccaaagttcactcgttgaagcattcaataagatactgaatagtaaaaaccttctgcccgcctatcgccctaatctaagtccacctgccgaggcaggactggcactgccccccacaggctatcgttgtctcgagtgcggcgacgcgttttccctggaaaaatccctggcacgtcattatgatcgaaggtctatgagaatcgaggtgacttgcaatcactgcgctagacggcttgtgttctttaacaaatgtagcctgctcctgcacgcccgagagcacaaggacaagggcctcgtgatgcagtgctcccacttggtgatgagacccgtggctctcgaccagatggtaggacaacctgatatcactccactgctgcccgtggctgtgcctccagtaagtggacccttggcacttcctgctcttgggaaaggggaaggggccatcacaagttcagccatcactaccgttgctgcggaggcacccgtcctacctcttagcacggagcccccagctgctccggctaccagtgcttatacgtgtttcagatgtctggagtgtaaagaacagtgtagagacaaggctggaatggcagcccatttccagcagttaggaccccctgccccaggcgcaacttccaatgtctgcccaacatgccctatgatgctacctaacagatgctctttctccgcccaccagcgcatgcacaaaaacagacctccccacgtgtgtcccgagtgcggcggaaatttcctgcaggccaattttcagacccatctccgcgaggcttgcctgcacgtctctaggcgggttgggtataggtgtccgtcgtgttccgttgtgtttgggggggtcaacagcataaaatcccatatccaaacatcccactgcgaggtattccacaagtgtcccatttgtcctatggcctttaagagcggcccttccgcacatgcacatctctacagccagcatccgtcattccaaacacagcaggcgaagttaatatataagtgcgcaatgtgtgacacggtgttcacacacaaacccctgctttcaagtcactttgatcagcacctcctacctcagagggtttcagtttttaaatgtccctcatgccccctgttgttcgcacagaaacgcaccatgttagagcatctcaagaatactcaccagagcggaagactcgaggagaccgctggcaaaggcgcgggtggggctctgcttacgccaaagactgaacccgaagaacttgccgtcagccaagggggcgccgccccagcgactgaggagagctcatccagcagcgaagaggaggaggtacccagtagtcctgagccccccaggccagccaaacgccctcgccgggagctcgggtcgaaaggcttgaaaggcggcgggggagggccaggagggtggacatgtggtctctgccatagttggttcccagagagagacgagtatgtggctcatatgaaaaaggaacacgggaaaagcgtgaaaaaatttccctgtcggctttgtgagagaagcttttgcagtgctccctcacttaggagacacgtgcgggtgaatcatgagggaattaaacgcgtgtacccatgtcgatctaaggggccaggcctgcgagccgtgccgctgctaccgtcgtgtccgctcccctttcaggttcttcatcgtggaaagacacatctgcagcagccacccgatcctcgcgaaacctgcccagggccggcccgactagccgcatgggggcctgtgccatggccgggcgatcatctgggctcaggcttccagtgccagagtcctggcgccagaagcgagacacctcccgtcttttag

SEQ ID NO: 141580 - DNA, 450 bp, synthetic construct
  misc_feature 1..450: note = Description of Artificial Sequence: Synthetic coding sequence
  source 1..450: mol_type = other DNA
atgccctgctgtagccacaggcggtgcagagaggatcccggtactagcgaaagtcaagaaatggaggagtgggccctcctggatatctctcagcgaaaactgtacaaggaggtcatgctggagacgttccggaatctcacgtccgtcggtaaaagctggaaagatcagaacattgagtacgaatatcagaatccccggcgaaactttcggtcccttattgaaaagaaagtcaacgagattaaagatgactcccactgcggtgaaactttcactcaagtgccagatgaccggcttaattttcaggagaagaaggcgtcacccgaaattaaatcttgtgactctttcgtttgtggtgaggtaggccttggcaactctagtttcaatatgaacatccgcggcgacattggacataaggcttatgaataccaggaatatggccctaagccatag

SEQ ID NO: 141581 - DNA, 1701 bp, synthetic construct
  misc_feature 1..1701: note = Description of Artificial Sequence: Synthetic coding sequence
  source 1..1701: mol_type = other DNA
atgccttgctgttcccaccgacgatgcagagaagaccctgggacttctgagagccaggaaatggacccagtcgcctttgatgatgttgctgttaatttcactcaagaggagtgggccctgttagatatctcccaacgcaaactgtacaaggaggtgatgctggagaccttcagaaatcttacttcagtgggaaagtcttggaaggatcagaatatcgagtacgagtatcagaacccacggcgcaacttcaggtccctgatagagaaaaaagtcaacgaaataaaggatgacagccattgcggtgagaccttcacacaggtgcctgacgaccgtctcaactttcaggagaagaaggcaagcccggagataaaatcctgcgattccttcgtgtgtggcgaggtgggtctggggaatagttctttcaatatgaatatacgcggggatataggccacaaagcctatgagtatcaggagtacgggccgaagccatgcaaatgccaacagcctaaaaaagcattccgctatcatccatcgttccggacccctcagcgggatcacaccggcgagaaaccttacgcttgcaaggagtgtggtaagacgtttatcagccactcgagtatccaaagacatgtagtaatgcattccggagacgggccctataaatgtaagttctgcgggaaggctttccactgcctttcactgtacctgatccacgaacggattcacacgggtgagaaaccatacgaatgtaagcagtgcggcaaatccttttcctacagcgctaccctacgtattcacgagcggacccataccggcgagaaaccctacgaatgtcaacaatgtggcaaagcgttccatagccctaggtgttacagacggcacgagcgcatccatactggggaaaaagcataccagtgtaaggagtgcggaaaggcattcacctgtcctcagtacgtgcgcatacatgaacgaactcacagtcggaaaaagccttatgaatgcacacagtgtggaaaggcactgtccagcctcacctctttccaaacgcatattcgaatgcacagcggggagagaccgtatgagtgtaaaatctgcggaaaggggttctgttccgcaaactccttccagcgccacgaaaagacacacagtggagaaaagccatacaagtgcaagcaatgtggcaaagcgtttatacacagctccagccttcgttatcatgagaggatccatactggtgagaaaccgtatgagtgtaagcagtgcggcaaggcgttccgcagttcctcgcacttgcagttgcacggacgaacacacacaggcgaaaagccctatgagtgccaagaatgcgggaaagctttccgctcaatgaaaaacctccagagtcacgagcgcacccagacacatgtgaggattcatagcggtgagaggccatacaagtgcaaattgtgcggcaagggtttctattgccccaaaagcctacagcgacacgaaaagacacataccggtgaaaaattatatgagtgtaagcagtgcggagaggccttttcttcgtcttccagtttccgctatcacgaacgcactcacacaggtgagaaaccatacaagtgcaagcagtgcggcaaggccttccgagctgcatccgttttaaggatgcacggccgcactcaccctgaagacaagccgtacgaatgtaaacagtag

SEQ ID NO: 141582 - DNA, 2061 bp, synthetic construct
  misc_feature 1..2061: note = Description of Artificial Sequence: Synthetic coding sequence
  source 1..2061: mol_type = other DNA
atggaagtggttacttttggcgacgtggccgtgcattttagcagagaggagtggcagtgcctggaccctggccaacgcgccctgtatcgggaggttatgctggagaaccatagcagcgttgctgggctggcagggtttctcgttttcaagcctgagcttatcagccgcctagagcagggggaagagccttgggtgttagatctgcagggcgccgaggggaccgaggcgccccgtacttccaagacagacagtacaattcgtacagagaacgaacaggcctgtgaggacatggatattttaaaaagtgagtcttacggaacggtagtgcgaatctctccccaggacttccctcagaatcccgggtttggggacgtatcagacagcgaggtttggcttgattctcacctcggcagtcccggtctaaaagtgacggggttcactttccagaataactgcttgaatgaggagacggtggtgccaaagactttcaccaaggacgcccctcaaggctgtaaggagctcggtagctcaggactggattgccagcctcttgagagtcagggtgaaagcgcagaaggaatgtcgcaacgctgtgaagagtgtgggaaagggatccgcgccacctccgacatcgctttgcattgggagatcaatacgcagaaaatctcaagatgccaagaatgtcagaaaaagcttagcgactgcttgcaaggtaagcatacaaataactgccacggtgagaaaccttatgaatgcgccgagtgcgggaaggttttcagactctgctcccagctgaaccagcatcaacgcatccatacaggcgaaaagccttttaaatgtacagaatgcgggaaagcttttcgactgtcttctaagctcatccagcaccagcgaatccataccggagaaaaaccctaccgctgtgaagagtgcggcaaggcattcggacaatcttcaagtcttattcaccaccaacgaattcacaccggggagcggccctacggctgtagagaatgtggcaaagcctttagccagcaaagtcagttggtccgccatcagcgaacccacaccggagagaggccttacccctgtaaagaatgcggaaaagcattcagccagagctcaacattagcccagcaccagcgtatgcatactggcgagaaggcacagattcttaaggcctccgattcgcccagtctcgtggcccaccagaggatccacgcggtcgagaagccctttaaatgcgacgaatgtggcaaggctttcagatggatttcccgcctctcacagcatcaactgattcacactggggagaaaccttataaatgcaataagtgtacgaaggccttcggctgctcttcacgtctgatcagacaccaacggacacacactggcgagaaaccctttaagtgtgatgagtgtggaaaagggttcgtgcaaggcagccacctgatccagcaccagcgcatacatacgggggagaagccatacgtatgtaacgactgtggaaaagccttcagtcagtcttcatctcttatctaccaccagaggatacacaaaggcgagaaaccttacgagtgtctgcaatgcgggaaagcattcagcatgtccacccagctgaccatccatcagagagtgcacacgggggaacgaccatacaaatgcaacgaatgcgggaaggccttcagtcaaaacagtacactgtttcagcaccaaattattcacgctggcgtcaagccatacgagtgctctgaatgtggtaaggctttcagtcggagctcttacctgattgagcatcagcggatccatactcgagctcagtggttctatgagtatggtaatgctctggagggttctacgttcgtttctcgcaagaaggtgaacaccataaagaagctgcatcagtgtgaagattgcgaaaaaatctttcggtggcgatctcacctaattattcaccaacgtatccatacgggtgagaaaccttataagtgtaacgattgcgggaaggcattcaatagaagtagtcggttaacacaacaccagaagatccatatgggctag

SEQ ID NO: 141583 - DNA, 2094 bp, synthetic construct
  misc_feature 1..2094: note = Description of Artificial Sequence: Synthetic coding sequence
  source 1..2094: mol_type = other DNA
atgggcttcctgggctgctggtgtgtctcatttcaggaggtcgtgacattcggagatgtggctgtgcacttctcccgggaggagtggcaatgcctagatccggggcaacgtgctctgtatcgtgaggtcatgcttgaaaatcattccagtgttgccgggttggccgggttcctcgtgtttaaaccagagttaatcagtcgattggagcagggggaagaaccctgggttctggacctgcaaggggccgaaggtaccgaagcgccacgcacctcaaaaactgatagtacgatacgcacggaaaatgagcaggcatgcgaagacatggacatcctgaaatctgaaagctacggtaccgtggtccgcatctctccacaggattttccacaaaatcctggcttcggagatgtgtctgatagtgaggtgtggctggactcccacctggggtcaccagggctgaaggtcacaggctttacatttcaaaacaattgcctaaatgaggagaccgtggtccctaaaacatttaccaaggacgccccccagggatgcaaggagttaggcagtagcgggctggactgccagcccctggaatcccagggcgagtcggccgagggcatgagtcaacgatgtgaagagtgtggtaagggcatcagagcaactagtgacatcgcattacattgggaaatcaacacccaaaagattagcagatgccaggagtgtcagaaaaaactatcagattgcttgcagggcaagcacaccaataattgtcacggcgagaaaccgtacgaatgcgccgagtgtgggaaagtctttagactatgctcccaattgaaccagcaccagaggattcacaccggcgagaagcccttcaagtgcaccgagtgtggaaaagcgtttcgactcagctccaagctgatccaacatcagcgcattcatacaggtgagaagccgtaccgatgcgaagagtgtgggaaggcatttggtcagagtagctcccttatccatcaccagaggatacacactggcgagcgaccatacgggtgcagagaatgcgggaaggccttttctcaacagtcccaactagtgcggcatcaacggacccacacaggggagcggccctatccctgcaaggagtgcggaaaggcctttagtcagtcatcaaccttggcacagcaccagcggatgcatacaggcgaaaaggctcagatactgaaagcatccgattctccaagtttagtggcccaccagagaattcacgctgtggagaaacctttcaaatgcgacgaatgtggaaaggccttccgatggattagtcgattgtctcagcatcagctgatccacaccggcgagaagccctacaaatgtaacaagtgcacgaaggcgttcggttgcagctcaaggcttatcagacaccagcgtacccataccggtgagaaaccattcaaatgcgacgagtgcggaaagggttttgtgcagggtagccatcttatccagcaccagcgtatacacacaggcgaaaaaccatacgtatgtaacgattgtggcaaggccttctcgcagtcctctagtctgatttatcaccaaagaatccataaaggggagaaaccgtatgagtgcctccagtgcggtaaggcctttagcatgtccacacagctgactatccaccagcgggtgcacaccggcgaaaggccatataagtgtaacgagtgtggaaaagccttctcacagaatagcaccctctttcaacaccagatcattcacgcaggcgtgaagccttacgagtgctctgaatgcggcaaagccttctcacgaagctcatacttaatcgaacatcagagaatccatacaagggcccagtggttttacgaatacggcaacgccctcgaggggtctacttttgttagccgcaagaaggtaaatactatcaagaagctgcaccagtgcgaagattgtgagaagatcttcaggtggcggtctcacctgataattcaccaacgcatccataccggggaaaagccctataaatgtaatgactgtggcaaggctttcaacaggagcagtagactgacacagcaccagaaaatccatatggggtag

SEQ ID NO: 141584 - DNA, 447 bp, synthetic construct
  misc_feature 1..447: note = Description of Artificial Sequence: Synthetic coding sequence
  source 1..447: mol_type = other DNA
atggaagttgttacttttggcgacgtggcagtgcatttcagccgtgaagaatggcagtgtcttgacccagggcagcgggcactctaccgggaagtgatgctggaaaaccacagttccgtcgctggcttagctgggtttctggtgtttaagccggagctgatctccaggctagagcagggcgaggagccctgggtcttggacctgcaaggcgccgaaggtacagaggcaccccgcactagcaaaactggcttcttagggcgaccgaccatgggtcaggaaccgaggcacccacacgctccccctgccacacccgtccccggcttgcccaaacattgctctcaacggctcacgcttcctccacccggtctcagctcctcccctctgggtcactttctggttcacgatcaggacagaagacggggaacctcggcaatatggatggtttag

SEQ ID NO: 141585 - DNA, 2061 bp, synthetic construct
  misc_feature 1..2061: note = Description of Artificial Sequence: Synthetic coding sequence
  source 1..2061: mol_type = other DNA
atggaagttgtgacattcggcgacgtcgccgtgcatttttccagggaagaatggcagtgtctggatccaggccagagggctctctaccgggaggtgatgctagagaatcattcttctgttgccggcctcgccggattcctagtgtttaaacccgaactgatttctagattggaacagggagaggagccttgggttctggatctgcagggagctgaaggcacagaagcgccccgaacatcgaagacagacagtaccattcgtacagaaaatgaacaggcctgcgaagacatggacatcctgaaaagcgaatcatatggaaccgtggtgagaatcagcccacaggattttcctcagaaccccggatttggggatgtgagtgattctgaggtctggcttgactcccacttgggcagtccagggctaaaggtgacgggattcacctttcagaacaattgtctcaatgaagagacagtcgtacctaaaactttcaccaaagatgctccacagggctgtaaagagctaggcagtagcggattggattgccagcctttagagtctcagggcgaatcagcggaaggcatgtctcaaagatgcgaggagtgtggaaaagggatcagggccacctcggatattgcactgcattgggagatcaacacccagaaaatctctcggtgccaggaatgccaaaagaaactgtcagattgtctgcaagggaagcatactaataattgccatggcgagaaaccctacgagtgcgctgaatgcggaaaggtgtttagactttgcagtcagctcaaccaacatcagagaatacacaccggcgaaaaaccatttaagtgtacggaatgcggtaaggccttccgtttgagctcaaagctcatacagcatcagagaatccacaccggggaaaagccctataggtgtgaagagtgcgggaaagcctttgggcagtcctcttccctgatccaccatcaacggatacacacaggtgagaggccttatggttgtagggagtgtggtaaggccttctcacagcagagccagttagtgaggcatcagaggacccacactggagagcgaccctacccctgtaaagagtgtggcaaagcattcagccagtcctctactttagcacagcaccagagaatgcacacgggcgaaaaggcccagattttgaaagcatcagactcaccgagcctggtggctcatcaacgcatccatgccgtggagaagccttttaagtgtgacgaatgcggcaaggcctttcggtggatttcccgtttgtctcagcatcaactcatccataccggagagaagccctataagtgcaacaaatgcaccaaggcttttgggtgctctagccggctgatccgacaccagagaacccataccggcgagaagccatttaaatgtgatgaatgtggcaaggggttcgtgcagggatcccatctcattcagcaccagcgtatccacactggggagaagccttatgtgtgtaatgactgcgggaaggcattcagccagtcctcaagtctcatataccaccagcgaattcacaagggagagaagccatacgaatgtctccagtgtggcaaggcatttagcatgagtacacagctcactatccatcagagagtacacacgggagaacgcccatacaagtgcaatgagtgtgggaaggcatttagtcagaacagtacattgttccagcatcagatcattcacgctggggtgaagccctacgagtgcagcgagtgtggcaaggccttcagtcggtcctcctaccttattgaacatcaacggatccacacccgggcccagtggttttatgagtacggaaacgccctcgagggctccacgttcgtaagcagaaaaaaagtcaacacgataaagaagctgcaccagtgtgaggactgcgaaaagatctttaggtggaggtctcatctgattatccaccagagaatccataccggagaaaagccctataagtgcaatgactgcggcaaagcctttaatcgtagctccaggctgacccagcatcagaagattcacatgggctag

SEQ ID NO: 141586 - DNA, 1773 bp, synthetic construct
  misc_feature 1..1773: note = Description of Artificial Sequence: Synthetic coding sequence
  source 1..1773: mol_type = other DNA
atggacatcttgaagagtgagagttatgggaccgtagtgcgcatctctccacaggactttccccagaacccaggattcggcgacgtgtctgactctgaggtctggctcgatagtcatctcggcagccccggcctgaaagtaaccgggtttaccttccagaacaactgcctgaatgaggagacagtggtgcctaagacctttacaaaagatgctccacaaggatgcaaggaactcggctccagtggactcgactgccaacctcttgaatcacagggcgagtccgccgaaggaatgtcccagagatgtgaggagtgcggaaaaggaatacgggccaccagtgatatcgcactccactgggaaattaacactcagaagatctctaggtgtcaggaatgtcaaaaaaaattgtctgactgcctgcagggcaaacacacgaataattgtcatggggaaaaaccatacgagtgtgccgagtgtggaaaggtgtttaggctttgctcccaactaaaccagcaccagagaattcataccggcgagaagccatttaagtgcaccgagtgtgggaaagctttccgtctttcgtctaaactgattcagcatcagcgaatccatacaggcgaaaagccatacagatgcgaggagtgtggcaaagcctttgggcaatcatctagtctaatacaccatcaaagaatccacacgggggaaagaccttatggatgcagggagtgtggaaaggcgttctcccaacagagtcagctcgtgcggcaccagcgaacacatacgggtgaacggccctatccgtgcaaagaatgcggaaaagctttctctcaatccagcacactggcgcagcaccagaggatgcacaccggtgaaaaggcccagatcttgaaggcaagtgattccccaagcctggtggcccaccagagaatccacgccgtggaaaagccctttaaatgtgacgagtgtggcaaagcgtttcgctggataagccgtcttagtcagcaccaactgattcacaccggtgaaaagccctataagtgtaacaaatgcaccaaggccttcggctgttcttcacggctcatccgacaccagagaacccacacgggcgaaaaacctttcaagtgcgacgaatgtggtaagggatttgtgcagggatctcatttaattcagcaccaaaggatacacacaggagaaaagccgtatgtgtgtaacgattgtggtaaggctttctctcagtcaagttcactgatttaccatcaacggatacacaagggggagaagccttacgagtgtctgcagtgcgggaaagcttttagcatgagtacacaacttaccattcaccagcgcgtgcatactggtgaaagaccatacaagtgtaacgagtgtgggaaggcctttagccaaaattccacactttttcagcaccagattattcatgctggggtgaagccttacgagtgctctgagtgcggaaaagcttttagtaggtcctcatacctgattgaacatcaaagaatccatacccgggcacagtggttctatgaatacggaaatgcgctggaggggagtacatttgtcagcagaaaaaaggtgaatacgataaagaaactgcaccagtgtgaagattgcgaaaagatctttagatggcgatcccaccttatcattcaccagcgtattcacaccggcgaaaagccatacaaatgcaacgattgcggcaaggcattcaaccgttccagtagattaacacagcaccaaaagatccacatgggctag

SEQ ID NO: 141587 - DNA, 1470 bp, synthetic construct
  misc_feature 1..1470: note = Description of Artificial Sequence: Synthetic coding sequence
  source 1..1470: mol_type = other DNA
atgaaggagctcgaccccaaaaacgacatttcagaggacaaacttagtgtagtgggggaggcaaccgggggtccgaccagaaacggagcaagggggccaggcagcgagggggtctgggaacccggcagttggcccgaacgcccgagaggcgacgctggcgccgagtgggagccacttgggatcccgcaaggcaacaagttgctgggcggttccgtgcccgcttgtcacgaactcaaggcgttcgcgaatcaagggtgtgtgctcgtaccaccaaggctcgatgacccaactgaaaagggggcctgcccgcccgtgagaagaggaaaaaacttttcttccacctctgatttgtcaaaaccccctatgccttgcgaggagaaaaagacgtacgattgttccgagtgtggaaaggccttttctaggtcaagcagtctgataaagcatcagcgcattcatactggcgagaaaccttttgagtgtgacacctgcggtaaacatttcatagaacgatccagtttaacgatccaccagagagtgcacacaggggaaaagccctacgcctgcggggactgcggaaaggccttcagtcaacggatgaatttgacagtgcaccaaagaacacacaccggtgagaagccttacgtgtgcgacgtatgtggcaaagcattccgaaagaccagctccctgacccaacacgagcgtatccacaccggcgagaagccctatgcctgtggcgactgcggcaaggcgttttctcagaatatgcatctgattgtacaccagagaacgcatacaggcgagaaaccttacgtttgccccgaatgcggccgggccttttcccagaatatgcacctgacagaacaccaacgtacgcacactggggaaaaaccatacgcctgtaaggaatgcgggaaagcattcaataagagctcctcgctgactctgcatcagaggaatcataccggggaaaaaccgtacgtctgcggtgaatgtggaaaggccttctcgcagagttcttacctgattcagcatcagagattccacatcggcgttaaaccatttgaatgtagtgagtgcggcaaggctttctcaaaaaattcaagcttgacacagcaccagaggatccatacaggtgagaagccatatgaatgttatatctgcaagaaacactttaccggcagaagcagcttgattgtccaccagatcgtccataccggcgaaaaaccatatgtgtgtggggagtgtggcaaggcgttctcccagagcgcctacctgattgaacatcagcggatccacacgggcgagaaaccctacagatgcggtcagtgtggcaagtcatttatcaagaatagcagcctgacggttcaccagagaattcacactggcgagaaaccctataggtgtggcgagtgcggaaagactttcagccgaaacaccaacttaacacgtcacctgagaatccacacctag

SEQ ID NO: 141588 - DNA, 2286 bp, synthetic construct
  misc_feature 1..2286: note = Description of Artificial Sequence: Synthetic coding sequence
  source 1..2286: mol_type = other DNA
atggattctgggggcgggagcctgggactacacacccccgacagccgcatggctcataccatgatcatgcaggactttgtggctggtatggcgggaacagctcatatagacggggaccatatcgtcgtttcggtgcctgaagcggtgctggtatccgacgtggtgacagatgatggaattaccctggaccatgggctggcagcagaagtcgtacacggccccgatatcatcactgagacggacgtcgtgactgaaggtgttattgtccccgaggctgtgctggaggcggatgtcgccatcgaggaggatctggaggaagatgacggagatcacatcttgaccagtgagctgattacagagacagtgagggtgcctgaacaggtcttcgtggctgatctcgtgacaggccctaatggccacctcgaacatgtcgtgcaagactgcgtgagtggggtcgattcgcccacaatggtgtccgaagaagtactcgtcacaaacagtgacaccgagaccgttatccaggctgctggtggagtcccgggcagtaccgttactattaaaaccgaggacgatgacgatgacgatgtcaagtcaactagcgaggattacttaatgatcagcctcgatgatgttggcgagaagctggagcacatgggtaacacacctctgaaaataggcagcgatggttcccaagaagatgcaaaggaggacgggttcgggtccgaggtcatcaaggtgtacatctttaaggccgaagccgaggatgatgtagaaatcggaggaaccgaaattgtcaccgaatctgagtatacttccgggcactccgtggcgggtgtactggatcaatcaagaatgcaacgagagaaaatggtgtatatggctgtaaaggatagcagtcaggaagaggacgacattcgcgacgaacgccgggtttcaagaaggtacgaagactgtcaagcaagcggtaatactcttgatagcgcattggagagtcgctcaagtaccgctgctcagtacctccagatatgcgatggcatcaacaccaacaaggttctcaagcagaaggctaagaagcgtaggcggggtgaaacacgacaatggcagacggctgtgatcattgggccagatgggcagccattaaccgtttatccatgtcacatatgtacaaaaaagttcaaatctagggggttcctgaagcgacatatgaaaaatcaccctgaccacctgatgagaaagaagtaccagtgtactgattgtgacttcaccacaaacaaaaaagttagctttcacaatcatctggagtcacataaactgattaataaggtcgataagacccacgagttcacagaatacacgaggcgctatagggaagcttcacccttatcttctaacaagctgatcctgcgggacaaagaaccaaagatgcataagtgtaagtattgcgactacgaaacagctgaacagggattattgaatcgccaccttcttgcagtacatagcaagaatttccctcacgtctgtgtcgaatgcggcaagggatttcgtcatccaagcgagttgaaaaagcacatgcggacgcacaccggcgagaaaccataccaatgtcagtactgtatcttcagatgtgctgatcagagtaatttgaagacccacataaagtcaaagcacggaaataacctaccctacaagtgtgagcattgcccacaagcattcggcgatgaacgagagctccagcggcaccttgaccttttccaggggcacaaaacccaccagtgccctcactgcgatcataaatcaacaaacagcagcgacctgaaaaggcacatcatcagcgtacatacgaaagactttcctcacaagtgcgaagtctgcgacaagggtttccaccggccttccgaactgaaaaaacactcagatatacacaaaggcagaaaaatacaccagtgccgccactgcgatttcaagacttccgacccttttatcctgtcgggccacatattgagtgtgcacaccaaggaccaacccctgaaatgtaaaaggtgcaaacgaggtttcaggcagcaaaacgagttgaaaaaacacatgaagactcatacagggaggaagatttaccagtgtgaatactgtgaatactcaaccacagacgcgtctgggttcaagcggcacgtcataagtatacacacaaaggattatccccatcgctgtgagttttgcaagaagggctttcggagaccttcagaaaagaaccagcacatcatgcgacaccacaaagaggccctaatgtag

SEQ ID NO: 141589 - DNA, 2286 bp, synthetic construct
  misc_feature 1..2286: note = Description of Artificial Sequence: Synthetic coding sequence
  source 1..2286: mol_type = other DNA
atggactccggtggaggatcgcttggcttacacacaccggactcgagaatggctcataccatgattatgcaggactttgtcgcagggatggccggtaccgcgcacatcgatggtgaccacatcgtcgtatccgtgcccgaagcagtattagtgtctgatgttgtcaccgatgacggaatcaccctggaccacgggctcgcagcagaggttgtgcacggccccgatatcatcaccgaaacagacgtcgttacagagggcgtcattgtccccgaagcagtgctcgaagccgatgtcgcgatcgaggaggatctggaggaggatgatggcgatcacattctgacctcagagctcattaccgagaccgtgagagtaccagagcaagtgtttgttgctgatctagtgactgggccgaacggtcacctggagcatgttgtgcaagattgcgtgagtggcgtcgacagccctacaatggtctctgaggaggtcctagttaccaattctgatactgaaaccgtgatccaggcggctggtggcgtgcccgggtctaccgtcacgatcaagacagaagacgacgatgatgacgatgtgaaatccaccagtgaggattatctcatgatctccctcgatgacgtgggcgaaaagctggagcatatgggcaatacaccattaaagatcggctctgacggctcacaagaggacgctaaagaagacggctttggatccgaggtgataaaggtgtacatttttaaggcagaggccgaagatgacgtagagatcggtggaaccgagattgtcacagagtctgagtacacgtctggccatagcgtggctggcgtccttgaccagtctaggatgcagagagagaaaatggtatatatggcagtcaaggattcctcacaggaggaggacgatatccgggacgagaggagggtcagccgaagatacgaagattgccaggcatccggcaatactctcgatagcgcactcgagtcacgctcttcaacagctgctcagtatctccaaatctgtgacggcatcaatacaaacaaggtgcttaaacagaaggcaaagaaaagaaggcggggagaaactcggcagtggcaaacggctgtgatcattggcccagacggacaaccgctcaccgtgtatccctgtcatatctgcaccaagaaattcaaatccaggggcttcctgaagaggcatatgaaaaatcaccccgaccacctgatgcgcaagaagtatcagtgcactgattgcgacttcacaaccaataagaaggtgtccttccataaccacttggagtcacacaaactgataaacaaggtagacaagacgcatgagtttaccgaatatacccggagatacagagaggcctctcctctgtcatcgaataaactaattttgagggacaaagagcccaaaatgcacaagtgtaagtactgtgattatgaaacagccgagcagggcctgttgaacaggcacctgctagccgtgcacagtaaaaactttcctcatgtgtgcgtggaatgcggcaagggttttcgacatcctagtgagctgaaaaaacacatgagaacacacaccggtgagaaaccttatcagtgtcaatactgtatttttcggtgcgctgaccagtcgaacctcaagacccatataaagagcaaacacgggaataacctgccttataaatgcgaacattgtccacaagcttttggggacgaacgagaactacaaaggcatctagatttgttccagggacataagacacaccagtgcccgcactgcgaccataagagcactaattctagtgacttaaagaggcatataatttccgttcatactaaggactttccccacaagtgcgaagtgtgtgacaaggggtttcatcgaccatcagaactcaagaaacacagcgacatccataaaggaagaaagatacatcagtgtcggcactgcgattttaagacttccgaccccttcatcttgagcggacacattctctcggtacatactaaagatcaaccgcttaagtgcaagcgatgcaagagaggatttaggcaacagaacgagctcaaaaagcacatgaagacccacactggccgcaagatctatcagtgcgagtattgcgaatatagcacaaccgacgcctccggcttcaagcggcatgtcatctctatacacacaaaggattaccctcatcgatgtgagttctgcaaaaagggctttaggcggccgagcgagaaaaaccagcatattatgcggcatcacaaagaagcccttatgtag

SEQ ID NO: 141590 - DNA, 2310 bp, synthetic construct
  misc_feature 1..2310: note = Description of Artificial Sequence: Synthetic coding sequence
  source 1..2310: mol_type = other DNA
atgcaagactttgtggctggcatggctggaaccgctcacattgatggagaccatatcgtggtgtccgttcctgaagcagtgttggtgagcgacgtagtgacagacgatggaattactttggatcatggcctggcagccgaggtcgtgcatggccctgatatcatcacggaaactgatgttgtgacagagggagtcatcgtcccagaggctgttcttgaagcggacgtggcgattgaggaggacctggaagaggatgatggggaccacattttgactagcgaactgatcactgagactgttcgggtgcctgagcaagtgtttgtcgccgacttagtaaccggccctaacggacatctggaacatgtggtgcaggattgcgtaagcggcgtggactcccccaccatggtgagcgaagaggtgttggtcacaaatagcgacacagagacagtgattcaggcggcaggcggggtccccggatctaccgtgacgattaagaccgaagacgatgatgatgatgacgttaaatcgactagcgaggactaccttatgatatctttagacgacgtgggcgaaaaactggaacacatgggcaacacacccctgaagattgggtctgatgggtcacaggaggatgcgaaagaggacgggttcggtagtgaggtcattaaagtgtatatctttaaagctgaggcggaggatgacgtcgaaatcggcggcaccgagatcgtaactgaatctgaatatacatctggccattctgtcgcaggagtcttagaccagagtagaatgcagcgcgaaaagatggtctatatggctgtaaaagatagtagccaggaagaggacgacattagctgtgcagagattgccgacgaggtctatatggaagtaattgtaggtgaagaagaggggaccagtttacccgagattcagctggaggactctgatgttaacaaaacggtggtccccgtggtctgggcagccgcttatggaaacactctggactccgccttagagagcagaagtagtacggccgctcagtacttgcaaatctgcgacggaatcaataccaacaaggtgcttaaacaaaaagctaagaagcgccgccgcggtgaaacaagacagtggcagacagctgtgattattgggcccgacggacagcccctgactgtctacccatgtcacatctgcacgaagaaattcaagagtcgcgggttccttaaacgacatatgaaaaatcatcccgatcacctaatgcgaaagaaatatcagtgcactgactgtgattttaccactaataaaaaggtctcattccacaatcacctggagtctcataaattaataaataaggtggataaaacccacgagtttaccgagtatacgcgccgctaccgggaggcatcacctctgtcgagcaataaattaatacttagggataaggaacctaaaatgcataagtgcaagtattgcgattatgaaaccgccgagcaggggctcctcaacagacatcttcttgctgtccattctaaaaactttcctcacgtatgcgtggaatgcggaaagggtttccgccacccaagtgagctgaagaagcacatgcgcactcataccggtgaaaagccctatcagtgtcagtattgcatcttccgatgtgctgatcagtctaacctcaaaacccatattaaatctaagcacggaaataatttgccctacaagtgtgagcattgcccccaagccttcggcgacgagcgggagctccaaaggcatctggatctgtttcaggggcataaaacccatcagtgcccgcactgtgaccacaagagcactaattctagcgacttaaagagacatatcatatccgtacacactaaggatttcccacacaagtgcgaggtatgcgacaagggatttcaccggccctctgaactgaagaaacactctgacatccacaaggggagaaaaattcatcagtgtaggcactgtgacttcaagacatctgatcccttcattcttagcggacacattctaagcgtgcacaccaaggatcagccactgaaatgtaagcggtgtaaaagggggtttagacagcagaacgaactcaaaaaacacatgaagacgcatacaggacgcaagatttatcagtgcgaatattgtgagtacagcacaactgatgcatccggcttcaagcgtcacgtgatcagcattcacactaaagattatccacatcgctgcgaattttgcaaaaaaggatttagaaggccctcagagaaaaaccagcacatcatgagacatcataaggaggctttgatgtag

SEQ ID NO: 141591 - DNA, 1812 bp, synthetic construct
  misc_feature 1..1812: note = Description of Artificial Sequence: Synthetic coding sequence
  source 1..1812: mol_type = other DNA
atgatcagtctggatgacgtgggcgagaaacttgaacacatgggaaatacacccctgaagatcggctcagatggaagccaagaggatgccaaagaggatggctttggctcagaagttattaaagtttatattttcaaggccgaggctgaggatgatgtcgagatcggaggaacagagattgtgacagaaagcgagtacacctccggtcactccgtcgccggagtgttagaccagtcgcggatgcagagggagaagatggtatacatggccgtgaaggattcttctcaggaagaggatgacatctcctgtgctgaaatagctgacgaagtctatatggaggtgatcgtgggggaggaggaaggaacatcgctgcccgagatccagcttgaagacagcgatgttaataaaacggtagtcccggtcgtgtgggccgcggcctacggagacgagaggagagtcagcagacggtacgaggactgtcaggcatccggcaacaccttggatagcgcattggagtcacggtcctccactgctgctcagtacctgcaaatctgcgatggcattaatactaataaggtccttaagcagaaagcgaagaagagaagacgcggagagactcggcagtggcagacggcagtcatcattggcccagatggccagccactcaccgtgtatccgtgtcacatttgcactaaaaagtttaaaagccggggcttcctcaaacggcatatgaagaaccaccccgaccatctaatgcgcaaaaagtaccaatgtaccgattgtgacttcacgaccaacaaaaaggtttcatttcacaatcatctagagtcccacaagctgattaataaggttgacaaaacgcacgaatttacggagtacactcgccggtacagagaggctagtcccctcagttccaacaagttgatcctgagggacaaggagccgaaaatgcataaatgtaaatactgcgactatgagactgccgagcagggcctactgaatcgacacctactggcggtccactctaagaatttccctcatgtctgcgtagaatgcgggaaggggtttaggcatcccagcgagctaaagaagcacatgcggacccacaccggcgagaaaccataccagtgtcagtattgtatcttcagatgcgccgaccagtccaatttgaaaactcatatcaagtcaaagcacggcaataaccttccatataagtgcgaacactgcccacaagcttttggcgacgagagggagttacagcgacacctggacctctttcaaggccacaagactcaccaatgcccacactgtgatcataagtccacaaattcttctgacctcaagcggcacattattagcgtgcacacaaaggatttcccccataaatgtgaggtttgcgacaagggattccatcgccctagcgagcttaagaaacacagcgatattcataagggcaggaagatccaccagtgtcgacattgcgactttaaaacaagcgaccctttcatcttgagtggccacatcctctcggtgcacactaaggatcaacctttaaaatgcaagcggtgcaagcgtggctttaggcaacagaatgagctgaaaaagcacatgaagacacacacaggcaggaaaatttaccagtgtgagtactgtgagtacagcacaactgatgcgtctgggttcaaacgccacgttataagtattcacaccaaggattatccacatcggtgtgaattttgtaaaaaaggcttccgacggccgtctgagaagaatcagcacattatgcgacaccacaaagaggctctgatgtag

SEQ ID NO: 141592 - DNA, 1611 bp, synthetic construct
  misc_feature 1..1611: note = Description of Artificial Sequence: Synthetic coding sequence
  source 1..1611: mol_type = other DNA
atgggccctcttcagttccgggatgtagccatcgagttctcattagaggaatggcactgcttggacaccgcccaacgaaatctatacagaaacgtaatgctggagaactaccggaacctcgtttttctgggcattgttgtctccaagcccgatctgataacctgcctggaacaaggaaagaaaccccttaccatgaaaaaacatgaaatggttgccaacccaagtgtaacatgctcacactttgctagggacctctggccagaacagtccattaaagattcattccagaaagtgactctgaggagatacgaaaattacggacacgataacctacaattcaagaaggggtgtgaaagtgtagatgagtgtaaggtccacaagcgagggtacaatggcctaaatcagtacctcaccacaacccagagcaagatctttcagtgcgataagtatgtcaaggtgatccacaagttctctaactcaaacaggcacaaaattagacatactgggaagaaacctttcaagtgtattgagtgcggaaaggccttcaatcagagtagcaccctgaccacccataagaagattcatacaggcgagaaaccttttaaatgtgaagagtgtggcaaagccttcaattggagctctcatctgaccacacacaaaaggatccatacaggtgagaagcgatacaagtgcgaggactgcggaaaagctttcagcagatttagctacctcactgctcacaaaatcatacacagcggcgagaaaccttataaatgcgaggagtgcggtaaagctttcaaaaggtcctcgaatctgacaacacataaaattatccatactggggagaaaccatataagtgtgaagaatgcggcaaagcatttaagcggagtagcatcttaacagcccataaaataatccacagtggagaaaaaccttacaaatgcgaggagtgtggtaaagcgttcaagcacccttctgtgctcacgacacataaaagaatccacacgggagagaagccatataagtgcgaggagtgcggccgggccttcaagtacttcagttcactgacaacccacaagataattcactctggcgagaaaccttataagtgcgaagaatgtggaaaagcatttaattggtcctcccaccttaccacccacaaaagaatccacaccggggaaaagccgtataaatgcgaggagtgcggggaagctttcaagtacagctcaagcctgacaacccacaagattatccatactgggcagcagcctttcaagtgtgaggagtgtggcaaggcatttaaatgcttctctattttgaccacacacaagcgcattcatacaggtgagaagccctataagtgcgaagagtgcgggaaagccttcaatagttcttcgcacctcaccgcccacaagaggatccacaccggggagaaaccgtacaaatgcgagcgttgcggcaaggcatttaaacggagctttatcctcacacgtcataagcggatacacactggcgagaagccctacaaatgcgaggagtgcggtaaaggcttcaagtgtccatccacactgactacacataaagttatccataccggagaaaagttgtag

SEQ ID NO: 141593 - DNA, 1935 bp, synthetic construct
  misc_feature 1..1935: note = Description of Artificial Sequence: Synthetic coding sequence
  source 1..1935: mol_type = other DNA
atggagattcccgcacctgaacctgagaagaccgccctgtctagtcaagacccagccctgtccttgaaggaaaacctcgaggatatatctggttgggggttgcccgaagcaaggagcaaggaatccgtgagcttcaaagatgtagcggtcgatttcacgcaggaagaatggggacaactcgacagtccacaaagagctctgtacagggacgtgatgctggagaattaccagaacctgctggcgctcggcccccccctgcacaaaccagacgtcatctcacatcttgaacgcggggaagagccctggagcatgcagagagaagttcctcggggtccatgcccggagtgggagctaaaggcggtaccttcccagcagcagggtatctgcaaagaggaaccagcacaggaacctataatggagcgccccctgggcggggcccaggcttgggggagacaagctggcgctctgcagcggtctcaagctgctccctgggctccagcaccggcaatggtttgggacgtgcccgtggaggaatttccactgcgttgcccactgtttgcccagcagagggtgcccgagggggggcccctgctggatacccgaaaaaacgtgcaggctactgaggggcgtactaaagcacccgccaggttgtgcgcaggtgagaacgccagcacaccatccgaacccgaaaaattccctcaagtgaggagacaacgtggagccggtgccggagaaggggagttcgtgtgcggtgagtgtggaaaagcgttcagacagtccagcagtttgacccttcaccgacggtggcacagtcgcgagaaagcatataagtgtgatgagtgcggtaaagcctttacctggtccactaaccttttagagcaccgacggattcacactggcgagaagccatttttctgtggagaatgcggcaaagcgttttcctgtcactcatcattaaacgtacatcaaagaattcatacaggcgagcggccatacaaatgcagcgcttgcgaaaaggcatttagttgctcctcactgctgtcgatgcacttgcgggtgcatactggcgaaaagccctatcgatgcggcgagtgtggcaaggccttcaaccaacgaacgcatctgacacggcaccaccgcatccatacaggggagaagccttaccaatgtggctcttgcgggaaggcttttacatgccatagctccctcacggtccacgaaaagattcatagcggagataagcccttcaagtgcagcgactgtgagaaggccttcaactcccgttctcggctgacccttcaccaacgtacacacacaggcgaaaagccatttaagtgcgccgactgcggcaaaggtttctcctgtcatgcatatctattggtgcacagaaggatacatagcggggagaagcctttcaagtgtaacgagtgtgggaaagcgttctcttcacacgcatatctaatcgtgcatcgcaggatccacaccggagaaaaaccattcgattgttcccagtgttggaaagcctttagctgtcactcctccttaattgtgcaccagaggatacacaccggcgagaaaccctacaagtgctctgagtgtggacgcgccttcagccaaaatcactgcctgataaaacaccagaaaatccactctggggagaaaagcttcaagtgtgagaagtgtggggaaatgttcaattggtcgtcacatctcaccgagcatcagaggctccatagtgaaggaaagccacttgctattcagtttaacaagcacctgctgagcacctattatgttcccggaagtcttctgggcgcgggggacgccgggctgagggacgttgaccctatcgatgccctcgacgtggccaaacttctctgtgtcgtacctcccagagccgggcggaacttctctctgggctctaaacccaggaattag

SEQ ID NO: 141594 - DNA, 1935 bp, synthetic construct
  misc_feature 1..1935: note = Description of Artificial Sequence: Synthetic coding sequence
  source 1..1935: mol_type = other DNA
atggagatccctgcccccgagccagagaaaactgccctgtcttctcaggacccagcactctcactgaaagaaaatctggaggacattagtggctgggggctgcctgaggctaggagtaaggaatccgtctcattcaaagatgtggcagtggactttacccaggaggagtggggacagctggactctccgcagagagcactttatcgcgacgttatgctggagaattatcagaacttattggctttagggcctccgctgcacaaaccagacgtgatcagccacctagagcgcggggaagaaccatggtccatgcaaagagaagttccccgaggtccttgcccagagtgggagctcaaggcagtgccctctcagcaacaggggatttgtaaggaggagcccgcccaggaaccgatcatggaacggcccttaggcggcgctcaggcctgggggcggcaggccggagccctccagcgctcccaagctgcaccctgggcccccgccccagccatggtgtgggatgtgccagttgaggagtttccattacgatgtcccctctttgcccagcagagggtgcccgaaggaggcccattactggatacacggaagaacgtgcaggctacagagggcagaacaaaggcccccgcacgactgtgcgctggggaaaacgcctccaccccctcagaaccagagaagttccctcaggtccgccggcagcgcggggcgggagccggtgagggtgagtttgtgtgcggcgagtgcggaaaggcatttcgtcagtctagctccctgaccctgcaccgtcggtggcactcccgggagaaggcatacaagtgtgacgagtgcggtaaggcctttacctggtccacaaatctgttggagcaccgccggattcacaccggcgagaagccattcttttgtggcgaatgcgggaaagcattcagctgtcactctagccttaacgtccaccagaggattcacacaggagaacgtccctacaagtgcagcgcctgtgaaaaagctttttcttgttcgtctctactctcgatgcacctgcgagtccataccggtgagaagccctataggtgcggcgaatgtggcaaagcgtttaatcaaagaacccacctgacccgacaccaccgcattcataccggggagaagccataccagtgtggttcttgtggcaaggcctttacatgtcacagtagtctcacagtgcacgaaaaaatccacagcggcgacaaaccattcaagtgctcagactgtgagaaggcttttaactcaagatccagactaactctgcaccagcgtacacacaccggcgaaaaacctttcaagtgcgctgactgtggaaagggattttcctgtcatgcgtatctgctggtccacagacgcattcattcaggagaaaaaccatttaagtgtaatgaatgtggcaaggcattttccagccacgcatacttaattgttcaccggcggatacacaccggcgaaaagccatttgattgtagccagtgttggaaggctttttcctgtcatagctctcttatcgtgcatcagcggatccacacaggggagaagccttataaatgttctgagtgtgggcgggcgtttagccagaaccattgcctgattaaacaccagaagattcatagtggtgagaagagctttaaatgcgagaagtgtggagagatgtttaattggagcagccatctgacggagcatcagcggttacactcagaaggaaaaccactcgcaatccagttcaataagcatctcctctcaacgtattatgtgcctggttccctactaggcgccggtgacgctggactgcgggatgtggatccaattgatgcactggatgtagcaaaacttttatgtgttgtgcctccccgtgcgggccgcaactttagcttaggctccaaaccccggaactag

SEQ ID NO: 141595 - DNA, 1839 bp, synthetic construct
  misc_feature 1..1839: note = Description of Artificial Sequence: Synthetic coding sequence
  source 1..1839: mol_type = other DNA
atggaaatccctgctcctgaacccgagaagaccgccctgagcagtcaggaccctgcactttccctgaaagagaacctggaggacatttccggatgggggctacccgaggccaggagcaaagaaagcgtcagtttcaaagacgtagctgtcgatttcactcaggaggagtggggacagctcgacagcccccagagggccctatatagagacgttatgttagagaattatcaaaatctgcttgccctagagtgggaactgaaggccgttccaagtcagcagcaggggatatgtaaagaagaaccagcacaggaaccaattatggagcgacccctaggcggagctcaggcatgggggcggcaagccggcgcattgcagcggtctcaagccgccccatgggccccagctccagctatggtctgggacgtccctgtggaggaattccccttgcggtgccccctgtttgcacagcaacgtgtcccggaaggtggtccgctgctggatactagaaaaaatgtgcaggccaccgaaggcagaaccaaagctcctgcgcgactgtgtgccggcgagaatgcatctacccccagcgagccggagaagtttccacaggtccgtcgtcagcgcggagccggtgccggggaaggggagtttgtctgcggcgaatgcggaaaggcatttagacagagctcgtctcttacgcttcacaggagatggcatagcagggagaaggcctacaagtgcgatgagtgcggcaaggcctttacatggtccacgaacctgctggaacatcgcagaatacacacgggcgaaaaacctttcttttgcggagagtgtggcaaagcattcagctgccactcctctttaaatgtccaccagaggattcataccggggaaaggccgtacaaatgcagcgcgtgcgagaaggccttttcatgtagctctttgttatctatgcacttgagagtgcacactggcgagaagccctatcggtgtggtgaatgcggcaaggcctttaatcagaggacacatctaacccgccaccaccgcatacataccggcgaaaaaccataccagtgcggttcctgtgggaaagcattcacctgtcactcttctcttacagtgcacgaaaagattcatagtggtgataaaccctttaagtgctccgattgtgagaaggcgttcaacagcaggagtaggctgactctgcatcagagaacacatactggcgagaagccttttaagtgcgcagactgcggaaaaggattttcatgccacgcttacctgcttgtacaccggcgaatacactcaggagagaaaccattcaagtgtaacgagtgcggaaaggccttctcctcccatgcctatctaatcgtgcataggcgcatccacaccggcgaaaagcccttcgactgtagccagtgctggaaagccttttcatgccattcctccctcatagtgcaccagcggattcacaccggggagaagccatacaaatgttcagaatgcggaagagcattcagccaaaaccattgccttatcaaacaccaaaagattcactcgggggaaaagtccttcaaatgtgaaaagtgtggcgaaatgtttaactggtcctcccacttgactgagcatcagaggctacattctgaaggtaagcctctggctatacaatttaacaaacacctgctgtcaacctactatgtgccaggatcactcctcggcgccggcgatgcgggcctaagggacgttgaccccattgacgctctcgacgttgccaagctgctgtgcgtggtgccccctagagccgggcggaatttctcactcggatccaagccacgaaattag

SEQ ID NO: 141596 - DNA, 210 bp, synthetic construct
  misc_feature 1..210: note = Description of Artificial Sequence: Synthetic coding sequence
  source 1..210: mol_type = other DNA
atggagatacccgcacccgagcccgagaagactgcactcagctctcaggacccggctctcagcttaaaagaaaatcttgaggacattagtggatggggactgccagaggcccggtccaaatctctggcccttgtgacacaagctggtgtgcaatggaggaacctcgggtcactccagcctcccccgttggggtttaaacagttcagctag

SEQ ID NO: 141597 - DNA, 1935 bp, synthetic construct
  misc_feature 1..1935: note = Description of Artificial Sequence: Synthetic coding sequence
  source 1..1935: mol_type = other DNA
atggctgaagccgtggccgcgcccatcagtccatggactatggcagcgacaatccaagccatggagaggaaaatcgagtcccaggccgcccggttgcttagtctggaaggtaggactgggatggccgagaaaaagttggccgactgtgaaaagacagctgtcgaatttggtaaccaattagagggcaagtgggccgtcctcggcactttgctgcaggaatacggtcttctgcagcggcgactggagaatgttgaaaacctcctgcgcaataggaatttttggatccttcgcttaccccccggaagtaagggcgagtctcctaaagagtggggcaagctcgaagactggcagaaggaactgtataagcatgtcatgcgtggaaactatgagaccctcgtttctttggattacgctatttcaaagcccgaggtactctctcagatcgaacaaggcaaggagccctgtaattggcggcgcccaggtcccaagattcctgatgtccctgttgacccttctccaggttcaggacctcctgtaccagcgcctgacctgctcatgcagattaagcaggagggcgaattgcaattgcaggagcaacaggcactgggcgtcgaagcttgggccgcaggccagccggatatcggcgaggagccttggggcctgagccaactggatagtggagccggcgacatcagcactgacgctacaagtggcgtacacagtaattttagcacaacaatccctcccacctcctggcagacagacctgccaccacaccatccaagttcagcttgctcggacggcacccttaagctgaacacagccgcttcaaccgaggacgtcaaaatcgtcatcaaaacagaggtccaggaggaggaagtcgtggccactccagtacatccaacagatctcgaagcccacggcacccttttcggccccggtcaagcgactcgtttcttcccttcacctgctcaggagggcgcatgggagtcccagggatcctcattcccctctcaggaccccgtgcttggcctgagagaaccggcccgcccagagagagatatgggagagctgagcccagccgtggcgcaagaggagactccgcccggtgattggctctttggaggagtgaggtggggctggaactttcgatgtaaacccccagtaggtctgaacccgcgcactgggccggaagggctgccttacagcagcccagataatggtgaagccatattggaccctagtcaggcgccgaggccttttaatgagccctgtaaatacccaggccgcacaaaaggctttggccataagccaggtctgaagaaacatcctgcggccccgccaggcggccggccgtttacatgcgccacctgtggtaagtcctttcaactccaagtttcgctatctgctcatcagaggtcctgtggggctcctgacgggagcgggcctggaaccggtggtggcggaagcggttcaggaggcggcggaggtggctccggcggaggctctgccagggatgggtctgcactgcgctgtggagagtgtggcaggtgcttcacccgtcccgctcatttgattagacataggatgctgcatactggagagcgaccctttccatgtaccgagtgcgagaagagattcactgagcgttctaagttaattgaccactataggacacacactggcgtaagaccgttcacatgcacagtctgtggcaaatccttcatcagaaaggaccatctcagaaagcaccaacgaaatcatgccgcaggagctaagactccggccagaggtcagcctctccccacccctcccgcacctcctgacccattcaagagcccagccagcaaaggccctctcgccagcactgatctggttaccgattggacatgtggactctctgtgttgggccccaccgatgggggcgatatgtag

SEQ ID NO: 141598 - DNA, 1938 bp, synthetic construct
  misc_feature 1..1938: note = Description of Artificial Sequence: Synthetic coding sequence
  source 1..1938: mol_type = other DNA
atggcagaggccgtggcagctccaatttccccatggaccatggctgccactatccaggctatggaaaggaaaatcgaatcacaagccgctcggctgctctctctggagggacgtacagggatggccgaaaaaaagctggccgattgcgagaagactgcagtggagttcggcaaccagcttgaggggaaatgggccgttctggggaccctcctgcaagaatacgggctcctgcaaaggagattggagaacgtagagaatctcctcaggaatcggaatttctggatccttcgccttccacccggatccaagggtgagtcaccgaaagagtgggggaaactcgaggactggcagaaggagctatataagcacgttatgcgagggaattacgagacactcgtgagtctggactacgcaatctccaagccagaagttcttagtcaaattgagcagggtaaggaaccatgcaattggagaaggccaggacctaagattccagacgtccctgtggaccccagtccaggttcaggcccacctgtgcctgctcctgacctgcttatgcagataaaacaggaaggagagctgcagctgcaagagcagcaggcactgggagttgaggcatgggccgcaggtcaacctgatattggtgaggaaccctggggattgagtcagctcgactccggggccggggatattagcacagacgccacttcaggcgttcacagcaatttcagtaccactattccacctactagttggcaaaccgatctccctccacatcacccatcatctgcatgtagcgacggcactctgaaactgaatactgccgcttccaccgaggcagatgtcaagatagtgatcaaaaccgaggtgcaggaggaggaggtcgtagctacacccgttcacccaaccgaccttgaggctcatggtacactttttggccccgggcaggccacaagattcttcccctctccagctcaggaaggtgcatgggaaagccagggtagttctttccccagtcaggatcccgtgctcggtctgagagaaccagctagacccgagcgggacatgggggagctgagccccgctgtggctcaggaggagacacccccaggagattggcttttcgggggagtgcgctggggatggaactttaggtgcaagcctccagtaggactcaaccctcgaacagggcctgagggactaccatatagctcccccgacaatggcgaagcgattctggaccccagccaggccccccgccctttcaatgagccttgcaaataccctgggcggacaaaaggatttgggcacaaaccagggttgaaaaaacaccctgctgcaccaccgggcgggcgacctttcacgtgtgccacttgtgggaagtctttccagcttcaggttagtctttctgctcaccagcgctcttgtggcgcccccgatggctctggtcctgggacagggggcgggggcagtgggagcggcgggggcggggggggcagtggcggcggatctgccagggacggttccgctctgaggtgcggcgagtgcggcaggtgtttcactcggcccgcacacctcattcggcacagaatgctgcatactggggaacgaccattcccctgtactgagtgcgagaagagattcaccgagagatcgaagctgatcgaccattacaggacacacaccggtgtaaggcccttcacctgcactgtgtgcgggaagagcttcataagaaaggatcacctgagaaagcaccaaaggaatcacgcagccggagctaagacccctgcccggggacagcccctcccaacaccacctgcgccgcctgacccctttaagtccccagctagcaaagggccactagcttcaaccgatctggtcactgattggacctgtgggctgtcagtacttggacctacagacggtggcgatatgtag

SEQ ID NO: 141599 - DNA, 2172 bp, synthetic construct
  misc_feature 1..2172: note = Description of Artificial Sequence: Synthetic coding sequence
  source 1..2172: mol_type = other DNA
atgtctctgctaaaagaacgaaagcctaagaaaccacattacatacctagacctccaggaaagccatttaaatacaaatgcttccagtgtccatttacgtgcaatgagaagtctcatctcttcaaccatatgaagtatggactttgtaaaaactcaatcactttagtctccgaacaggatcgggtaccgaaatgccccaagagcaactccctcgaccccaaacagactaatcagccagatgcaaccgcaaaacccgctagttctaaatccgtcgctaacggtttgtcggcttttgactctaagctgcagcacagctccgctagggaagacattaaggagaatttggagctgcaggccagagggacacaccggtgtctcggacagaaaccggcgctgcacagggcatcaccatgcaagtcacctgccccagaagccgctctgggcgctcagccagctttggaaggagccgctcgaccatctgcatttgtgcccgtgggggagcacagactgaaaggccctgataatgccgaagcccctgagacgctggccctgcataatcctacagcaaaggccgtgtccttccataccaagtctgcattccacactcccgggtacccttggaaagcaggaagtcccttcctacctccggagttccctcataaaatttctagcacgaagggacttggagcaatctcaccatacatgcatccaaccattccggagtacccaccccacttctatactgaacatggcctcgccaccatctattctccctatctgttggccggttcttctcctgagtgcgacgcccctctgctgtctgtatatggcacacaagaccctcgccacttcctgccacaccccggcccaatcccgaagcacctggccccatcccccgccacttacgaccactaccggttttttcagcagtacccctctaatttacctatcccatatgggttttacaggcctgaatcagcatttagctcctatggactccggctgccacctgtcacaggactcacgcgggaccagtcttcccacttgctggaggaggccacactcgtatatcccgccagcagcccttccaggctgaacccttccgaccccaaccggaagcatgtggaattcgagagcccaattcctgaggctaaagatagcagcaaggctggtcagagggatacagagggcagcaaaatgtccccacgcgctgggtctgccgccactgggtctcccggacgccccagtccaacagatttcatgcaaacttcccagacctgcgagggactatatgatcttagtaataaagccgcgtccagcgcgctaggccgcctgtaccctcctgaacagtccctgactgcgttccggccagttaagaagagtaccgagtgcctgcctgcacaagccgccgagactaccgccgaatcaccagtgagcctgaatgtcgtgaacggagaccccccagcaccgacggggtctgcttccctggtgagcgaggccgcaccctcctctcctgatgatagcagtgggatgggccctctgaacctctccaaaaaatcagaaatcaacctggcggcaactcatgagccaacttaccaggggagtccacaggcggaaactgcctccttcagtgaactgcaggacctgccattaaacctgtcagtgaaagacccgtgcaacacccaggcacctaggccagcctttcccggcagacctagggctgccgagcccgccgccgccgtgcctcagaagaccggcaccgagggaagcgaggacggcccctctcaccctgagacaaagcctggttccctagacggggatggcgcaccacccaccggacccggcgaggaagcacccgatgcttgtgccgtggactcaagtgaggaacagaaacagacggctgctgtcgcactgtgtcagcttgctgcctattccccaaggaacatacgggttggtgacggtgatgccgctgcgccggagcccgcctgcagacaggacacccccaccctctcttcaatggaatctcaggaggctcagtgtgaccttcggcctaaggggcaaaaaaggacgtccctccgtgacgctgggaagtcacagcagggcgccaagaaggccaagctccaagacaccgccagagtgttcaccctccggcgccgggccagagtctcgtag

SEQ ID NO: 141600 - DNA, 951 bp, synthetic construct
  misc_feature 1..951: note = Description of Artificial Sequence: Synthetic coding sequence
  source 1..951: mol_type = other DNA
atgtcacccagagccggttccgcagctacagggagtccaggccgaccatcccccactgacttcatgcagactagccagacatgtgaaggactttatgatctgtccaataaagccgcaagtagcgcgctaggtaggctgtacccccctgagcagtcactgacggctttccggcccgtaaagaagagcactgagtgtttgcccgctcaggcggccgagaccacagccgaaagtccagtatcgcttaacgtcgtaaacggcgatccgccggctcccacaggttccgcctccctggtgtcggaagcagccccttcctcacccgatgatagctccggaaaatccgagatcaacctcgcagctactcacgagcccacataccaggggtcgccccaggccgaaaccgcaagttttagcgaactgcaggatttacctctcaacttatcagtaaaggacccgtgcaatacacaggcaccgagacccgccttcccagggagacctagggccgctgaacccgcagctgcagtgcctcagaagaccggcaccgaggggagcgaagatgggcccagccaccccgaaaccaaaccaggtagcctggatggcgacggtgctcccccgacaggacctggggaggaggcaccagatgcctgtgctgtggatagtagcgaggaacaaaaacaaaccgccgccgtggccttgtgccagcttgccgcctattctcctcgaaacattagggtcggtgatggtgatgcagccgctccagaacctgcctgccggcaggacactcccaccctgtcaagtatggagagccaggaagcccaatgtgatttaagacccaaaggccagaagcgaacctcactgagagatgctggaaaatcacaacagggtgctaagaaagccaagctgcaggacacagcgagggtgtttactctgaggcgtagggctagagtcagctag

SEQ ID NO: 141601 - DNA, 891 bp, synthetic construct
  misc_feature 1..891: note = Description of Artificial Sequence: Synthetic coding sequence
  source 1..891: mol_type = other DNA
atgtacttcagccaggaagaatgggagctcctcgatcctacacagaaggcattgtacaatgacgtcatgcaagagaattacgagacagtcattagcctggctctattcgtgcttcctaaacccaaagtgatatcctgtctggagcagggcgaggaaccttgggttcaggtgagccctgagtttaaagactctgccgggaaatcccctactggattgaaactgaagaatgacactgaaaatcaccagcctgtctctctcagcgacctggagatccaggcatctgcaggcgtgatttcaaaaaaagcgaaagttaaggtgccacaaaaaactgccggcaaggagaaccacttcgatatgcacagggtgggcaagtggcaccaagactttccagtgaaaaaaaggaagaagctctcaacatggaagcaggaactgctgaagctgatggatagacataaaaaagactgcgccagagagaagccattcaaatgccaggaatgcggcaagacttttagagtctcttcggacttgatcaaacatcagcggattcacacggaagaaaagccctataaatgccagcagtgcgacaaacggttcagatggagctccgacctcaacaaacacctgacaacccatcaaggaatcaagccatacaagtgctcttggtgtgggaagagcttctcacagaatactaacctgcatactcatcagagaactcacaccggagagaagccgttcacctgtcatgagtgtggcaaaaagttttctcagaattcccatttgattaagcaccggaggacacatactggggagcagccctatacctgctctatttgtagacgaaatttcagtaggagatcatcactcctgagacatcagaagttgcatttatag

SEQ ID NO: 141602 - DNA, 891 bp, synthetic construct
  misc_feature 1..891: note = Description of Artificial Sequence: Synthetic coding sequence
  source 1..891: mol_type = other DNA
atgtatttcagccaggaggaatgggaattgcttgatcctacccagaaagccctctataacgacgtcatgcaagagaactacgagactgtaatatctttggcgctgttcgtgcttcccaagcctaaagtaatatcctgtctggagcaaggcgaggaaccctgggtccaggtctctccagagtttaaggacagcgccgggaagtcacccactgggctgaaactgaaaaatgacacagagaatcatcagcccgtttctttgtccgacctggaaatacaggcttccgccggcgtgatctcaaagaaagcaaaggttaaggtgccacaaaaaaccgccggcaaggagaaccactttgatatgcatcgggtagggaaatggcaccaggactttccagtgaagaagaggaagaaactttcgacatggaagcaagagctgctgaaactaatggacaggcacaaaaaagattgcgcccgagagaagccgtttaaatgccaagagtgtgggaagacattcagagtctcttccgacctaatcaagcaccaacgcatccatacagaagagaagccctacaagtgtcagcagtgcgataagagattcagatggtcttctgacctgaataagcacctcactacacaccaaggcattaagccctataagtgttcgtggtgtggtaaaagttttagtcagaacactaacttgcatacgcatcagcgaacccataccggggaaaagccatttacttgccatgagtgcggcaaaaaattctcccagaattcccacttgattaaacacagacgaacccacaccggcgaacagccatatacgtgcagcatctgtcgtcgaaacttttcccgtaggtccagcctgctgagacatcagaagttgcatctgtag

SEQ ID NO: 141603 - DNA, 1248 bp, synthetic construct
  misc_feature 1..1248: note = Description of Artificial Sequence: Synthetic coding sequence
  source 1..1248: mol_type = other DNA
atggccatgcgagaattaaacgccgatagctgcagttcgccccaaatgggggccatgtgggaaacatccgggtcggtcaaagagaattcctctcaatccaagaagtatagcaccaaaatcgagaaccttggtccggagtctgcatgcaggcatttctggtccttcaggtatcatgaggcaacaggcccgctggaaaccataagccagctgcaaaaactctgtcaccagtggttgcggccagaaattcattccaaggagcaaatactggagatgctggtgctagagcagtttctgagcattctgccgaaagaaacccagaactgggttcagaaacaccacccccagaacgtgaagcaggccctggtgcttgttgagttcttacaacgggagcccgacggcaccaagaacgagtccctcttaacgtttgaagatgtggctgtctacttctctgaagaggaatggcaattgctgaatccccttgagaagaccttgtacaacgatgtgatgcaggacatttacgagaccgtcatttccttgggcctgaagctgaagaatgacaccggcaatgatcaccctataagtgtgagtacgtctgagattcaaacgtcaggatgtgaggtctccaagaaaacacggatgaagattgcccagaagacaatgggcagagaaaatccaggagatacccattcagtgcagaaatggcacagagcctttccccgcaagaagcgcaagaaaccggcaacttgcaaacaggaactccccaagttaatggatctccatggcaaggggccgactggggaaaagccttttaaatgccaggagtgtggaaagtcatttcgcgtttcatcagacctgattaagcaccatcgaatccacacaggcgaaaaaccctacaaatgccagcagtgcgaccgtaggtttagatggagcagcgatctgaacaaacattttatgacccaccagggaattaagccatataggtgtagctggtgcggaaaatctttcagtcacaacaccaaccttcacacacaccagcgaatacacactggcgaaaaaccattcaaatgtgatgagtgcgggaaacgctttattcagaatagccacctgatcaaacatcaaagaacccatacaggagagcaaccctacacatgcagcctatgtaagaggaacttcagccggcggtcctcccttttgcgtcatcaaaaacttcatcgccgtcgcgaggcgtgtctggtgtctccgaattag

SEQ ID NO: 141604 - DNA, 1533 bp, synthetic construct
  misc_feature 1..1533: note = Description of Artificial Sequence: Synthetic coding sequence
  source 1..1533: mol_type = other DNA
atggccatgagggaactgaacgccgactcttgttccagtcctcaaatgggtgctatgtgggagacgagcggaagtgtgaaggagaattcctcccagtccaagaaatattccacaaagatcgaaaaccttggacccgaatctgcctgtcggcatttttggtcctttcggtaccacgaagctacagggcccctggagacaatcagccagctgcaaaagttgtgtcaccagtggcttcggcctgagatccattcaaaagagcagatactcgagatgctggttcttgaacaattcctgtccatcctgccgaaggaaactcagaattgggtccagaagcaccacccacaaaacgtcaaacaggcgctggttctcgtagagttccttcagcgagaaccagatggcactaaaaacgaggtcactgctcacgaactgggcaaggaagctgtcctgctaggcggcacggcagtggcaccgggtttcaagtggaaacccgctgagccccagccaatgggcgtgtttcagaaagagtactggaacacctatcgtgtgctccaggagcagctgggctggaatacccacaaggaaacccagcctgtgtacgaacgggccgtccatgaccaacagatgctcgctctgtctgaacagaagcggatcaagcactggaagatggcttccaagctcattctcccagaatcactcagcctgcttaccttcgaagatgtcgcagtgtacttctccgaggaggagtggcagctgttaaaccctctggaaaaaactctgtataatgatgtcatgcaagatatttatgaaaccgtgatctctctcggattaaaattgaaaaacgacacagggaacgaccatcccattagcgtgagcactagcgaaatccaaacctccggctgtgaggtatccaagaaaacaaggatgaagatcgctcagaagacgatgggacgcgaaaacccaggagatacccacagtgtgcagaaatggcatagggcatttccccgcaaaaaaagaaagaagcccgcaacatgtaagcaggaattgcccaagctgatggatctccatgggaagggtcccacgggtgaaaaacccttcaaatgtcaggagtgcggcaagagctttcgggtctcctccgatttgattaagcaccataggatccatacaggcgaaaagccttacaaatgtcagcagtgtgatcgcaggtttcgttggagctccgatctgaacaagcactttatgacccatcaaggaattaagccctaccgctgtagctggtgtggtaagtctttcagccataacacaaacctacatacacaccagcgcatccataccggggagaaaccgtttaagtgcgacgagtgcgggaagaggttcattcagaacagtcacctgataaagcaccagagaacccacaccggagaacaaccctatacttgttccctgtgtaagcggaacttctctcggcggtcttctttgttacggcaccagaaacttcatcggaggcgtgaagcctgcctggtgtcgcctaattag

SEQ ID NO: 141605 - DNA, 1548 bp, synthetic construct
  misc_feature 1..1548: note = Description of Artificial Sequence: Synthetic coding sequence
  source 1..1548: mol_type = other DNA
atggaaagcctgggcctgcatactgttacattgtctgacggaacaaccgcatacgttcagcaggccgttaagggcgagaaactgctggaaggccaagttatccagctagaagatgggaccacagcttatattcatcaagtaacagtgcagaaggaggccctttccttcgaggacgggcaacccgtccaattggaggacggttccatggcctacatccatcggaccccgagggagggttatgatccaagtacacttgaggccgtccagctcgaggacggaagcacggcctatatccatcatcccgtggccgtgcctagcgagagcacaattctcgccgtccaaactgaagtgggactggaagaccttgctgccgaagatgatgaagggttcagcgccgacgccgtggtggctcttgagcagtatgcttccaaggtgctgcacgattctcagattcctagaaatggtaaaggtcagcaggtgggagaccgagcctttcgatgtggctacaaagggtgtggccgattgtacaccacggcgcatcatttaaaggtccatgagagagcacacaccggagaccgaccgtaccggtgtgatttcccgagttgcggtaaggcattcgcgacagggtacggcctgaaaagtcatgtccgtacgcacaccggagagaagccttacaaatgcccagaagaattgtgttctaaggccttcaagacatcaggggacttgcaaaagcatgtgagaactcataccggcgagcgccctttccagtgcccgtttgagggctgtgggcggtccttcaccacctcgaacattcgcaaggttcacgtcagaactcacacgggagagaggccatacacctgtccagagcctcattgcgggcgagggttcacttctgctaccaactataaaaatcacgtgcggatccacacgggtgagaagccatatgtgtgcacagtgcctggctgcgggaagcggttcacagagtacagctccctttataaacaccatgtggtacacacacactgcaaaccatacacttgttccacttgcgggaagacataccggcaaacctctacactggccatgcataagcggtccgcccacggcgaactagaggccactgaagaaagcgagcaagcgctatatgaacagcagcagcttgaggctgcaagcgctgctgaggagagtccaccgccaaagagaccacggattgcttatttgtccgaggtgaaggaggagagggacgatatccccgcccaggttgccatggtgaccgaggaggacggcgcaccacaggtggctctgatcactcaagacggagcccagcaggtgacgatcataacctccggggctgtagttgcggaggacagctcggtggccagcctgagacatcagcaggttgcccttttggcgaccgcgaacggaactcacattgccgtgcagctggaggaacagcaaacactcgaagaggccattaatgtagcgacggctgccatgcagcaaggtgctgttaccctggaaacaacggtgtctgagagcggttgttag

SEQ ID NO: 141606 - DNA, 1713 bp, synthetic construct
  misc_feature 1..1713: note = Description of Artificial Sequence: Synthetic coding sequence
  source 1..1713: mol_type = other DNA
atggagtccctaggcctccatactgtgaccctttcagatggtacgacagcctacgtgcagcaggcggtgaaaggagaaaagctccttgaagggcaggtgattcagcttgaggacggcacgactgcgtatatccaccaggtcaccgtgcagaaggaggctctgagcttcgaggatggccagccagtgcagctcgaggacggtagtatggcctacatacatagaacccctagagagggatatgatccatcgacacttgaggccgttcagctcgaagacggctctacagcttatatccaccatcccgtcgccgttccctccgagagcacaatcctggccgtccaaaccgaggtaggcctagaagacctggccgcagaggacgatgagggattcagcgccgacgctgtggtggccctcgaacagtacgcatcaaaggtcctccatgattcacaaatccccaggaacgggaaggggcaacaggtcggggaccgcgcattccgctgtggctacaaagggtgcggacgcctctacacaaccgctcatcacttgaaagtacacgagcgcgcccacacgggcgatcgaccctataggtgcgacttcccatcgtgcggcaaggccttcgccacaggatacggcttgaaatcgcatgttcgtactcatactggggagaagccatataagtgtcccgaggagttatgcagcaaagctttcaaaacatctggcgatcttcaaaagcacgtgcggactcacacaggcgagcgccctttccagtgccctttcgaaggctgcgggcgatccttcactacaagcaatattaggaaggtgcacgtccggactcacactggcgaacggccttacacttgtcctgaacctcactgtggacgggggtttacctcagctaccaattataagaaccatgtgcgcattcataccggagagaagccgtatgtgtgtacagtccctgggtgtgggaagaggtttacagaatacagttcactctataagcaccacgttgtgcatacccactgtaaaccgtacacctgctccacctgcggaaagacttacaggcagacatctacattggccatgcacaagcgctccgcgcatggcgagctcgaggctactgaggaatctgaacaggctctctacgaacagcagcagctggaggccgccagcgccgccgaggagtccccccctcccaagagaccccgcatcgcatacctgagcgaggtcaaggaggagagggacgatattcctgctcaagtcgctatggtcacagaagaggatggggcacctcaagtggcgctgatcacccaggatggagcgcagcaggtgagcctcagcccggaagacctgcaggcccttggcagcgcaatttccatggttacgcagcacggaagtaccacattaaccatcccatctcctgatgccgaccttgcaacgtcaggaacccacaccgtcacgatggtgtctgcggatggaacccagactcagcctgtgacaattatcacaagtggcgccgtggttgcagaggattccagcgtcgcaagtttacgacaccagcaagtggctcttttagcaaccgctaacgggacccacatcgccgtgcagctggaagagcagcaaacattggaggaggccattaacgtcgcgacagccgcaatgcagcagggcgctgtaactttagaaaccaccgtgtccgagtcaggctgctag

SEQ ID NO: 141607 - DNA, 1287 bp, synthetic construct
  misc_feature 1..1287: note = Description of Artificial Sequence: Synthetic coding sequence
  source 1..1287: mol_type = other DNA
atggagtccctcggcctccatactgtgaccctgagcgacggaactacagcctacgtgcagcaggcggtgaagggcgaaaagctcctcgagggtcaggtgattcagctggaggacggaaccaccgcctatatccaccaagtgaccgttcagaaggaagcacttagcttcgaagacggtcagcccgtgcagctcgaggatggctccatggcttatatccaccgcactccaagggagggctatgacccatccactctggaggccgtccagctcgaggacggttcgactgcctacatccaccacccagttgctgttccttcagagtccacaatattagctgtgcagacggaagtggggcttgaggacttggccgctgaagacgacgaaggcttttcagccgatgcagtggtcgccctggaacaatacgcgagtaaagtgctacacgactcccagattccgagaaacggaaagggccaacaggttggtgatagagctttccggtgcggttataaagggtgtggccgactgtacacgacggcacaccatttgaaagtgcacgaaagggcgcataccggggatagaccataccggtgtgatttccccagctgcggtaaggcctttgccaccggatacgggcttaaatctcatgttaggacacacacaggggaaaagccctacaaatgtcctgaggagctttgctccaaagccttcaagacatccggtgacctacaaaaacacgtcagaactcacactggcgagaggccattccagtgcccatttgagggatgtgggcgttcctttacaaccagtaatattagaaaagtgcatgtgcggacccatactggggaaagaccctacacttgtcccgagcctcactgtggacgcgggttcaccagcgcaacaaattataaaaaccacgtgcgtatccacaccggggagaaaccttacgtgtgcactgtgcctggctgcggcaagaggtttaccgagtactcttcactgtacaagcatcacgttgtgcacacacattgcaagccttacacttgtagcacctgtggtaaaacatatagacaaacttcgactctcgcgatgcacaagcgaagtggtcactgtggtcacgcagccagagggtgcgatccgggggacaatagtgtaggcgagtggctgcttagccctcgagggctcggacctacgccctgctggagaaagtgccatctgcacggccacagttgtccccaaggcccgcgcctgtggttaactcacagaagatggccgcatcgctcacttggatag

SEQ ID NO: 141608 - DNA, 1635 bp, synthetic construct
  misc_feature 1..1635: note = Description of Artificial Sequence: Synthetic coding sequence
  source 1..1635: mol_type = other DNA
atggagtccttaggattgcacaccgtaactctgtccgacggaactaccgcctacgtgcagcaagcagttaaaggggagaaactgttggaggggcaggtcattcaactagaggatggcacaaccgcctacatacaccaagtcacggtgcagaaagagggatatgaccccagtacactggaggctgtgcaactagaagacggctctaccgcctatattcatcatcctgtggcagtacctagcgagtctacaatcttagccgttcagactgaggtggggctggaagacctggctgccgaggacgacgaaggctttagcgccgatgctgttgtggctctcgagcagtacgcgtctaaggtgttacatgactctcagatacctcgcaacggcaaaggtcagcaggttggagatagagcattcaggtgtggatacaaaggttgtggtcgtctttatacaacggcccaccatctaaaggtgcacgagcgggctcatactggggacagaccttacagatgtgattttccctcttgcggtaaggcgttcgcaacggggtacggccttaaaagccatgtacgtacccataccggggagaaaccctataaatgtccagaggagctctgtagtaaggcttttaaaacatcaggggatctgcagaagcatgtccgcacacataccggagaacggccttttcagtgtccgtttgaggggtgtgggcgaagtttcaccacctcaaatatcagaaaggtgcacgtgagaacccataccggcgaaaggccctacacttgccctgagccccactgcgggagaggcttcacatcagcgactaactataagaatcatgtgcgtatccatacgggagaaaagccctacgtgtgcactgtcccaggatgtgggaagcgtttcacagagtattccagcctatataagcaccatgtagttcacacccactgcaaaccctatacttgcagtacctgcggtaaaacatatcggcagacctcaaccctagctatgcataagcgtagtgcccatggagaactggaagccaccgaagagtcggaacaggcactttacgagcaacaacagctggaggccgccagcgcggcagaggaatcacccccacctaaaagaccccgtatagcgtatcttagtgaggtgaaggaggagcgggacgacatacccgctcaggtcgccatggtgactgaggaggatggagccccccaagtggctttaatcacccaggacggtgctcagcaggtcagcttgagccccgaggatctccaggccctgggctccgctatttccatggtgacccaacacggatctacaactttaacgatcccctccccagatgctgatttggctactagcgggacacacaccgtgacaatggtgtctgcggacggcacccagacacaacctgtgactataatcacctctggtgctgttgtcgcggaagatagcagtgttgcaagtctccgacatcaacaggttgctctgcttgccacagccaatggcacccatatcgccgtgcagcttgaggaacagcagaccctggaggaggctattaacgttgctacggccgcgatgcagcagggcgcagtgacattggaaaccacggtaagtgagagcgggtgctag

SEQ ID NO: 141609 - DNA, 1209 bp, synthetic construct
  misc_feature 1..1209: note = Description of Artificial Sequence: Synthetic coding sequence
  source 1..1209: mol_type = other DNA
atggaatctctcgggctccataccgttaccctgagcgacgggaccacagcatacgtgcagcaggccgttaagggagaaaagctgctggaggggcaagttattcagctggaagatggtaccacagcatatatccatcaggttaccgtgcaaaaggaggccctctccttcgaagacggccagcccgtgcagctggaggatggcagtatggcttatatccatcggacacctagggaaggatatgaccctagcacacttgaagcagtccagctggaagacggcagtacagcctacatccatcaccccgtcgcagtgccttctgagtctactattctcgctgttcagaccgaggtaggtctagaagatcttgccgcagaagatgacgaaggtttctctgctgacgcagtggtcgccttggaacagtatgcttccaaagtgctccacgactcccagatccccaggaatgggaaaggacagcaggtgggggatcgtgcgtttagatgcgggtacaaagggtgcggacggctgtatactaccgctcaccatctgaaagtacatgaacgcgctcacaccggggataggccataccggtgcgattttccttcctgtgggaaggcctttgccaccggctacgggctgaagagccacgtaagaacccacacaggggaaaagccctataaatgtccggaggaactctgttctaaggcattcaaaactagcggggatctgcagaaacacgtgcgcactcataccggcgagcggccctttcagtgcccattcgagggctgcggtaggtctttcacgacctccaacattcgaaaagtccacgtgcgaacacataccggtgaacgaccttatacttgccccgaaccccattgtggtagaggttttactagtgccaccaattacaagaaccatgtgcgtatacacactggagagaagccatatgtgtgcaccgtccctggatgtggtaagaggttcacagaatactcctccctctataagcatcatgtggttcacacccatcactgtgggcacgcagcaaggggctgcgaccctggcgataattcagttggcgaatggctcctctccccaaggggcttgggtccaactccatgctggcgaaagtgccacttacacgggcacagctgcccgcaaggcccacggctctggctgacacatcggcgatggcctcacaggtctcttggatag

SEQ ID NO: 141610 - DNA, 1023 bp, synthetic construct
  misc_feature 1..1023: note = Description of Artificial Sequence: Synthetic coding sequence
  source 1..1023: mol_type = other DNA
atggagtccctcggtctgcacacagtcaccctcagtgatgggactactgcatacgtccaacaggctgtcaagggggagaaactcctggaaggccaagtgattcaactggaggacggaaccacggcctatatccatcaggtgacggtgcaaaaggaagctctgtctttcgaagacgggcaacctgtgcagctggaggatgggagcatggcttatatacataggacaccccgggaagggtacgacccttccactcttgaggcggtacaactggaggacggtagtactgcctacattcaccatccggtcgctgtgcccagcgagagcacaattctggccgtccagacggaagtcggcctggaggacctcgccgctgaggacgacgaggggttcagcgctgacgcagtggtggccctcgagcagtatgcatctaaggtactacatgacagccagatccctagaaacggtaagggacaacaggtgggcgaccgcgccttccggtgcggatacaaaggttgtggaaggctgtataccactgcgcaccatttgaaggtacatgaaagggcccataccggcgatcgcccttaccgctgtgacttccccagctgcggtaaagccttcgcgaccggatacggcttgaagagccacgtgcggacccataccggcgaaaagccttataagtgcccagaggagctgtgctcaaaggcatttaagacctcgggagaccttcagaagcatgttcggactcacacgggagagaggccttttcagtgtccctttgagggctgtgggcgatcctttaccacctccaacattagaaaggtgcacgttcggactcacacaggtgaacgcccttatacgtgtccagagccacactgcggtcgcggattcacaagtgccactaactacaaaaaccatgttcgcatccatactggggaaaagccctacgtgtgtaccgtgcccggctgcggaaagagatttaccgagtattcaagcctttacaagcatcacgtggtccatacctag

SEQ ID NO: 141611 - DNA, 1638 bp, synthetic construct
  misc_feature 1..1638: note = Description of Artificial Sequence: Synthetic coding sequence
  source 1..1638: mol_type = other DNA
atggactgtgttatctttgaagaagtagccgtgaatttcacccccgaggagtgggccctgctggaccacgcacagagatctttgtatcgcgacgttatgctagagacttgtcggaacctcgcttcccttgattgctatatctacgtgagaacaagcggatccagttcccagcgagatgtgtttggaaacggtatcagcaacgacgaagagatcgttaagttcactggctctgatagttggagcatttttggggagaactggagatttgataacacgggagatcagcaccagattccacaaaggcacctccgcagtcaacttggccgactgtgcgagagcaacgaaggacaccagtgcggcgagacactgtcccagaccgccaacttgctggtgcacaagagctaccctaccgaggctaagccatccgagtgtacaaagtgcggtaaagcattcgagaatcggcaacgctcccacacaggccaacggccttgcaaagaatgtggacaagcgtgcagctgtttgtcctgccagagtccccccatgaagactcagaccgtggaaaaaccctgcaattgtcaggatagcaggacagccagcgtaacttacgtcaaaagcctttcttccaagaaatcgtacgagtgtcagaaatgcggcaaggcctttatttgtcccagttcattccgaggtcacgtcaattctcaccatggtcaaaagacccatgcctgcaaagtatgcggcaagacctttatgtactactcatacttaactcgacacgttcggacgcataccggcgaaaaaccatatgagtgcaaagagtgtggaaaagcctttagttgccctagttactttagagagcacgtgcgcactcatacaggcgaaaaaccatacgagtgcaaacattgcggcaagagcttcagctgctactccagcttccgcgaccacgttagaacccacacgggcgaaaaaccttgtcagtgtaagcattgtggtaaggccttcacctgctattcaagtttacgagagcatggccgtactcattccggcgaaaaaccctatgagtgcaaggagtgcggaaaggcttttcgctatccctcatccctacgcgcccacatgagaatgcacacgggcgaaaagccatacgtatgtaagcagtgcggaaaggccttcgggtgtccaacttacttccgaagacatgttaaaactcattccggtgtgaagccctaccagtgcaaggagtgcgggaaagcatactcattttctagtagcctgagaattcacgtgcgcactcatacaggagaaaaaccatttgaatgcaagcactgtggcaaggccttctcctgtcattcatctctgagagagcacgtgagaacccatagcggagagaaaccatacgagtgcaatcaatgtggcaaagccttctcccacgcccagtattttcagaagcacgtgagaagtcattccggggtgaaaccctacgagtgtaccgaatgtggcaaggcgtactcttgcagctccagtctgagggtgcatgtgcgtactcacactggagaacgtccatacgagtgcaagcagtgcggcaagacttttcggtatctggcctcgctgcaggctcatgtcagaacgcatgctggggcctag

SEQ ID NO: 141612 - DNA, 1308 bp, synthetic construct
  misc_feature 1..1308: note = Description of Artificial Sequence: Synthetic coding sequence
  source 1..1308: mol_type = other DNA
agactctgcgaatctaacgaaggccatcagtgtggagaaaccctctcccaaacggcaaatctgttggtccataagtcctaccccacagaggcaaaaccaagtgaatgcacaaaatgcgggaagacgtttatgtactattcttacttgacaagacacgtccgtactcatacaggcgagaagccatacgagtgcaaagaatgtggaaaggcttttagctgtccgagctactttcgcgaacatgtgcggacgcacacgggcgaaaaaccttacgagtgcaaacactgcggaaagagtttcagctgttactcctccttcagagaccatgttaggacacataccggcgaaaagccttgccaatgtaaacactgcggcaaagcttttacatgttactcctcactaagagaacatggcagaacccattctggagaaaagccctatgagtgcaaggaatgtggaaaggcatttagatatccctcatcgctgagagctcacatgagaatgcacaccggggagaagccctatgtgtgcaagcaatgtggaaaggctttcggctgtccaacgtattttcgaagacacgtgaagacgcacagcggcgtcaaaccttatcaatgtaaagagtgtggtaaagcttactccttctctagttctcttcgcatccacgtgcggacccacacaggagagaagccattcgaatgcaaacattgtggaaaggctttttcttgccactccagtctgagagaacacgtgcgtacgcatagtggcgaaaagccctatgagtgcaaccaatgcggcaaggctttctctcatgcgcagtatttccagaagcacgtgcgttcccattccggcgtcaagccttatgaatgtacagaatgtggaaaggcttattcatgctccagcagtctccgggtgcacgtgaggactcataccggagagcggccctatgaatgcaagcagtgcggaaagacttttagctggccttctgacctgcgggtgcatatgcgaacacactctggagagaaacggtgcggttgcaagcagtgtggtaagtctttctctagtcctagcagcttcaagggccacattaggacccacacaggggaaaagttgtacacctgccgtgaatgcggaaaagtcttttcttccccttcctattttcgcactcaggtgcgcatccacattggcgaaaagccctacgtttgtgagcagcgggggaaggtgttttcatggtcatcatcttttcgagggcatctgagaacccatagccgggagaaaccatatgagtgcaaagagtgcaccaaagcgttctag

SEQ ID NO: 141613 - DNA, 1497 bp, synthetic construct
  misc_feature 1..1497: note = Description of Artificial Sequence: Synthetic coding sequence
  source 1..1497: mol_type = other DNA
atgctggaagagggcgtgttgccctcccctggcccagctctgccccaggaggaaaacactggcgaggagggcatggccgcaggccttcttactgccggcccaaggggctctacttttttcagtagcgtgaccgtggcttttgctcaagagcggtggcgctgtctggtttctacacccagagaccgatttaaggaaggtatccccggcaaatcccgtagcttagtcttactcgggctgcccgtgagccagccaggcatgaactcccagctcgagcagagagagggagcgtggatgctcgagggtgaggatctgaggtcaccctctcctgggtggaagattatatccggctcaccacctgaacaggctctcagtgaggcatccttccaggacccgtgcgttgagatgccacctggtgattctgatcatggcacctcagacctggagaaatcattcaatctccgccctgtgcttagtcctcaacagagagtcccagttgaggccaggccgaggaagtgtgagacgcacactgaatcttttaaaaactcagagatccttaagcctcatagagctaagccctatgcctgtaatgagtgtggcaaggcattcagctattgtagttccctaagtcagcatcagaagtcgcataccggcgagaagccctacgaatgcagtgaatgcggaaaagctttttcacagtcatccagcctgatccagcaccaaagaatacacactggagaaaaaccctataaatgttccgagtgtggtagagccttctcccagaacgcaaaccttaccaagcatcagagaacccacactggtgaaaagccttaccgatgtagcgagtgtgagaaggcattcagtgactgctccgctttggtacagcaccaacggatccatactggtgagaagccttacgaatgttctgactgcggcaaagcctttagacactcagcaaaccttaccaaccaccagcgtactcatactggcgagaagccctacaagtgctcagaatgcggaaaggcctttagctattgcgctgcttttatccagcatcaacgcatacatactggggagaaaccatatcggtgcgcggcttgcggaaaggccttcagtcagtctgccaacctgactaaccaccagcgaacgcacactggagagaaaccatacaagtgttccgagtgcggaaaagctttttctcagagcaccaacctgatcattcaccaaaagacgcacactggggagaaaccatataagtgcaatgaatgcggaaaattttttagcgaatcctctgccctaattagacatcatattatccataccggcgagaaaccatacgaatgtaatgagtgtggtaaagcctttaaccagtcgtcaagtctgagtcagcatcagaggatacatacaggggtgaagccatacgagtgtagtgaatgcggcaaggcttttcgatgttcgagcgcctttgtgcggcaccagagactccacgctggagagtag

SEQ ID NO: 141614 - DNA, 1425 bp, synthetic construct
  misc_feature 1..1425: note = Description of Artificial Sequence: Synthetic coding sequence
  source 1..1425: mol_type = other DNA
atggctgccggtctgctgaccgccggtccgcgcggaagcacctttttttcctcggtgacagtcgccttcgcccaggaaaggtggagatgtctggtcagcaccccccgtgatagatttaaggaggggattccaggcaagagccgatccctcgtcctcctgggattgccggtatctcagcctggcatgaattcccagctcgaacagcgggaaggagcttggatgttggagggcgaagacctgcgctccccatcgcctggatggaagatcatctctggcagcccacccgagcaggcgttgtctgaggccagttttcaggacccttgtgttgagatgccaccaggggactccgatcacggcacctcagacctggagaaaagcttcaacctgcggccggtattgtcaccccagcagagggtgcctgtggaagcacgccctcggaaatgtgagacgcataccgagtcattcaaaaatagtgagatcctcaaacctcacagagccaagccatatgcctgcaacgaatgcggaaaggctttctcttattgctccagcctgagccagcatcagaagtcccacaccggggagaagccgtacgagtgcagcgaatgcggcaaggccttcagccaaagctccagcctgatccagcaccagagaatccacaccggcgagaagccctacaaatgctctgagtgtggtcgggctttcagccaaaacgcaaacttgacaaagcaccagagaacccatacaggagaaaaaccatacaggtgctccgaatgtgaaaaggcattcagcgattgctctgccttggtacagcaccaaaggatccacactggggaaaagccttatgagtgttccgattgtggcaaagcctttagacattcagctaatctcaccaatcaccagaggacccacacaggggagaagccctataaatgcagtgaatgcggaaaagcattctcttactgcgccgcctttatccagcatcagcggatccatactggggagaagccttatcgttgtgccgcatgcggtaaggccttcagccaaagcgccaacctaacaaatcatcagaggacccatacaggagagaagccatataaatgttccgagtgcggaaaggccttcagccagagcaccaatctgattatccaccagaaaacccacacgggcgagaagccttacaaatgcaatgaatgcggtaagttcttttccgaatcctccgcacttatcaggcatcacatcatacacacgggtgaaaagccgtatgagtgcaacgagtgcggaaaagcctttaaccagagcagttctctgagccagcatcaacgcatacataccggcgtgaagccgtacgaatgttcagaatgtggcaaagcattccgctgtagctctgcgtttgtacgccaccagcggctgcacgccggagaatag

SEQ ID NO: 141615 - DNA, 1728 bp, synthetic construct
  misc_feature 1..1728: note = Description of Artificial Sequence: Synthetic coding sequence
  source 1..1728: mol_type = other DNA
atggacccagaggatgaaggcgtcgctggggtgatgagcgtgggcccaccagccgccaggctgcaggagccagtgacattccgcgatgttgcggtggacttcacccaggaagagtggggacaactcgaccctacccagagaatcctctatcgcgacgtaatgctagagacttttggacacctactgtccataggccctgagctgccaaagcccgaagtcatcagccagctcgagcaaggtaccgaactctgggtggctgagagggggacgactcaaggctgccaccccgcttgggagcccaggtctgaatctcaggcctcccggaaagaggaaggtctcccggaagaagagcccagccacgttaccggccgggagggctttccaactgatgccccatacccaaccaccctggggaaggacagggagtgtcagtcccagtctttagctctgaaagagcagaataaccttaaacagcttgagtttggcctcaaggaagccccagtgcaggatcagggctacaagaccttgagattgagagagaattgcgttctcagttcctcaccaaatccgtttcctgaaatctcccgtggcgagtatctatacacatatgactcccagattactgactcagagcacaattcatccctcgtatctcagcagacgggatctcctggcaaacaaccaggcgaaaatagcgattgccaccgcgatagctcccaggctatccccattactgagctaacaaagtcccaggtgcaagataaaccttacaaatgcacagactgcgggaagagctttaaccacaacgcccacctgacagttcacaaacggatccacacaggagagagaccttatatgtgtaaagagtgcggaaaggccttttctcagaactcctctctggtccagcatgagcgtattcacactggggacaagccctataagtgtgccgaatgtggcaaaagtttctgtcacagcacacacctgacagtgcataggaggatccacacaggcgaaaagccttacgaatgtcaagattgtggccgggcctttaatcaaaatagctccctgggacgccataaaaggacccacacgggcgagaagccctacacgtgctccgtttgtggcaagagcttctcgagaaccacatgcctgtttctacatttaagaacccacacagaagagagaccctacgagtgcaatcactgcggaaagggcttcagacactccagctccctggcccagcaccagaggaagcatgccggcgagaagccattcgaatgcaggcagcggttaatattcgagcagacgccagccctcacgaaacatgagtggacggaggccctcggctgtgatcctcccttatcacaggatgagcggacccatcgctccgatagaccatttaagtgtaatcagtgcggaaagtgttttatacagtccagtcacctgatacggcaccagattacacacacgagggaagagcaaccccatgggagaagtcggcgccgtgaacaaagctccagccgtaattctcatttagtgcagcaccagcatcccaattctcgaaagagttctgccggcggggctaaggctggacaaccggagtcccgtgccctggctctcttcgacatacagaagattatgcaggaaaagaacccggtgcacgtgattggcgtggaggaaccgtccgtaggagcctccatgctgttcgatatacgggagtcaacctag

SEQ ID NO: 141616 - DNA, 519 bp, synthetic construct
  misc_feature 1..519: note = Description of Artificial Sequence: Synthetic coding sequence
  source 1..519: mol_type = other DNA
atggatccagaagatgaaggagtcgccggcgttatgagtgtgggcccacccgcagcgcggctgcaagtcacgattaccactattaccactgccgccggatctggacaggcctctcccgcccagacggaccccttcacatctagacgcgacgaaagtggtactgctgttaatgcgctcgacacttggggcaattctgatgcaggacgcggggtagtcaccgtgttagctggccagaggggggggcgcgacagtaatcaggccccaggtcctaggatgcggatgctgcacgccgccctctcatcaccagccccacgcagtccatgtcccggggcctgggctcaacctctaggtggcaacgacgggtccccacggactgagtgcgatgagagcgaccatcagggcagaccactgcgcgattgcgggcggactgccgtccaggggggacaatgtctccagggtcacctggcaataagggctccgctttcgcgtcagagcggctgcggtctgtgtagcccatag

SEQ ID NO: 141617 - DNA, 873 bp, synthetic construct
  misc_feature 1..873: note = Description of Artificial Sequence: Synthetic coding sequence
  source 1..873: mol_type = other DNA
atgtgcaaagagtgtggtaaggcctttagccagaattcttcactcgtgcagcacgaacggatccacactggcgacaaaccctataagtgtgccgagtgcggaaagtcattttgccacagcacgcacttgactgtgcataggaggatccacaccggcgagaagccatacgaatgtcaggattgtggcagagccttcaaccaaaactctagcttaggccgccacaagcgcacacacaccggtgaaaaaccatatacgtgcagtgtttgcggtaaatctttttctcgaaccacttgcctattcctgcatcttagaacccacaccgaggagcgcccatatgaatgtaaccattgtggcaaaggttttcgtcactcttctagtctagctcagcaccagcgcaaacacgccggggaaaagccgttcgaatgtaggcaacgcctgatctttgagcagacacccgcacttacgaagcacgagtggactgaggctctggggtgcgatcccccactttcccaagacgaaagaactcaccgatctgacagaccctttaaatgcaaccagtgtggaaaatgtttcatacaatcttcacacctgattcgccatcagatcactcacaccagggaggagcaaccacacggaaggagccgcaggcgtgaacaatctagttctcggaacagtcacctggtgcaacatcaacaccccaactccaggaagagcagcgccggaggcgccaaggccgggcaacctgaatcccgggctctggctctgttcgacatccaaaaaatcatgcaggagaagaacccggtccatgtcatcggagtggaggagccatccgtcggtgcctcaatgctgtttgacattagagaatctacttag

SEQ ID NO: 141618 - DNA, 822 bp, synthetic construct
  misc_feature 1..822: note = Description of Artificial Sequence: Synthetic coding sequence
  source 1..822: mol_type = other DNA
atgtcccccaagcgcgatgggctgggcacaggagatgggctacattctcaggtgttgcaggagcaagtgagcacgggcgataatctacatgagtgtgacagccagggcccaagtaaagacactttagtgcgcgaggggaagacgtacaagtgcaaagaatgtggctcagttttcaataaaaattccctcttagtcaggcatcagcagattcatactggcgttaagccttacgagtgtcaggagtgtgggaaggcattccccgaaaaggtggactttgtgaggcccatgaggatccatacgggagagaaaccttgcaaatgcgtcgaatgtggaaaagtgtttaatcggcgatcccaccttctctgctaccggcagattcacaccggtgaaaaaccatatgaatgtagcgaatgcggaaagacattctcttatcattcagtgtttatacagcatcgcgtcacacataccggagagaagctgtttgggtgcaaagagtgcgggaagactttctactataactctagcctgactaggcacatgaagatacatacaggggagaaaccctgtaagtgtagcgagtgcgggaaaaccttcacctaccggagcgtgttttttcggcactccatgactcacactgctggcaaaccctatgaatgcaaggagtgcggaaaggggttctattactcttactcgctgacgagacacaccagaagccataccggagaaaaaccctacgagtgcctggaacatcgcaaggactttggctatcactctgcctttgctcagcaatctaagatacattctggagggaagaatctctag

SEQ ID NO: 141619 - DNA, 822 bp, synthetic construct
  misc_feature 1..822: note = Description of Artificial Sequence: Synthetic coding sequence
  source 1..822: mol_type = other DNA
atgagcccgaaacgggatggcttagggacaggggatggcttgcattctcaagtgttgcaggagcaggtgtctacgggagataacctgcacgagtgtgactctcagggccccagcaaagacacactggttcgtgaaggaaagacctacaaatgtaaggagtgcgggagtgtgttcaataaaaattcccttctggtgaggcaccagcagattcatactggcgtgaagccttacgagtgccaggaatgcggcaaggcttttcctgaaaaagtagattttgtgcggcctatgcggattcacaccggagaaaagccctgcaaatgcgtagaatgtggcaaggtgtttaaccggagatcacatctactctgttaccgtcagatccataccggcgagaagccatacgagtgttccgagtgtgggaagaccttctcctaccactctgtgtttattcagcacagggtgacccacacgggggaaaagctctttggttgtaaggagtgtggcaaaacattttattacaattcttctctcacgagacacatgaagattcatactggtgaaaagccctgcaagtgttcagagtgcggtaaaaccttcacgtatcgctccgtgttctttcgtcacagcatgacgcacactgcaggaaaaccttatgagtgtaaagaatgtgggaaaggattttattacagctactctttgacaaggcacacaagatcacacacgggggaaaagccttacgagtgtctcgagcacaggaaggatttcggatatcacagcgctttcgcccagcaatccaagatacatagcggcgggaaaaatctgtag

SEQ ID NO: 141620 - DNA, 3630 bp, synthetic construct
  misc_feature 1..3630: note = Description of Artificial Sequence: Synthetic coding sequence
  source 1..3630: mol_type = other DNA
atggagtgctattacatcgttatatcatccactcatctgtccaacgggcacttccggaacattaagggcgtgtttagagggcctctgtctaagaacgggaacaagacactggattacgccgagaaagagaatacaatagccaaagccttggaagatctgaaggctaatttctactgtgagctctgtgacaaacagtactataaacatcaggagttcgacaatcatatcaattcttacgatcatgcccacaagcaacggctcaaggaactcaagcagcgcgagttcgcccggaatgtggcctctaaatcgcggaaagacgagcgcaagcaggagaaggccctgcagcgcctccataagctagctgagctgaggaaagaaaccgtgtgcgccccaggctctgggccaatgtttaagagcacgaccgtaacagttagggagaactgtaacgagatctcgcagagagttgtcgtcgacagcgtgaataatcagcaagattttaagtacactctgatccactctgaggaaaatacaaaggatgcaacaacagtcgctgaggatcccgagtctgccaacaactacacagcgaaaaataatcaagtgggggatcaggcacagggtatccaccggcacaaaattggttttagttttgccttccccaagaaagccagtgtcaaactggaatcatccgcagccgcattcagtgagtatagtgatgatgctagcgtggggaaggggttttcacggaagtcccgcttcgtgcccagcgcttgccatctgcagcagtcgagccctacagatgtgttattatcttccgaggaaaagaccaattcttttcatccccccgaagccatgtgcagagataaggagacggtgcaaacccaggagattaaggaagtgtcttccgagaaggatgcgctgcttctaccatccttctgcaaatttcaactccagttgagcagcgacgctgataattgccaaaactctgtgccactggccgaccagattcctctcgaaagcgtggttattaatgaagatattccagtctctggaaactctttcgaactgctgggaaacaagtccaccgtgctcgacatgagcaatgattgtatctcggttcaggccacaaccgaggaaaacgtcaagcataacgaggcctctaccaccgaggtggaaaacaaaaacggccccgaaactctggccccctctaataccgaagaagtgaacatcaccattcataaaaagaccaacttctgcaagagacaatgtgagcctttcgtgccagttttgaacaaacaccgatccactgttctccaatggccaagcgaaatgcttgtgtatactacaactaagccctccatttcttactcgtgtaatccactctgctttgattttaagtccacaaaggtcaataacaatcttgataaaaataagccagacttgaaggacctgtgttcccagcagaagcaggaagatatctgcatgggccccctgtcggactacaaagatgtgagtaccgaaggcctaactgactatgagatagggtcttctaagaacaagtgctcccaggtgactcctctcctagccgacgacatcctttcctctagttgtgacagcggtaaaaacgagaacactggtcaaaggtataaaaacatctcatgcaagataagagaaacagagaagtataactttactaagtctcagatcaaacaagacactctggatgagaagtataacaagattaggctcaaggagacccatgaatactggtttcacaagtcaagacgcaagaagaaaaggaagaaactgtgccagcaccaccatatggagaagacgaaggagtccgaaacccgctgcaagatggaggcagagaacagttatacggaaaatgccgggaaatatctgttggagcccatctcagagaagcagtatctggccgccgaacagctgttggattcacaccagctgctggataaaaggcccaaaagcgaaagtatttctctgagcgataacgaggaaatgtgtaaaacttggaatactgagtataacacttacgacacaattagctcaaagaaccactgtaaaaagaacaccatcctgttaaatggccagtcaaacgcaacgatgatccatagtgggaaacataatttaacttactcccggacttactgttgctggaaaactaagatgagctcatgctcccaagaccacaggtcactcgtgttgcaaaatgatatgaagcacatgtctcaaaatcaggccgtgaagcgcggatataacagtgttatgaacgaatcagagcggttttatcgtaagcggcgccaacattcgcattcttacagctccgacgagtcccttaacagacagaatcacttgccagaagaatttctacgccctccctctacttctgtcgctccgtgtaagcctaaaaagaagagacggagaaaaagagggcgtttccacccgggctttgagacattggaactcaaagagaacactgactacccagtgaaggacaactcatccctgaaccccttagatcgcctcatttccgaggataagaaagagaagatgaagccacaggaagttgcaaagatagaaagaaatagcgagcagacgaatcagttgcgcaacaaactttccttccatccaaataacctgctgccttccgaaactaatggcgaaacagaacacctggagatggagacgacatccggggaacttagtgacgtgagcaatgacccaacgacttccgtgtgtgtggcatccgctcccacgaaagaagccatagacaacactctcctggagcacaaggagaggagtgaaaacatcaatctgaatgaaaagcagatccccttccaggtgccaaatatagagaggaacttccggcagtctcagccaaagtcatatctgtgtcactacgaactggcagaggcccttccccaggggaagatgaacgagactcctacagagtggcttcgttacaatagtggtatcctgaatacgcagcctcccctgcccttcaaagaggctcatgtgagtgggcatacctttgtgactgcggagcagattcttgctcccctggctctgcccgagcaggccctgctgatcccactggaaaaccatgataaatttaaaaacgtcccatgcgaggtgtaccagcacattctgcagcctaatatgttggctaacaaggttaaatttacgtttcccccagccgccctgccgccgccttccacgccattacaaccactccctctgcagcagtctctgtgtagtacctctgtaactacgatccaccacactgtgctgcaacaacacgctgccgctgcagctgctgcagcggccgccgcagcagccggcaccttcaaggttctgcagcctcaccagcaattcctgtctcaaattcctgccttaacccgaactagtctgcctcagctcagcgtgggtccagtgggcccgagactctgtccagggaaccagcccacatttgttgcacctccacagatgccgatcattccagccagcgtccttcaccctagccatctagctttcccatcattaccacatgctctcttcccatccttgctgtcacctcatccaactgttattccattgcaaccccttttttag

SEQ ID NO: 141621 - DNA, 210 bp, synthetic construct
  misc_feature 1..210: note = Description of Artificial Sequence: Synthetic coding sequence
  source 1..210: mol_type = other DNA
atgccagctaatgaggacgctccccaacccggcgagcatggcagcgcctgcgaagtttcagtttcattcgaggacgtaacagtcgattttagccgagaagagtggcagcagctggattctacacagcgaaggctataccaggacgttatgctcgaaaactacagccatctgctatctgtcggcaaggacaaccaccccgtgaaactgtag

SEQ ID NO: 141622 - DNA, 1986 bp, synthetic construct
  misc_feature 1..1986: note = Description of Artificial Sequence: Synthetic coding sequence
  source 1..1986: mol_type = other DNA
atgcccgctaatgaggacgcgccacagcccggggaacatgggtctgcatgtgaggtgtctgtgagtttcgaggacgtgaccgtggactttagtagggaagaatggcagcagttggactctactcagcggcggttgtaccaagatgtgatgctcgagaactattcccacctcctttctgtcggctttgaagtacccaagccagaagtcatatttaagctggaacaaggagagggaccctggaccctcgagggcgaggccccccatcagagttgctctgacggaaaatttgggatcaagccttcccagcgtcgcatctctggaaagagcactttccactctgagatggagggtgaggacacaagagacgatagcctgtactcgattctggaggagctttggcaggatgcagagcagataaagagatgtcaggaaaagcacaacaagctcctgtcccgcaccaccttcctcaataaaaagattttgaatacagagtgggactatgaatacaaagacttcggcaaatttgtccacccatctcccaaccttatcctgtcccagaagagaccccacaaacgggatagttttggaaaaagctttaaacataatcttgacctgcacatccataacaaaagcaacgccgccaagaatctggacaaaacaattgggcatgggcaggtgttcacacaaaattcaagttacagccaccatgagaacacccacacgggggttaagttttgcgagcgcaaccagtgtggcaaggtgctgtctctcaaacacagcctgagccaaaatgttaaatttcccatcggggagaaagccaacacctgcacagaatttgggaaaatctttacacagcgctcccacttcttcgcgccccagaaaatccatactgtggaaaagccccacgaactctccaaatgtgttaacgtgttcacccagaaacctctattgagtatctacctgcgcgtccacagggacgagaaactatacatatgcacaaagtgtgggaaagctttcattcagaatagcgagctcattatgcatgaaaagacgcacactagagagaagccatataagtgtaacgagtgcggaaaatcattttttcaggtgtcctccctcctgcggcaccagactacccacaccggtgaaaaactgttcgagtgctcggaatgcggcaagggcttttctcttaacagtgccctgaacattcaccagaagattcacactggggagagacaccataaatgctcagaatgcgggaaggcgttcacgcagaagagtacactccgcatgcaccaaaggatccatacaggggaacggtcgtacatctgcacacagtgcggccaggccttcatccaaaaggcacatctgatcgcccatcagcgtatccacaccggagagaaaccctacgagtgttctgattgtgggaaatccttcccaagcaagagccagctgcaaatgcataaacggatacacactggagaaaaaccttatatctgcacagagtgcggcaaagcattcacaaaccggagcaatctcaacacccaccaaaagagccacaccggagagaagagctacatttgtgccgaatgtggcaaggcctttaccgatcgaagtaactttaacaagcaccaaactatacataccggagagaaaccatatgtttgcgctgattgtggtcgcgccttcatacagaagagcgagctgatcacccatcagcgcattcataccactgagaagccttacaaatgtccagattgcgagaagtccttctccaaaaagcctcatctcaaggtacatcagcgaatacacaccggagaaaagccctacatctgcgctgaatgcgggaaggcgttcacagatcgctccaacttcaacaaacaccagacaatacatacaggtgacaagccctacaaatgctctgattgtggcaaaggcttcacccaaaagtcagtgctttccatgcaccggaacatccacacctag

SEQ ID NO: 141623 - DNA, 312 bp, synthetic construct
  misc_feature 1..312: note = Description of Artificial Sequence: Synthetic coding sequence
  source 1..312: mol_type = other DNA
atgccagccaatgaagacgcccctcaacccggggagcatggctccgcgtgcgaagtctcagtgtcttttgaggacgttaccgttgacttctcacgcgaggagtggcagcagttggattccacacaacgacggctctaccaggatgttatgctggaaaattactcccacctcttgtctgtcggattcgaagtccctaagcccgaagtgatattcaagctggagcaaggcgaaggaccgtggaccttagagggtgaagcaccccaccagagttgctccggaatctcaacctatttcgtgactagcactgtgtag

SEQ ID NO: 141624 - DNA, 1986 bp, synthetic construct
  misc_feature 1..1986: note = Description of Artificial Sequence: Synthetic coding sequence
  source 1..1986: mol_type = other DNA
atgcccgcaaacgaagacgccccccagcccggggagcacggctctgcgtgtgaagttagcgtgtcttttgaggacgtgactgtagacttttcgagggaagagtggcagcagcttgactccacacagcgccggctgtatcaagatgtcatgctcgagaattatagtcacctcctctctgtgggattcgaggtccctaagcctgaggtgatcttcaagctagagcagggcgaaggtccatggactctagagggagaggcaccacatcaaagctgcagtgacggtaagttcgggattaaacccagccaacggaggatctcaggcaaaagtacgtttcatagcgaaatggaaggagaggatacccgggacgactcactttacagtattcttgaagagctctggcaggatgccgagcagattaaacgatgccaggaaaagcacaacaagctgttgagccggactaccttcctgaataaaaaaattctgaataccgagtgggactacgagtacaaggactttggtaagttcgtccacccctcccctaacctgattctgagccagaagaggccacacaagcgcgatagctttggaaagagcttcaagcacaatcttgacctgcacatccacaataaatccaatgcagctaaaaacttagataaaacaataggtcatgggcaagtgtttacccagaactccagttactctcaccacgagaatactcacacaggggtgaagttctgcgagcggaatcagtgcggcaaagtgttgtccctcaagcattcgttatctcagaatgtgaagtttcccatcggtgaaaaagctaatacttgcactgagtttgggaagatattcacccaacgatcacacttcttcgcgcctcagaagatccatactgttgagaaacctcacgagttatcaaagtgcgttaacgtcttcactcagaaacctctgctatccatttacctacgggtccacagagacgagaagctgtatatatgtaccaagtgcggcaaggcctttatccaaaactctgaactgataatgcatgagaaaacccacactagagaaaaaccatacaagtgcaacgagtgcggaaaatcttttttccaggtgtcatcactgttacgccatcaaactacccacacaggggaaaagctttttgaatgcagtgagtgcggtaaagggttttctcttaattcggcactcaatattcaccagaaaatccacaccggcgaaaggcaccataaatgttctgagtgtggcaaggcctttacacagaaaagcactctacgaatgcatcagcggatacacaccggcgagcgatcatacatttgtacacaatgcggtcaagcattcattcagaaggcacacctgattgctcaccaacggattcacactggtgaaaagccgtacgagtgttccgattgtggcaaaagtttcccctcgaagtctcaattgcagatgcacaagcgcatacataccggcgagaagccctacatctgtactgaatgcgggaaggccttcacaaatagatcgaatcttaacacccaccagaaatcgcacacgggcgagaagtcttacatctgtgctgagtgcggcaaggcctttacagatagatctaactttaacaaacatcagacaattcacacaggagagaaaccttatgtatgcgcagattgtggaagagcctttattcagaagtctgagttaatcacccatcagcgaattcacactacagagaagccgtataaatgccctgactgcgagaagagtttcagcaaaaagcctcaccttaaagtgcatcaacggatccacactggagaaaaaccctacatttgcgccgagtgcgggaaggccttcactgaccggtccaactttaacaagcaccaaacaattcatactggcgacaagccatataaatgtagcgactgtggtaaagggttcacccaaaaaagtgtgctgtctatgcataggaatattcacacctag

SEQ ID NO: 141625 - DNA, 369 bp, synthetic construct
  misc_feature 1..369: note = Description of Artificial Sequence: Synthetic coding sequence
  source 1..369: mol_type = other DNA
atgcctgctaatgaagatgcacctcagccaggagaacatggaagcgcttgcgaggtctccgtttcattcgaggacgtgacggtggattttagtcgggaagagtggcagcagctggattctactcagcgcagactctaccaagatgtcatgttggaaaactattcgcacctcttatctgtgggctttgaggtgcccaaaccagaggtgatcttcaagcttgagcagggtgagggcccatggactctcgagggcgaggcaccgcaccagagttgttccgacggaaagtttggaatcaaaccatctcaacgcagaattagcggtaagagcacatttcacagcgagatggaaggggaagataccctgtgttag

SEQ ID NO: 141626 - DNA, 1551 bp, synthetic construct
  misc_feature 1..1551: note = Description of Artificial Sequence: Synthetic coding sequence
  source 1..1551: mol_type = other DNA
atgcacggccgaaaggatgacgcccagaaacagcccgtaaaaaatcagctcggactgaacccccagtcacatttgccagaactccagctgtttcaagccgagggcaaaatttacaagtatgaccacatggagaagtccgttaatagcagctcacttgtctcacctccacagagaatctctagcactgttaaaacccacatctcccatacctacgagtgcaacttcgtcgattcactgtttacccagaaagaaaaggccaatattggtacagagcactacaagtgttccgagcgcggcaaagcatttcaccagggcctgcatttcaccattcaccagataatccacaccaaggagacgcagttcaagtgtgatatctgtgggaagatcttcaacaaaaagagtaatctggccagtcaccaaaggattcatactggcgagaagccttataagtgtaacgagtgtggaaaagtgttccataacatgtcccacctggcacagcaccgtcgaatccatacaggagagaaaccgtataagtgcaacgaatgtggaaaggtgtttaaccagatctctcatttagctcagcatcaacgcatccacacaggagaaaaaccgtataagtgtaacgaatgcggcaaagtgtttcaccagatttcacatcttgctcagcacagaacgatccatactggcgaaaagccatatgaatgcaataaatgtgggaaggtgttttctcgcaattcatacctggtccagcatcttatcatacataccggggaaaagccatatagatgtaatgtgtgcggaaaggtctttcaccacatatctcaccttgcacagcaccaaaggatacatacaggcgaaaagccgtacaagtgtaacgaatgcgggaaggtgtttagtcacaagtccagtctcgtaaatcactggcggattcataccggtgaaaagccttacaagtgtaatgagtgtggtaaggtttttagtcataagtctagcctggtgaatcactggagaatacataccggggagaagccgtataaatgtaatgagtgcggaaaggtgttttctaggaactcatatctggctcagcacctcattattcatgcaggcgaaaagccctacaagtgcgacgagtgcgataaggccttcagccaaaattcacacctggttcagcaccatagaattcacacaggggaaaaaccctataagtgtgatgagtgcggaaaagtgttctctcagaactcttacctcgcataccattggcggatccacacaggagagaaggcatacaaatgtaatgagtgcggaaaagtttttggcctgaattcgtctttagcgcatcatcgaaagattcacacaggcgaaaagcctttcaagtgcaatgagtgtggcaaagccttctcaatgcgtagttccctaaccaaccatcacgcaatccacactggggagaagcacttcaagtgcaacgaatgcggcaagttgttcagggataacagttacttggtccgacaccagcggttccacgccggcaaaaagtccaacacctgcaactag

SEQ ID NO: 141627 - DNA, 1467 bp, synthetic construct
  misc_feature 1..1467: note = Description of Artificial Sequence: Synthetic coding sequence
  source 1..1467: mol_type = other DNA
atgcacggccgcaaagatgatgcgcaaaagcagcccgtcaaaaatcagctggggctgaatccgcagtcgcacttgccagaattgcaacttttccaggccgaaggtaagatctataaatacgaccacatggagaagtcagtcaactcaagtagcctggtcagccctccacagagaatttctagcacagtgaagacccacatctctcatacttatgagtgcaattttgttgattcgctctttacccagaaggaaaaggctaacattggcacagaacactataagtgtagtgagcgcggaaaagcatttcatcagggacttcacttcaccattcatcagatcatccatactaaggaaacccagttcaagtgcgatatctgtggcaaaattttcaacaagaagagcaaccttgcttcccatcagcgcatccacactggcgagaagccttataagtgcaacgagtgtggaaaggtcttccataatatgtcccacctcgctcagcacaggcgtatccatacaggggaaaagccatataagtgtaatgaatgtggaaaggtgttcaaccagattagccacctggctcaacaccagagaatccacaccggagagaagccctacaagtgcaacgagtgtggcaaagttttccatcagatcagccatcttgcccagcatcggacgatccacaccggcgaaaaaccatacgaatgcaataagtgtggtaaagttttctctcgaaattcatatttagtccagcatctcattatccatactggcgagaagccttatcggtgcaacgtatgtggcaaggtattctctcataagtccagtctggtgaatcactggcgcatacacaccggcgaaaaaccctacaagtgcaacgagtgcgggaaggtgttcagccacaagagctcgctggtgaatcactggcgtatccatacaggcgagaagccctacaaatgtaatgagtgtgggaaagtgttctcaagaaacagctatttagcccagcacttgatcattcatgctggggaaaaaccctataaatgcgacgagtgtgacaaggctttctcgcaaaactcccatctggtccagcatcataggatacacacgggcgaaaaaccatacaagtgcgacgaatgtggaaaggttttttcacagaatagctatctcgcttaccattggaggattcatactggcgagaaagcgtataaatgcaacgagtgtggcaaagttttcggcttaaattctagcctggcacatcatcggaagattcacacaggggaaaaacctttcaaatgcaatgagtgcgggaaggcattcagtatgagaagcagcctcaccaaccaccatgccatccacactggcgagaagcactttaaatgtaacgagtgcggaaaactatttcgggacaattcttacctagtgcggcatcagcgattccacgctgggaaaaaaagtaacacatgcaattag

SEQ ID NO: 141628 - DNA, 1467 bp, synthetic construct
  misc_feature 1..1467: note = Description of Artificial Sequence: Synthetic coding sequence
  source 1..1467: mol_type = other DNA
atgcacggaagaaaggacgacgcccagaagcagcctgtgaagaaccagctgggactgaacccccagagccacttgcctgaacttcagctgttccaggctgagggtaaaatctataagtacgaccatatggaaaagagcgtgaactctagttcccttgttagtcccccccagcgaattagcagcaccgtaaagacccacatcagtcatacctacgaatgtaacttcgtggacagcttgtttacacagaaagaaaaggcgaacattgggaccgagcattataagtgctctgaaagaggcaaggcgttccatcaaggactgcactttaccatccaccaaatcatccacactaaggagactcaatttaaatgtgatatctgcggtaaaatttttaacaagaaaagtaatctggcatctcatcagcgaattcacactggtgagaagccttataagtgtaatgagtgcgggaaagtcttccacaacatgtctcaccttgcccagcacaggcgcatccacaccggcgaaaagccttataagtgtaacgagtgtggtaaggtgttcaatcagattagtcacttggctcaacatcagcggatccatacaggggagaagccctataagtgtaacgaatgtggtaaagtgttccatcagatcagccaccttgcacagcacaggacaatccacaccggggaaaaaccttatgagtgcaataaatgcggaaaggtgttcagcaggaacagttacttagtgcagcatcttatcatccatactggagaaaagccttacaggtgcaacgtgtgtggcaaggtcttctcgcataagagcagccttgtgaaccattggcggattcataccggtgaaaagccttacaaatgtaacgagtgtggcaaggtcttcagtcacaagtctagcttggtcaaccactggagaattcacacgggcgagaaaccatataaatgtaatgagtgtggtaaagtattctcccgaaattcctacctggctcagcatctcattatccatgccggggagaaaccttataagtgcgacgagtgtgataaagcgttctcacagaattcgcacctcgtacagcaccatcgcattcatactggagagaaaccttacaaatgcgatgagtgcggaaaagtgttttcccagaattcctacttggcataccattggcggatccacactggcgaaaaggcctacaagtgcaatgaatgtggcaaggtgttcggcctcaatagtagcctggcacaccaccgaaagatccacacaggcgagaagcctttcaagtgcaacgaatgtggcaaggccttctctatgcgatcttctctgacaaatcaccatgccatccatacaggcgaaaaacacttcaagtgcaacgaatgcggcaaactattcagggacaactcttatctggtgcgacatcagcgtttccacgctgggaaaaagtcgaatacctgtaattag

SEQ ID NO: 141629 - DNA, 1551 bp, synthetic construct
  misc_feature 1..1551: note = Description of Artificial Sequence: Synthetic coding sequence
  source 1..1551: mol_type = other DNA
atgcacggccggaaagacgacgcccagaagcagcccgtcaaaaaccagctggggctgaaccctcaatcgcatcttccggagctgcaactctttcaagcagagggcaaaatctacaagtacgaccacatggagaaatccgtgaattccagctctctggtgtcccctcctcagagaatcagtagcaccgtgaaaacccacattagccacacttatgaatgcaacttcgtcgatagcttatttactcagaaggagaaggccaacattggcaccgagcactacaagtgtagcgaacgaggaaaggcgtttcatcagggtctgcatttcactattcatcagatcatacacaccaaggagacacagtttaagtgtgacatttgtggaaaaatattcaataagaaatcgaacctggcctcgcaccagaggattcacacaggtgagaagccctataagtgcaatgaatgcgggaaagtttttcacaacatgtcacacttggcacaacatcgacgtatccatacgggagaaaagccttataaatgcaatgaatgcggcaaagtcttcaaccagatttcacacctggcacagcatcagcgaatccacactggcgaaaaaccctacaaatgcaacgagtgtgggaaggtgttccatcagatatcccatctggctcaacatcggaccatccacaccggtgagaaaccctacgagtgcaataagtgtggtaaagtcttttcacggaatagctacctggtgcaacatctgattattcacacgggagagaagccgtataggtgcaatgtatgtggtaaagtgttccaccacatttcgcatttggcccagcatcagcggatccatacgggggagaagccatacaaatgcaatgagtgcgggaaggtattttctcacaaaagctcgcttgtgaatcactggcgcattcacacaggcgagaaaccctacaagtgtaacgagtgcggcaaggtcttttcacacaaatcctcactcgtgaatcattggcggatacacacaggtgagaaaccctacaaatgtaatgagtgcgggaaggttttctcacggaacagctatctggctcagcacctcatcatacatgcaggcgaaaaaccctacaaatgcgacgagtgcgataaggcattcagccaaaattcccatctggtccagcaccatagaatacacacgggcgaaaaaccctacaagtgtgacgagtgtggtaaggtgttctcccaaaatagctacttggcatatcactggaggattcacacgggggaaaaggcttacaaatgcaatgaatgtggcaaagtgttcggattaaacagcagtctcgcccaccaccgcaaaatccacacgggggagaaaccattcaaatgtaacgaatgtgggaaagctttttctatgcgctcatccctgactaaccaccacgcaatacatactggggaaaaacactttaagtgcaacgaatgtggcaaactctttcgagataactcttatctggtcaggcatcagaggtttcacgcaggaaagaagtcgaacacctgcaattag

SEQ ID NO: 141630 - DNA, 1551 bp, synthetic construct
  misc_feature 1..1551: note = Description of Artificial Sequence: Synthetic coding sequence
  source 1..1551: mol_type = other DNA
atgcacggaagaaaggacgacgcacagaagcagcctgtcaagaatcagctgggactcaatccacagagtcatttgcctgagctgcagctgtttcaggcagagggaaagatttacaaatacgaccatatggaaaaaagtgtcaattctagtagcctggtatcaccaccacagaggattagttccaccgtgaagacccacatatcccacacttacgagtgtaatttcgttgactctctttttacgcagaaggagaaggctaatattggtacggaacactataagtgttcagaacggggcaaggccttccatcaaggacttcacttcacaatacaccagattattcacaccaaggaaactcaattcaaatgcgacatctgcggtaaaatttttaacaagaagagcaatcttgctagccaccaacgaatccacactggagagaagccctataagtgtaacgaatgcggtaaggtgtttcataacatgtctcacttagcacagcacaggcgcatccacacaggggaaaagccatacaaatgcaatgaatgcgggaaagtgttcaaccagatctcacacctggcccagcatcaaaggattcatactggagagaagccttacaagtgcaacgaatgtgggaaggtgtttcaccagatctcacaccttgcccagcataggactattcataccggggaaaagccgtacgagtgtaataagtgtggaaaggtgttctcacgcaatagctatttagtccagcatctgatcatccataccggggaaaaaccctatcggtgcaacgtctgcgggaaggtgttccaccatatcagtcacctggcccagcatcagagaatccacaccggggagaaaccttataagtgtaatgaatgtggcaaagtttttagccacaagagctctttggtgaatcattggcgaatacataccggcgaaaagccttataaatgtaatgagtgtggcaaggtattcagccacaaaagttccctggtcaaccactggcgcatccatactggcgagaagccctacaaatgcaacgaatgtgggaaggtattcagcagaaacagttatctggcccagcacctcattatccatgcaggagagaagccttacaagtgcgatgaatgcgataaagctttctcccagaattctcacctagtgcagcaccacaggattcatacgggtgagaaaccctataaatgcgacgagtgtgggaaggttttttctcagaatagctatctggcataccattggcgtattcatacgggcgagaaggcctataagtgcaatgagtgtgggaaggtgttcggactgaacagtagcctcgctcaccacaggaaaatacatacaggtgagaagcccttcaaatgcaacgaatgcggcaaggctttctccatgaggagttcactaaccaaccatcatgctatacataccggagagaagcacttcaaatgtaacgagtgcggcaaacttttccgcgacaattcttacctggtgagacaccagaggtttcacgcaggcaagaaatcgaacacttgcaattag

SEQ ID NO: 141631 - DNA, 1551 bp, synthetic construct
  misc_feature 1..1551: note = Description of Artificial Sequence: Synthetic coding sequence
  source 1..1551: mol_type = other DNA
atgcatgggcgcaaggacgacgctcagaaacaaccagtgaagaaccagctggggctgaaccctcagtctcatctccccgaacttcagctctttcaggcagaaggcaaaatctacaaatacgaccatatggaaaagtctgtgaacagttcttctctggtaagcccgccccagagaatcagttccactgtgaagacacatattagccatacttatgagtgcaacttcgttgacagcctgtttacccagaaggagaaagctaatatcggcacagagcactataagtgttccgagcgaggcaaggcatttcaccaggggttgcattttacaatacatcagatcatccacaccaaagagacccagtttaagtgtgatatttgcgggaaaatatttaataagaaaagtaatctcgctagtcaccagcgtatccatacaggggagaagccctataagtgcaacgaatgtggaaaagtgttccacaatatgtcccatctagctcaacacagacgaatccacacgggcgaaaaaccttataaatgcaacgagtgcggtaaggtgttcaaccagattagtcacttagctcagcatcaaaggatccacactggggagaagccctataaatgcaacgaatgcgggaaggtattccaccagatttcacatctagctcaacatagaacgatccacacaggggaaaagccctatgaatgcaataaatgcggaaaggtgttctcgcggaattcttacctggtgcagcacctcatcatacatactggagaaaaaccttatcgctgtaatgtctgcggtaaggtgttccatcatatttctcatctcgcacagcaccagcgtatacatactggcgaaaagccttacaagtgcaacgaatgtggcaaagtcttttcccacaagtcgtccctcgtcaaccactggagaatacacactggagaaaaaccttacaagtgcaatgaatgcggcaaagttttcagccacaagtccagcctggtgaatcactggcggattcacaccggtgagaagccctataaatgtaatgaatgtgggaaggttttctctcgcaacagttacctggctcagcacctaattatccacgctggtgagaagccttacaagtgcgatgagtgtgacaaagctttttcacagaatagtcacctggtacagcaccaccggatccacaccggtgagaagccctataagtgcgatgagtgcgggaaagttttctcccagaacagttatctcgcttatcattggagaattcacactggagaaaaagcttataaatgcaatgaatgcggcaaggttttcggtctcaacagttctctggctcaccaccggaaaatccatacaggagagaaacctttcaagtgcaatgagtgcggcaaggccttttctatgcgatcttcacttacgaaccaccacgctatccacactggtgaaaaacatttcaagtgcaatgagtgcggcaaactcttcagagataattcctacctagtgcggcatcagaggtttcatgctggtaaaaaaagcaacacatgtaattag

SEQ ID NO: 141632 - DNA, 1551 bp, synthetic construct
  misc_feature 1..1551: note = Description of Artificial Sequence: Synthetic coding sequence
  source 1..1551: mol_type = other DNA
atgcacgggagaaaagatgacgcccagaaacaaccagtaaagaatcagctcggcctcaacccacagtcccacctgcctgaactccaattatttcaggctgaaggcaagatttacaaatacgatcatatggaaaagtcagtgaattccagcagtctggtgtccccgcctcagcggatctcctctacagtcaaaacccatatcagccacacctacgagtgtaatttcgtcgattcgctcttcacacaaaaagagaaggctaatatcgggacagagcactataagtgcagcgaaagagggaaggcctttcaccagggtcttcacttcacaatacaccagatcatccacactaaagaaacacagttcaaatgcgatatctgcggcaaaattttcaataaaaagagcaacctcgcttctcaccagcgcatccacacaggggaaaaaccatacaagtgcaacgaatgcggaaaggtctttcacaatatgagccatcttgctcagcacaggagaatccacaccggagagaagccatataaatgcaatgagtgtgggaaagtcttcaatcagattagtcatctagcacagcaccagagaattcacacaggggagaagccctacaaatgcaatgagtgcggaaaggtcttccatcaaatctctcacttagcccagcataggaccatacacaccggggaaaaaccatatgagtgtaataaatgcgggaaggttttttcaaggaatagctacctggtacagcatctgatcatccacaccggtgagaagccatataggtgcaatgtgtgcggcaaggtatttcatcacatttctcacctggctcagcatcaaaggattcatacaggcgagaaaccgtacaaatgtaatgaatgcgggaaggtgttcagtcacaagagtagccttgtaaaccactggcggattcatacaggtgaaaagccctacaagtgcaatgaatgtgggaaggtgttttctcataagtcttctctggtcaatcactggcgaattcacaccggcgagaagccttacaagtgtaatgaatgcggtaaagtgtttagtagaaactcatatctggcacagcacttgattatccacgcaggcgaaaagccttataaatgcgacgagtgcgataaggccttcagtcaaaattcacacctggtccaacatcacaggatacatactggcgagaaaccttataagtgcgacgagtgtggcaaggtgttttctcagaactcatatttggcctaccactggcgaattcatacgggcgagaaggcatacaagtgcaatgaatgtggaaaggtgtttgggctgaactcctctttggcacatcatcggaaaatccacacaggggaaaaaccatttaagtgtaatgaatgtggaaaggcattctccatgcggagttctttaactaaccatcacgccatccacacgggagagaagcactttaaatgcaacgaatgcggcaaactatttcgcgataactcttatctggttagacaccaaaggtttcatgccggcaagaaatctaatacatgcaattag

SEQ ID NO: 141633 - DNA, 5034 bp, synthetic construct
  misc_feature 1..5034: note = Description of Artificial Sequence: Synthetic coding sequence
  source 1..5034: mol_type = other DNA
atggaggttcccgagccgacatgtcccgccccaccagctcgggatcagcctgctcccaccccaggcccaccaggtgctcccggggggcaggcctccccccacctgactctggggccagttttgctgccaccggaacagggcctcgcccctcccactgttttcttaaaggccttgccaatcccactctatcacacagttccaccaggcgggcttcagccacgtgctcccctggtaacaggctctctggacggagggaacgtgcctttcatcttatctcccgtgctgcagcctgagggccctggaccaacccaggtggggaagcctgccgcacccacgctgaccgtcaacattgtcgggacactgcctgtgttgtctccaggcttaggacctactttgggaagccccggtaaagtacggaacgcggggaaatacctgtgtccacattgcggccgggattgcctgaagccgagtgttctggaaaagcacataagaagccacactggcgagagaccattcccctgcgctacgtgcggtatcgcttttaaaacacaatctaacctgtataagcatcggcggacccagactcacctgaataactctcgtctgagctctgagtcggagggggccggcgggggcctattggaggagggagataaggcaggcgagcccccacggcctgaaggccgaggagagtccaggtgtcagggcatgcatgagggagccagtgagaggccgttgtcccccggagcacatgtcccacttctcgctaagaacctggacgttcgcaccgaagctgcgccatgccctgggagcgcattcgctgaccgggaagccccgtgggatagtgcgccaatggcatcgcccggccttcctgccgcgagcacccaaccatggagaaaactgcctgagcagaagtcccccactgccggcaagccttgtgccctgcagaggcaacaagctaccgccgccgagaagccatgggacgccaaagcacctgagggaaggctacgcaagtgcgaatcaaccgactccggctatttgagtcggtccgatagtgctgaacagccgcatgcaccctgttcaccactgcacagtctgtcggagcacagcgccgagtcagagggagagggaggcccgggcccaggtcccggtgtagctggcgccgagccaggggccagggaggctggactcgaactggaaaagaaacgtctcgaggaaagaattgcgcagttaatctcccacaaccaggcagtggtcgacgatgcacaacttgataatgtgagacctcggaaaacaggcctctccaaacaaggatctatcgatctgcccaccccctacacctacaaggacagctttcacttcgacataagagctttggagcctggccgcagacgcgcccccgggcctgttcggtccacatggaccccaccagacaaatctcggcctctgtttttccacagtgtgcctactcagctgtccaccactgtggaatgcgttcccgtcacgcggtccaattctttgccctttgttgaggggagccgcacttggcttgaacctcgagaaccacgggacccctggagtagaactcagaagcccctttccccaaggccgggccccgccaggttgggctgtagatccggactgagctccaccgacgtaccgtcaggacatcctcgggctctggttcgccaggccgccgttgaggatttgccggggaccccaattggggacgctctggttcccgccgaggacacagacgcaaagcgcaccgccgccagagaagccatggccggaaaaggtagggccgggggccgcaaatgtgggcaaagaaggcttaagatgtttagtcaagagaagtggcaggtgtacggtgatgaaacatttaaaaggatctaccagaagatgaaggcctcaccacatggaggcaaaaaagcccgcgaggtggggatgggctccggtgctgagcttgggtttcctctgcagaaagaagcggcaggttcgagtggaacagtgcctacacaggatcgaagaaccccagtgcatgaggacatatcggccggcgccaccccagaaccatgggggaacccacccgctcttgaggcatctttggttaccgagcctacaaagcatggtgagacggtggcaagacgcggggatagtgatagacccagagtcgaagaagccgtgtccagcccagcactgggcggccgcgacagtccttgcagcggcagtcgatctccgctggtttcaccgaacggtcggctggagctcgggtggcaaatgccgcccgcccccggcccccttaagggtggtgatgtggaggcccctcggcccgtgtggcctgaccccaagctggagggaggcgcccggggagtgggcgatgtacaggaaacttgcctgtgggcccaaactgtgctgagatggccttccagaggcagcggcgaggataagctgcccagtgagaggaagaagctcaaagtagaagatctgcactcatggaagcaaccggaaccagtgtccgctgaaacacccggcggtccgactcagcccgctagtctgtctagtcagaagcaggatgccgatccgggggaggtgccaggaggcagtaaggagagtgctagacaggtgggtgaacccctcgagtctagcggagcctccttggccgccgcgtctgtggctctgaagcgagttggtcctcgcgataaagctactcctctgcacccagccgctcccgcccccgctgagcatccgtccctcgcgacacctccgcaagccccgagagtcttaagtgccctcgccgacaacgcattttcacctaagtatttactacgcttaccccaggctgaaacacctttgcccctcccaataccatggggccctagacatagccaagactcactgtgttctagtggatggccggaggaacgcgcatcatttgttgggtcgggattggggactcccctctccccctccccagctagtggtccctcccctggagaagctgactctatcctggaagacccaagctgctctaggccccaggatgggcgcaagggggcccagcttggaggggataagggtgacagaatggctacttcaaggcctgccgcccgtgagctcccaatctctgcccccggcgctcctcgcgaggctacctcctcgccccctacccctacatgcgaggcccatttagtacaggatatggagggtgactctcatcgcatacaccgcctgtgtatgggttcaactctggcgcgcgcacgcctctcaggggatgtacttaacccttgggtccccaactgggagctcggagagcctccaggtaatgcacccgaagacccatctagtggacctctggtgggacccgacccctgcagccccctccagccggggtcattcctcaccgctctaacaagaccacagggcgtccccccggggtggcctgaattggcgctgagcagccattccggtacaagccgctctcatagcacaaggagcccacacagcacgcagaatcccttcccaagcctgaaggcggagccgaggctgacatggtgttgcctgagccggtccgtaccactacccgcagaacagaaggccaaagccgctagtgtttatttggctgtccacttcccagggtcctctttgcgagacgaaggacccaacggcccacctggaagtaatggagggtggacatggacaagcccaggggagggcggccctgctcagatgtccaaatttagctacccaactgttcccggtgtgatgccccaacatcaagtgtcagagcccgagtggaagaaagggctgccatggagagcaaagatgagcagaggcaattctaaacagcgcaagctcaaaatcaatccaaagcgttacaaaggcaactttctgcagagttgtgtgcagctcagggctagcaggcttcgtaccccaacgtgggtaagaaggcgctccagacatccaccagcccttgaggggctgaaaccctgccgcacacccggccagacatcatcggagattgccggtctcaatctgcaagaggaaccttcctgtgccacctctgagtctcccccttgctgcggaaaggaggaaaaaaaggaaggcgactgcagacaaactctcggcacactaagcctcggcactagttcccgtatcgtgcgcgagatggataagcggaccgtcaaggacatttcgccctcagccggcgagcatggcgattgcactacccattccacagccgcaacttcaggtttatctctccagtccgacacttgtctggccgtggttaatgatgttccactccctccaggcaaagggttggacctgggcttgttagagacccagttgctggcaagtcaggactctgtgtccactgacccaaagccctatatcttctccgatgcccagcgtccctccagcttcggctcaaagggaacattcccccatcacgacattgccacctcagtggctgctgtgtgtatttccctcccagtgaggactgaccacatcgctcaggaaattcactcagcggaaagtcgcgaccactcgcaaactgcgggaagaacactcacctctagttctcccgattcaaaagttacagaagaggggagagctcagaccctgctacctgggcgaccctcatcaggccagcgtatttccgattcagttcctctggagtcaacagagaagacccatctggaaatccccgcctccggtcccagttcagcctcctcccatcacaaagaaggaagacataaaaccttttttcccagtcgcggtcagtatgggtgcggggaaatgaccgtaccctgtcctagtttgggcagcgacggccggaaacggcaggtgtcgggtttgatcacccgaaaggattccgttgtcccgagcaagccggaacagcctattgaaatcccagaggcaccctcaaagagcctgaagaagcgatctttagaaggcatgagaaagcagaccagggttgagtttagcgacacaagctcggatgacgaagatcgattagtcatcgaaatctag

SEQ ID NO: 141634 - DNA, 264 bp, synthetic construct
  misc_feature 1..264: note = Description of Artificial Sequence: Synthetic coding sequence
  source 1..264: mol_type = other DNA
atggggcccctgacgtttcgcgacgtggctatcgagttcagcctgaaggaatggcagtgcctcgacacggcccagcggaacctatatcggaacgttatgctggagaattatcggaacttggtgtttctgggaatcacagtgtccaaaccggatctgatcacctgccttgaacaaggaaaggaggcctggagcatgaagcgtcacgagattatggtggcgaagccgacagaatcttattccgtgacccagtccgggatgcagtag

SEQ ID NO: 141635 - DNA, 1788 bp, synthetic construct
  misc_feature 1..1788: note = Description of Artificial Sequence: Synthetic coding sequence
  source 1..1788: mol_type = other DNA
atggggcctcttacatttagggatgtggccattgaattctccctgaaagaatggcagtgcctggataccgcccagcgcaacctctataggaacgtgatgctggaaaactataggaacctggttttcctcggaatcaccgtgagtaaacctgatctgatcacctgccttgagcaagggaaggaggcctggagcatgaagaggcacgaaatcatggtagccaagccgacagtaatgtgcagccactttgcccaggacctctggccggaacagaacattaaagacagtttccagaaggtgaccctcaagcgctatggtaagtgcaggcatgaaaatctacccctgaggaaggggtgtgagagtatggatgaatgtaaaatgcacaaaggcggatgcaacggactgaatcaatgtcttacggctacgcaaagtaagatttttcagtgcgacaagtacgtcaaggtggcccacaagttctcgaattccaaccgtcatgaaatccggcacaccaaaaagaaacctttcaagtgtactaagtgcgggaaaagttttggtatgataagctgtctgacagagcacagtaggattcacaccagagtcaacttttacaaatgcgaggaatgcggcaaggcgtttaattggagttctacacttaccaaacataaacggatacacactggcgaaaagccttataaatgtgaagagtgtgggaaggcttttaatcagagctccaacttgattaaacacaaaaagattcacacaggcgagaaaccatacaagtgtgaagagtgcggcaaaacatttaaccgcttctccaccctgacaacccataaaattattcacacaggagaaaagccatacaagtgtaaggaatgtggaaaagcctttaataggtcaagcacactgacgacccatcgcaagatacatactggtgagaaaccatataaatgtgaggagtgcgggaaggctttcaaacaaagcagtaatctgacaacccacaaaattatccacactggggaaaaaccttacaaatgtaagaagtgcggaaaagcctttaatcagtccgcccaccttaccactcatgaggtgatccataccggcgaaaagccatacaagtgtgagaaatgcggaaaagcttttaatcatttttctcatctgacaacacataaaataattcatactggggagaagccatataagtgcaaggagtgtggaaaagcgttcaagcactcatcaacacttaccaagcataaaataatacacacaggtgagaagccatataagtgcaaagagtgcgaaaaagctttcaatcagtcatccaagcttaccgaacataagaaaatccacaccggtgagaagccatatgagtgcgaaaaatgtggtaaggcgttcaaccagagttccaatcttacaagacataaaaaaagccacaccgaggaaaaaccctataagtgtgaggagtgcgggaaggggtttaagtggccatcgactctgaccatccataaaattattcatacaggtgaaaagccgtacaaatgtgaggagtgcgggaaggctttcaaccaatctagtaaattgaccaagcataagaaaatccatacaggtgaaaagccttatacatgcgaagaatgtggcaaagcttttaatcagagctccaacctgacgaaacacaaacggatccatacgggtgaaaagccatataaatgcgaggaatgtgacaaggccttcaaatggtcatccgtgctaactaagcataagatcatccatacaggagaaaaattacaaatttag

SEQ ID NO: 141636 - DNA, 1689 bp, synthetic construct
  misc_feature 1..1689: note = Description of Artificial Sequence: Synthetic coding sequence
  source 1..1689: mol_type = other DNA
atgggcccactcacctttcgggacgtggcgatagagttctctctcaaagagtggcaatgtctagataccgctcagagaaatctctatagaaacgtgatgctggagaactataggaacttggtatttctggtgatgtgtagccacttcgctcaggacctatggcccgaacagaacattaaagattccttccagaaggtgacgctgaaaagatacgggaaatgtcggcacgagaatcttcctctgcgtaagggctgcgaatcaatggacgaatgcaagatgcacaagggcgggtgtaatggcctgaatcagtgcctcaccgccacccagtcaaagattttccagtgtgacaagtatgtcaaggtcgctcacaaattttctaattccaaccggcacgaaattcggcacacaaaaaaaaaaccatttaaatgtacaaagtgtgggaagtcctttggcatgatcagctgtctgaccgaacattcacgcattcacacaagggtgaatttctacaaatgcgaagagtgcggaaaggcattcaactggtcctccaccctgaccaagcacaagagaattcatacaggagaaaagccctacaagtgcgaagaatgcggaaaggcatttaatcaatcgtctaacctcattaagcacaagaagatccacacaggagaaaaaccttataaatgcgaagagtgtgggaaaacgttcaacaggtttagcactcttaccacacataaaatcattcacaccggtgaaaaaccatataaatgtaaagagtgcggcaaggcgttcaataggtcatccacgctgaccacgcacaggaaaatccataccggagaaaagccttacaagtgcgaggagtgtggaaaggcgtttaaacaaagttctaatctaacaacgcacaagatcatccacaccggagaaaaaccatataagtgcaaaaaatgcggaaaggctttcaatcagtcagcacacctcacaacacatgaagttatccacaccggcgaaaaaccatataaatgcgaaaagtgtggaaaggcttttaatcacttctcacacctgacaacacacaaaatcattcatacaggagagaaaccgtataagtgtaaagagtgcgggaaagcctttaaacactcaagcacgcttacaaagcacaagatcatacataccggtgaaaaaccttataaatgcaaagaatgcgaaaaggcttttaatcaaagcagtaaacttactgagcataaaaagattcatactggcgagaagccctacgagtgtgaaaagtgtggcaaagcctttaaccagagttccaacctcacgcgtcataagaaaagtcataccgaagagaagccatacaagtgcgaggagtgcggaaagggattcaagtggccttccacattaacgatccacaagattatccatactggtgagaagccttacaagtgcgaagagtgcggaaaagcttttaaccagtcctccaagctgaccaaacataagaagatccacacaggagagaagccatacacctgcgaagagtgcggcaaagctttcaatcaatcgtccaatctcaccaagcacaagcggatccatactggcgagaagccttacaagtgtgaggaatgcgacaaagcatttaaatggtcatccgtgctgaccaaacacaagattattcacaccggcgagaagctccagatatag

SEQ ID NO: 141637 - DNA, 1413 bp, synthetic construct
  misc_feature 1..1413: note = Description of Artificial Sequence: Synthetic coding sequence
  source 1..1413: mol_type = other DNA
atgcacaagggtgggtgtaacgggttaaatcagtgtttaacagcaacccaatccaagatcttccaatgcgataagtacgtaaaggtagctcataagttttccaacagtaacaggcatgagattcgacatactaagaaaaagccatttaagtgcacgaagtgcggcaagtcatttgggatgatatcctgccttactgagcactcccggatccacacaagagtgaacttctataagtgcgaggagtgcggcaaagccttcaattggtcttctactttgacaaaacacaaacgcatccatacaggggaaaagccttataagtgtgaagagtgtgggaaggcttttaatcaaagctccaacctgataaaacataagaagattcacactggggagaagccttacaaatgcgaagaatgcgggaagaccttcaaccggttttcgaccctgactacgcacaagatcattcataccggcgagaaaccatataagtgtaaggaatgtgggaaagctttcaaccggtccagcacattgacaacacatagaaagatacacacaggtgaaaaaccatacaaatgtgaagagtgcggaaaagctttcaagcagtcttcaaacctgacaacgcataagatcattcatactggcgaaaagccgtataagtgcaagaaatgcggcaaggcattcaatcaaagcgcgcatctaaccacccacgaggttattcacactggggaaaaaccttataaatgcgagaaatgcgggaaagcttttaaccattttagccatctgacgacacacaagatcattcacaccggtgagaagccttacaagtgtaaagaatgtggcaaggcatttaagcactcttctactctgacaaagcataaaatcatccacaccggagagaaaccctataaatgtaaggaatgcgaaaaagcgttcaaccagtcatccaagctcaccgagcacaagaaaatccacaccggggaaaaaccctacgagtgcgagaaatgtgggaaggcatttaaccaatcttcaaatttgactcgccacaagaagagccacacagaagaaaaaccctataaatgcgaggagtgcggaaaaggcttcaaatggcccagtaccttgactattcataaaatcatccatacgggtgaaaagccatacaaatgtgaggagtgcggtaaggcctttaaccagagctcgaaattaacaaaacacaagaaaatacatacaggggaaaagccctacacgtgtgaagaatgcggaaaggcgtttaatcagagctcaaatctcacaaaacacaaacgaatccataccggggagaaaccctacaagtgcgaggaatgcgataaggcttttaagtggtccagtgtgctgacaaagcataaaattattcacaccggggagaaactgcagatctag

SEQ ID NO: 141638 - DNA, 1806 bp, synthetic construct
  misc_feature 1..1806: note = Description of Artificial Sequence: Synthetic coding sequence
  source 1..1806: mol_type = other DNA
atgggcccccttgaatttcgggatgtggcaatcgaattctctctggaggagtggcactgtctcgatactgcccaacagaatttgtaccgcgatgtcatgttggagaattaccgccatttggtcttcttagggattgttgtgacaaagccggacctgatcacttgtttagaacaggggaagaaacctttcaccgtcaagcgacacgaaatgattgcaaaatctcccgtaatgtgtttccacttcgctcaagacctttgtcctgaacaaagcctgaaggatagtttccagaaagtgatcgtgacacgttacgaaaaacgagaatacggaaatctggagcttaagaaggggtgtgagtccgtggacgagggaaaggtgcacaagaggggctataacggactaaatcagtgcttgactgctacacagagtaaggtatttcagtgcgatacctatgttaaggtaagtcatatatttagcaacagtaacagacacaagatcagagatactgggaaaaagccgtttaaatgcattgaatgcggaaaggcattcaaccaatcttcaacgctcgccacacataagaaaatccacactggggagatcacttgcaagtgcgaagagtgtgggaaggcattcaaccgctcgtctcatctgactagccacaagcgcattcacacgggtgaaaaacggtataaatgcgaagattgcgggaaggagctgaaatactcctccactcttactgcacataaaagaatacacacaggcgagaaacggtataaatgcgaggattgtggaaaggagctgaaatatagtagtacattgaccgcccacaagagaatccacaccggagaaaagccttataaatgcgataagtgcggccgcgcattcattagctcttccattctgtacgtacacaaaatctcgcacactgaagagaaaccatacaagtgcgaagagtgtggcaaggccttcaaactgtccagcatcctgagcacccacaaacggattcatacaggtgagaaaccctacaagtgtgaagagtgcgggaaagcgtttcggcgctctctggtgctcagaacccacaagaggattcacacgggggagaaaccatataagtgtgataagtgcggcaaagcgtttatctccagcagccttctttacaaacataaaattagtcactcggaaaaaaaaccctacaaatgtgaagagtgtggcaaagcgtttaagcgatcttccaccctcacaatccacaagatatcacatactgaagagaagccgtacaaatgtcaggagtgtgataaggtcttcaagagatcctcggcactttcaacacacaaaataattcactcgggagagaaaccatacaagtgcgaggagtgtggaaaagctttcaagagatcatcgaacctgaccacgcacaagatttcccacaccgaggaaaagctttacaaatgccaagagtgcgacaaagcatttaagtatagctcagccttatccactcacaaaatcattcacagcggtgagaacccttacaagtgtgaagaatgcggcaaggcttttaaaagaagcagcgtcttgtctaaacacaagataatccatactggggcaaagccttataaatgcgaggaatgcgggaaggcatttaagagatcctcacagctgactagccataagatctcgcacactggagagaaaccatacaagtgcgaagaatgcggaaaggccttcaacctgtcttcagacctgaatacccacaagcggatccacattgggcagaaggcgtacatcgtaaagaacatggcaaacctgtag

SEQ ID NO: 141639 - DNA, 369 bp, synthetic construct
  misc_feature 1..369: note = Description of Artificial Sequence: Synthetic coding sequence
  source 1..369: mol_type = other DNA
atgaggaagcacattaaagagcgggagctgagccttatggagcagattaaggaattcatactagaaaggaacactatgaatgtgccgacggtgggaaaacctttctctggtcgacacagcctgttaagtatccgcgagttcacgcttggcaggagcccaatgaatgttatgaatgtgggagaaccctccgagaagaagcccacttgcatgatcattagagagttcatattggagaaaaaccctattctggtcagaaacgtgggcaagacaagcgccgaggtccagctgctgctaaatactagagagttcatcctggagattaactccagaaatagagagatcaaggagttcgcagaatgtttctcatag

SEQ ID NO: 141640 - DNA, 1911 bp, synthetic construct
  misc_feature 1..1911: note = Description of Artificial Sequence: Synthetic coding sequence
  source 1..1911: mol_type = other DNA
atggccccaaggccccccaccgcagcaccccaagagagcgtgacttttaaagatgtctccgtggatttcacccaagaagagtggtaccacgttgacccagctcagagatctctgtatcgtgatgtaatgcttgaaaactacagtcacctggtttccctgggctaccaggtttcaaaaccagaggttatttttaagctcgaacagggtgaggaaccctggattagcgagggcgagatacagcggcctttctatcccgattggaaaacgagaccagaggtgaagtccagccacctgcagcaggacgttagcgaggtcagccattgtacgcacgatctgctgcatgccactcttgaagacagttgggatgttagtagccagctagacagacagcaggaaaattggaaacgtcacctgggtagcgaagcctcaacccaaaaaaagattatcactccccaggaaaatttcgagcaaaataaattcggggagaacagtaggctgaacaccaatctagtaactcagctcaatatcccagctaggatccgccctagcgagtgcgagaccctgggctctaacctggggcacaacgccgatctcctaaacgagaacaatatcctggcaaaaaagaagccgtacaaatgtgacaagtgccgtaaggcttttatccacagaagctcactgacgaagcacgagaagactcacaagggtgagggggccttccccaatgggactgatcagggcatctatccaggaaagaaacatcatgagtgcaccgattgtggtaaaacttttctgtggaaaacccagcttaccgaacaccagcgcatccataccggcgagaaaccttttgagtgcaatgtgtgcggtaaggcttttcgacacagcagttcactgggccagcacgagaatgcgcatacgggcgagaaaccatatcaatgtagcctgtgcggcaaggcctttcagcggagctctagcctggtccagcatcagcggattcatacaggtgagaagccctaccgctgcaacctctgtggtcggtctttcagacatggaactagtctcactcagcacgaagtcacacattccggggagaagccttttcagtgcaaggagtgcggcaaagcattttcaagatgctctagccttgtgcagcacgagcggactcacacaggagaaaaacctttcgagtgctccatctgtggtcgtgcctttggtcaaagcccctccctctataagcatatgcggatccataaacgcggcaagccgtatcagtcatctaactatagtattgactttaagcattcaacatctctcacacaggacgagtccacactcactgaagtaaaatcataccactgcaacgattgcggcgaggacttctcacacatcacagactttacagatcaccagcgaatccacactgcggaaaatccatacgactgcgaacaagcctttagccagcaggcaatctcccaccccggagaaaagccctatcagtgcaatgtctgcggaaaggctttcaaacgcagtacaagttttatagaacaccatcggattcataccggagaaaaaccgtatgaatgtaacgagtgcggggaagcatttagtaggcggtcttcactgacacagcatgaacgcacgcatacaggggagaagccctacgaatgcattgattgcggcaaggcattctcccagagctccagtctgatccagcatgagcgaacccatacgggcgaaaaaccttatgagtgcaacgagtgcggccgcgcctttaggaagaagaccaacctgcacgaccaccagcggatccacactggcgagaagccctatagctgtaaagagtgtggtaaaaacttcagcagaagttctgctctgacaaaacaccaacggattcatacccggaataaattatag

SEQ ID NO: 141641 - DNA, 3576 bp, synthetic construct
  misc_feature 1..3576: note = Description of Artificial Sequence: Synthetic coding sequence
  source 1..3576: mol_type = other DNA
atgccgggaacgcccgggagtctggagatgggtctgctcacattcagggacgtggcgatcgaattttcacctgaggagtggcagtgcctggacactgcccaacagaacttgtacagaaacgtcatgctggagaattatcgtaacctggcctttctgggtatcgcgctgagtaagccagacctcattacatatctggagcagggcaaagaaccatggaacatgaagcagcatgaaatggtggacgagcctactggcatctgcccgcacttccctcaagatttctggccagagcagtccatggaggactcttttcagaaggtgctgctgcgcaagtatgagaaatgtgggcacgaaaaccttcagctgaggaaaggttgtaaatcagtggatgagtgtaaggtgcataaagaaggttacaacaaactgaatcagtgtctcactacagcccaaagcaaagtttttcagtgcggaaaatacttgaaagtcttctataagttcctgaatagtaatcggcatactatcagacacacaggcaagaaatgtttcaaatgtaagaaatgtgtgaaatctttctgcattcggctgcataagacccaacacaaatgcgtttacatcaccgaaaagtcttgcaaatgcaaagagtgtgaaaagacctttcactggtcatcaaccctgaccaatcataaagaaattcacaccgaagacaagccttacaagtgtgaggagtgcggaaaagcctttaagcaactctctactctgactacccacaagatcatttgtgccaaggagaaaatctataaatgcgaagagtgtggaaaagcctttctgtggtcctctacactgacacgtcataagcgaatacacactggcgagaaaccatacaagtgcgaggaatgcggtaaggccttttctcacagcagcactctcgcaaaacataaaaggatccataccggagagaagccatacaagtgcgaggagtgcgggaaagcctttagtcgcagctctacactcgctaagcataagcgaatccacactggagaaaaaccctacaagtgcaaggagtgcggaaaggctttcagtaattcttccaccctggctaatcacaagatcactcacacggaggaaaagccatataaatgtaaagagtgcgacaaggcctttaaacgactgtctacgctgactaaacacaagatcatacacgcaggtgaaaagctttataagtgcgaagaatgcggcaaggctttcaacagatccagtaacctgacgattcataagtttattcacactggcgaaaagccttacaagtgtgaagaatgtggaaaggcctttaattggtcgtcttcccttaccaaacataagcgcttccatacacgggaaaagcccttcaagtgcaaggagtgtgggaaggccttcatctggagctctaccctgaccaggcacaagcgaatccacaccggggagaagccgtataagtgcgaggagtgcgggaaggcatttcgccagtcgagcactctgaccaagcataaaattatccacacgggtgaaaagccctacaagtttgaggagtgtgggaaggctttcaggcaatctctgaccctgaataaacacaagatcatccatagccgggagaaaccctacaagtgcaaagagtgcggcaaggccttcaagcagttctctacacttactacgcacaagattatacatgctggcaaaaaattatacaagtgcgaggagtgcgggaaagcttttaaccactcttcttccctcagcactcataaaatcatccacactggagaaaagagctataaatgtgaggaatgcgggaaagcctttctgtggtcctcaacattgaggcgtcataaacgcatccacaccggcgagaaaccttataaatgcgaagaatgtggcaaggccttttcgcactcctccgccctggccaaacataaacgcattcacacaggggaaaagccttacaagtgtaaagaatgtggcaaggctttctcaaactcttcaacgctggccaaccacaagataacccacactgaggaaaaaccctacaagtgtaaagaatgtgataagacatttaagagattatcaaccctgacaaagcacaagatcatacatgctggggagaagctatacaaatgtgaagaatgtgggaaggcatttaatcgctcttctaacctcacaatccataagttcattcataccggcgaaaagccatacaagtgcgaggagtgcggtaaggcattcaattggagttccagcttgacaaagcacaagcgcatccacacaagggagaagccgttcaagtgtaaagaatgcggaaaggcattcatctggtcctctactctcactagacacaaaagaatacatacaggtgagaaaccttacaagtgtgaagagtgtggcaaagctttcagccggagctctacactgaccaagcacaagacgatccacacaggcgagaagccatacaaatgcaaagagtgcggtaaggcgttcaagcacagcagtgctttggccaaacacaaaatcattcatgcaggggagaaattgtacaagtgtgaagagtgcggaaaagcctttaaccagtcaagcaacctcaccactcacaagatcatccacaccaaggagaagccctccaaatccgaagaatgtgacaaggcctttatatggtcctccacgcttactgaacacaagcggatccacaccagggaaaagacctacaagtgcgaagaatgcggcaaagccttcagtcaaccttctcatttaactacacacaagaggatgcacaccggcgagaagccctacaaatgtgaagagtgcggaaaagccttctctcaaagttctaccctaacaacacataagataattcacacgggcgagaagccctacaagtgtgaagagtgcggcaaagccttcagaaagagttcgacacttactgaacacaaaattatacacactggtgaaaagccttataaatgtgaggagtgcggtaaagctttcagccagtcaagcaccttgaccaggcatactcgcatgcataccggcgagaagccttataagtgtgaagagtgcggcaaagccttcaataggagctcgaagctcacaacacataagattatccacaccggcgaaaagccttataaatgcgaggaatgcggaaaagcttttatcagctctagcaccttaaacggccacaagaggatccatactagagagaagccttacaagtgtgaggagtgtggcaaagcgtttagtcagtcatctaccctcaccagacataagcggctacatacaggggaaaagccttacaaatgcggtgagtgcgggaaggcctttaaggagagctccgcccttactaaacataagatcatccacacaggcgaaaagccctacaaatgtgagaaatgtggcaaagctttcaatcagtctagcatccttacaaatcacaagaagatacacacaataacacccgtgatacctctcctctgggaggctgaagctggagggagtaggggacaagagatggaaaccatcctggccaataccgttaagcctctcctgtactag

SEQ ID NO: 141642 - DNA, 3480 bp, synthetic construct
  misc_feature 1..3480: note = Description of Artificial Sequence: Synthetic coding sequence
  source 1..3480: mol_type = other DNA
atgccagggactcccggctctctggaaatgggactactgaccttccgcgatgtggctatagagttcagtccagaagagtggcaatgtttggatacggcccagcaaaacctgtaccggaacgtaatgttggaaaattacagaaaccttgcgttcctgggcatctgtccccactttccacaagacttttggccagaacagtcgatggaggatagtttccagaaggtgctactcagaaaatacgaaaagtgtggccacgagaacctgcagctcagaaagggttgcaagtcggtcgacgagtgcaaggtacacaaagagggctataataagctgaatcagtgcctgacaacagcgcagtccaaggtgttccagtgcggcaaatacctgaaggtgttctacaaatttttgaacagcaaccggcacactattcgacacaccgggaagaaatgttttaagtgtaagaagtgcgtgaagtctttttgcattcggctgcacaagacccaacacaaatgtgtatacatcacggagaagtcctgcaaatgtaaggagtgtgaaaaaacctttcattggagcagcacactgacaaaccataaggagatccataccgaagacaagccatataagtgtgaggaatgcggcaaggctttcaagcagttgtctactttaactacccacaaaatcatttgcgctaaagaaaaaatctataaatgcgaagagtgcggaaaggcttttttgtggtcaagcactctgacgcgccataagcgcatccacaccggcgagaagccatacaaatgtgaagaatgcgggaaagcgttttcccacagttccacccttgctaaacacaagcgtatccacacaggtgaaaagccctataagtgcgaagaatgtggtaaggccttttcccggtcttcaaccctggccaagcataagcgtattcacacaggtgaaaagccatataaatgcaaagaatgtggcaaagccttctctaactcttcgaccttagcaaaccataaaatcactcacacggaagaaaaaccatacaaatgcaaggagtgcgacaaggccttcaagcgactgagtaccctgacaaaacataagatcattcatgctggcgagaagctctataagtgtgaagagtgcggcaaagcattcaatcgtagctccaatctgacaattcataagtttatccacacaggtgaaaaaccctacaagtgcgaagaatgcgggaaggccttcaactggagttccagtctaactaagcacaaaaggttccacacgcgcgagaaaccattcaagtgcaaggagtgtggtaaagcctttatctggtcatctacccttacacggcacaagaggattcacactggggagaagccttacaagtgcgaagaatgcggcaaggccttcaggcagtcatccacgctcacaaagcataagatcatacacaccggagaaaaaccatataagtttgaagagtgtggtaaggccttccgccagtcattaactctcaacaaacacaaaataatccattcacgcgaaaagccttacaagtgcaaagagtgcggcaaggcttttaaacaatttagcaccctgaccacccataaaataatccacgcagggaagaagctctataaatgcgaagagtgtggcaaagccttcaatcatagcagctccctgagtacacacaaaatcatccacaccggtgaaaaatcatacaagtgtgaggaatgtggaaaagccttcctgtggagctccactttgagacgccataaacgcattcatactggcgagaaaccttacaaatgcgaggaatgtggcaaggcatttagccatagcagcgccctcgcaaaacataagagaatccacaccggcgagaagccctataagtgcaaggaatgtggcaaggcattttcaaacagtagcacactggccaaccataagattacccacaccgaggagaagccttacaagtgcaaggaatgcgataaaacgtttaagcgcttatcaactctcactaaacataagatcattcacgccggggagaagctctacaagtgtgaggagtgtggaaaagccttcaatcgcagttccaacctcaccattcacaagttcattcacacaggtgaaaagccatacaagtgtgaggagtgcggaaaagcattcaattggtcctcttcacttactaagcacaagagaatccacacgcgcgagaagccttttaaatgtaaggaatgtgggaaggcattcatttggtcatcaaccctgactaggcataagaggattcatacgggcgaaaaaccttacaaatgtgaagagtgcggtaaagcattttcgcggagttcaacactgactaagcacaaaacgatccacaccggcgaaaaaccatacaaatgcaaagagtgtggtaaagcctttaagcactcaagcgccctcgcaaagcacaagatcatacatgctggcgagaaactgtacaaatgtgaagaatgtggaaaggcctttaaccagagttccaacctgactacccataagataatccacacaaaagaaaaacctagcaagtccgaggagtgcgataaggccttcatctggtcatctacactaaccgagcacaaaaggattcacacccgtgaaaagacatacaagtgtgaggagtgtggtaaagcattctcccagccttctcatctcaccacacataaaaggatgcacacgggggaaaaaccctacaagtgcgaagagtgtggaaaggcgttctcacagagcagtaccctgaccacgcacaagattatccatacaggcgagaagccctacaagtgtgaggagtgtggaaaggcgttccggaaaagctctaccctaactgagcataaaattattcacaccggggagaaaccttacaaatgcgaagagtgtgggaaggcctttagtcagtcatctaccctgacaaggcataccaggatgcacacaggcgaaaagccctacaaatgtgaagaatgtggcaaggcgttcaaccggtcctccaaactcaccacccacaagatcatacatacaggagagaaaccatataaatgtgaggaatgtggtaaagcctttatatctagctcaactctgaatgggcacaaaagaatccacactagagaaaagccttataagtgcgaggagtgcggaaaggccttctcccaatcttcaactctgaccaggcacaagagactgcatacaggcgaaaagccgtacaagtgtggggagtgcggcaaagcattcaaggaaagtagcgcactgactaagcataagatcattcacaccggtgagaaaccctacaagtgtgaaaagtgcggtaaagccttcaatcaatccagtattctgaccaaccacaagaaaatccatacgattacccccgtcatacctctgctctgggaggcagaagcaggcgggtccagaggccaagaaatggaaaccatcttggcgaataccgttaaaccgttactttactag

SEQ ID NO: 141643 - DNA, 1761 bp, synthetic construct
  misc_feature 1..1761: note = Description of Artificial Sequence: Synthetic coding sequence
  source 1..1761: mol_type = other DNA
atgggtcccctcacattccgtgacgtcaaaattgaatttagtctggaggaatggcaatgcctagatacagcacagcgtaatctttatcgggatgtaatgctagaaaattatcggaatttggttttccttggcatagctgtgtcaaaacccgacctgatcacctggcttgagcaaggaaaggaaccctggaacttaaaacgccacgagatggtggacaaaacgccggtcatgtgcagtcacttcgctcaggatgtgtggccggagcatagcattaaagattctttccagaaggtgattctgcggacctatggtaaatacggacacgaaaatctccagttacgcaaggatcacaaatccgtggacgcctgcaaggtgtacaagggaggctataatgggctaaaccagtgtctgacaactaccgattcaaagatcttccagtgtgacaagtacgttaaagtttttcacaagtttccaaatgtgaacagaaacaaaatccgacataccggcaagaagcctttcaaatgcaagaaccgaggaaaaagcttttgcatgttgagccagcttacgcaacacaagaaaatccacacccgcgaatacagctataagtgcgaggagtgcggcaaagccttcaattggagctctacgctgaccaagcacaaaatcatacacaccggggagaaaccatataagtgcgaggaatgcggaaaggccttcaatcggtccagtaacctgacaaaacacaaaattattcacacaggcgaaaagccttataaatgtgaagagtgcggcaaagcattcaaccgcagtagtaccctcaccaaacacaaaagaattcatactgaagagaaaccatacaaatgtgaggaatgtggcaaagcctttaatcagttttctatactgaataagcacaaaagaattcacatggaggataaaccctataagtgtgaagaatgtgggaaggctttcagggtgttctccatcctgaagaagcacaaaatcattcatactggggaaaaaccgtataagtgcgaggaatgtggcaaagcatttaaccaattcagcaatctgaccaaacataaaattattcatactggagaaaagccttacaaatgcgatgagtgtggcaaggcctttaatcagtcttccactcttaccaagcataagaggatccatacaggcgagaagccctataagtgcgaagaatgcgggaaagcttttaaacagtcttctactttaaccgagcacaaaataatacatacgggggaaaaaccttacaaatgcgaaaagtgtgggaaggcattctcctggagttctgcatttactaagcacaaacggaatcatatggaggataaaccatataagtgtgaagagtgcggtaaggcattctcagtattttctaccctcacaaagcataaaattattcatacccgagagaagccctataaatgtgaggagtgtggaaaggcattcaaccagagttctatattcacaaaacataaaattattcataccgagggtaagtcatacaaatgcgaaaagtgtggaaatgccttcaatcaaagctcaaatctcaccgcccgcaagattatctacaccggggaaaaaccctataagtatgaagagtgtgacaaggccttcaacaaattcagcactctaattactcatcagatcatctataccggagaaaagccctgtaagcacgagtgtgggagagctttcaacaagagctctaactacactaaggagaaactccagacttag

SEQ ID NO: 141644 - DNA, 1665 bp, synthetic construct
  misc_feature 1..1665: note = Description of Artificial Sequence: Synthetic coding sequence
  source 1..1665: mol_type = other DNA
atgggacctttaacgtttcgcgatgtgaagattgagttctccctggaggaatggcagtgtctagacacagcccagcgaaatctgtaccgcgacgtgatgctcgaaaattacaggaacctggtgtttctggtgatgtgttcacattttgcacaggatgtatggccagaacacagcatcaaggattcctttcagaaggtgattcttaggacatatggcaaatacggccatgagaatcttcagctgcggaaggaccacaagtcggtagacgcctgcaaagtgtacaagggcggctacaatggtctaaaccagtgcctgactaccacggacagcaagatttttcagtgcgataagtacgtgaaggtgtttcataagttccctaatgtcaaccgcaataaaattcgtcatacgggaaagaaacccttcaagtgcaagaatcgcggcaagagtttttgtatgttgagccaactcacccagcacaagaaaatacacactagagagtactcatacaagtgtgaagaatgcgggaaggctttcaactggagttccacattaaccaagcacaaaataattcatactggcgaaaagccttacaaatgtgaggagtgcggaaaagcattcaaccgatcctctaacctgacgaaacataagatcattcacaccggggaaaagccatacaagtgcgaggaatgcgggaaagcattcaatagaagttctactcttactaaacataagcgaattcacaccgaagagaagccatataaatgcgaagaatgcggaaaggctttcaaccagttttcaattttgaataagcacaagcgtattcatatggaggacaagccctacaaatgtgaggagtgcgggaaggcttttcgcgtcttcagcatccttaagaagcataaaataattcacacaggagagaagccctacaagtgcgaggaatgtggtaaggcatttaatcagttcagcaacctaacaaaacacaagatcatccatactggtgagaagccctacaaatgtgatgaatgtggcaaggcatttaatcagtcttcaaccctaacaaagcataaacggattcatacaggcgaaaagccctacaagtgtgaagaatgcggcaaggctttcaagcaatcatcaaccttgacagaacataaaattattcataccggagagaagccgtacaagtgtgagaagtgcggcaaagcgttctcttggtcttctgcctttacgaagcacaagcgcaatcatatggaggataagccctataagtgtgaggaatgcggaaaagcattctccgtgttcagcactcttacaaagcacaaaattatccacacccgtgagaagccctacaagtgcgaggagtgcggaaaagcatttaaccaatcctctatctttaccaagcacaaaattatccacactgaaggcaagagctacaaatgtgagaagtgtggtaacgcattcaaccaaagcagcaacctaacagcacgaaagattatctataccggtgaaaagccatataaatacgaggaatgtgataaggcatttaataaattcagtaccctgattacgcatcagattatatatactggggaaaagccatgtaaacatgagtgcggtagggcttttaacaaatccagcaactatactaaagagaaactgcagacttag

SEQ ID NO: 141645 - DNA, 1554 bp, synthetic construct
  misc_feature 1..1554: note = Description of Artificial Sequence: Synthetic coding sequence
  source 1..1554: mol_type = other DNA
atggtagataagactccggtgatgtgcagccattttgctcaggatgtttggcctgagcactccataaaggacagtttccaaaaggtcatccttcgcacatatgggaaatatggccatgaaaaccttcagcttcgcaaagaccacaagagcgtcgatgcctgcaaagtgtataaaggaggttataatggactgaaccagtgtctgactaccaccgactctaagatctttcagtgtgataagtatgtcaaggttttccataagttcccgaacgttaatcgcaacaagatcaggcataccggcaaaaagcccttcaagtgcaaaaatcgtgggaaatcattctgtatgctcagccagttaacccagcacaagaagattcatacacgggagtacagctacaagtgcgaggaatgcggcaaggcattcaattggtcttccacgctgacaaagcacaaaatcattcatacaggcgagaaaccatacaagtgtgaggaatgcgggaaagcgtttaatcggagctctaatttgactaagcacaaaataatccacaccggagagaagccgtataaatgtgaggagtgcgggaaggccttcaacaggagcagtacacttactaagcataaacggattcacaccgaggagaagccatacaagtgcgaggagtgtggtaaggctttcaaccagtttagtattctcaacaagcataagcggatacatatggaagacaagccctataagtgtgaagagtgcgggaaagctttcagggtcttttccatcctcaagaagcacaaaataattcataccggcgagaagccctacaagtgtgaggagtgcggtaaggccttcaaccagttctccaacttgacaaaacataagataatccatactggcgaaaagccttacaagtgtgacgaatgcgggaaggccttcaaccagagctccactctgacaaaacacaagcgcattcataccggcgaaaagccctacaagtgcgaggagtgtggcaaagccttcaaacagtcctctaccctcaccgagcacaaaattatccacacaggggaaaagccctacaaatgcgagaagtgtggcaaagcgttcagctggtcctctgctttcactaagcacaagaggaatcacatggaggataagccttataaatgtgaagagtgcggaaaggcattcagcgtgttctcgacactgacaaagcacaaaataattcacactcgcgagaagccctacaaatgtgaagagtgcgggaaagcttttaatcagtcttcaatatttactaaacacaagataattcacacagagggcaagtcttacaaatgcgagaagtgtggcaatgcatttaatcaaagcagtaacctgacagcccggaagatcatttatactggtgaaaagccttacaagtatgaggagtgtgacaaagctttcaataaattcagcaccttgatcacacaccagattatctacactggcgaaaagccctgtaaacatgagtgcgggagagcattcaacaaatcaagcaattatacaaaagagaaactccagacttag

SEQ ID NO: 141646 - DNA, 1863 bp, synthetic construct
  misc_feature 1..1863: note = Description of Artificial Sequence: Synthetic coding sequence
  source 1..1863: mol_type = other DNA
atggggcctctgcagttccgcgatgtggcaattgaattctcattggaggagtggcattgcctggatactgcgcaacggaacctttaccgaaatgtgatgctggagaattactcaaaccttgtatttctgggaattgtggtctcgaaacccgacctgattgcccatctggaacaggggaaaaaacctttgactatgaaacgccacgagatggtggcgaatccatccgttatttgttcccacttcgcccaggacctgtggccagaacagaacatcaaggactccttccagaaggtgattcttcgccggtatgagaaaagagggcacggtaacctgcagctgatcaaaaggtgcgagagcgtggacgagtgcaaggttcataccggtgggtacaacggcttaaaccaatgctcaacgaccactcagtccaaagtgtttcagtgcgataagtacgggaaagtgttccataagttttccaattctaatagacacaacatcagacacactgaaaagaagccattcaagtgcatcgagtgcgggaaagcattcaaccagttttccacactgatcactcacaaaaagatccacaccggcgaaaagccctacatatgcgaggagtgcgggaaagctttcaaatattcctctgctctcaacacacataaacgtattcatacaggcgagaagccctataaatgcgataagtgcgataaggcatttattgccagcagtacattgtccaaacacgaaatcatccacacaggaaaaaaaccttacaagtgtgaagaatgcgggaaagctttcaatcagagttccaccctcacaaaacacaagaaaattcataccggcgagaagccatataagtgcgaagaatgcggcaaagccttcaaccagtccagcacacttacaaagcacaagaagatccacactggcgaaaagccatatgtgtgtgaggaatgtggaaaggcctttaagtacagtcggatcctgacaactcataagcggatccacacgggcgaaaaaccctacaagtgtaataagtgcggcaaggccttcatcgctagtagcactctcagccgacacgaatttatacacatgggaaagaaacactacaagtgtgaggagtgtggcaaggctttcatctggtccagtgtcctgacacgacacaaaagagtgcataccggtgagaagccttataagtgtgaagagtgcggcaaggccttcaaatacagcagtactcttagctcccacaaacggtcgcatacaggagaaaaaccctacaagtgtgaggaatgcggcaaagctttcgttgcgagttccacactcagcaagcacgagataatccataccggcaaaaagccctacaagtgcgaagaatgtggtaaggcgtttaaccaatcctcatctctgaccaaacataagaaaatccatacaggggaaaagccatacaagtgtgaagagtgcggcaaggccttcaatcaatcttccagcctgactaaacataagaagatacacacaggagaaaaaccatataagtgcgaggagtgtggtaaagcttttaaccagtcatccaccttaattaaacacaagaaaatacacactagagagaaaccttacaagtgcgaggagtgtggtaaggcatttcacctgagtacacacctgacgacacataagattctgcacacaggtgagaaaccatataggtgcagggagtgcgggaaggccttcaatcactccgccacactttcatcacataaaaagattcactctggggaaaaaccttatgaatgtgacaaatgcggaaaggctttcataagtccctcttctttgtccagacatgaaattattcatacgggcgagaaaccatag

SEQ ID NO: 141647 - DNA, 1779 bp, synthetic construct
  misc_feature 1..1779: note = Description of Artificial Sequence: Synthetic coding sequence
  source 1..1779: mol_type = other DNA
atgggacctctacaatttcgcgatgttgctatcgaattctcattagaagaatggcactgcctcgacaccgcacagcgaaatctctacagaaatgtgatgctggagaactattcaaaccttgtgtttctgggcatcgtggtgagcaagcctgacctcattgcgcacctggaacaggggaagaaaccattaacgatgaaacgccacgagatggttgcgaacccaagcgtgatttgtagccacttcgctcaggacctgtggccagaacaaaatatcaaggactcgttccagaaggtaatcctccgaagatatgagaagcggggccatggaaatctccagctcatcaaacgttgcgaatctgtggatgagtgtaaggtgcatacaggcggttacaacggcctgaatcagtgcagtacgacaacacagagcaaagtctttcaatgcgacaaatacgggaaggtattccacaagtttagcaactctaataggcacaacatcaggcataccgaaaagaagccgtttaagtgcatagagtgcggcaaagcctttaaccagttctcgaccctcattacccataaaaaaattcacacgggggaaaaaccttacatatgtgaagagtgcggcaaggcctttaaatacagctctgccctcaatacacataaacgtattcataccggtgagaagccctacaagtgcgacaaatgtgataaagcctttattgcttctagcactctgagcaaacacgagattatccacacaggcaagaagccatataagtgtgaagaatgtgggaaggctttcaatcaatctagcacactcaccaaacacaagaaaattcatacaggagaaaagccctataaatgcgaagagtgtggcaaggcatttaaccagtcttccacattgactaagcataaaaagattcataccggcgagaagccgtacgtgtgcgaggagtgcggaaaggcatttaagtacagccgaattttaaccacccacaaacgcattcatacaggggagaaaccctacaagtgcaacaaatgcgggaaggccttcattgcctccagcaccttatctcggcacgagttcatccacatgggtaagaaacactacaagtgtgaggaatgcggaaaggctttcatttggagtagcgtgcttaccagacataaacgcgtccacaccggtgaaaagccttataaatgtgaagaatgtggaaaagcatttgtggctagctccactctttcaaaacatgaaataatccacactggcaagaaaccatacaagtgcgaggaatgtggaaaagctttcaatcagtcatcttcattaacaaagcacaaaaagatccataccggggagaagccatacaaatgtgaagagtgtggcaaggccttcaatcagagtagtagcctgaccaagcacaaaaagattcatactggagagaagccgtacaagtgcgaggagtgcggcaaagcctttaaccaaagcagcaccctgatcaaacacaagaagattcatacacgggaaaagccttacaaatgcgaggagtgcggaaaggcattccacttaagtactcatctcaccactcacaagatcctccatacaggcgaaaaaccttaccgctgtagagagtgcgggaaggcattcaatcactcagccacgctctcatcgcataaaaagatacattccggcgagaagccgtatgagtgcgacaagtgcggaaaagcattcatctctcccagtagccttagccgtcacgaaattatccatactggcgaaaaaccctag

SEQ ID NO: 141648 - DNA, 183 bp, synthetic construct
  misc_feature 1..183: note = Description of Artificial Sequence: Synthetic coding sequence
  source 1..183: mol_type = other DNA
atggttgccaatcctagtgtgatctgttcccatttcgcccaggacctgtggcccgaacagaacataaaggatagcttccagaaggttatcctgcggcggtacgaaaaaagagggcacggaaatctccagctgatcaagcggtgtgaatctacgccctctgaaaaggaaaaaaagaaaaaatag

SEQ ID NO: 141649 - DNA, 1719 bp, synthetic construct
  misc_feature 1..1719: note = Description of Artificial Sequence: Synthetic coding sequence
  source 1..1719: mol_type = other DNA
atgccgggtcctctcggcagcctagagatgggggtgctcaccttccgagatgtcgcactcgaattctctttagaggagtggcagtgcctggacaccgcccaacaaaatctttaccgaaacgtgatgctggagaattacagaaacctcgtgtttgtaggcatagcagcctctaagcccgacctgatcacatgtcttgagcagggcaaggagccctggaacgtgaaaagacacgagatggtaactgagcccccggtcgtgtactcatattttgcacaggacctctggccaaaacaggggaagaagaattactttcagaaagtgatcctccgaacatataagaaatgtgggcgcgagaacttacagctgcgcaagtattgtaaatccatggatgagtgtaaggttcacaaggagtgttataatggactgaatcagtgtcttacaacaacccagaacaaaattttccagtacgacaagtatgtcaaagtttttcataagtttagcaattccaaccgacataaaatcggacacacgggcaaaaaaagtttcaagtgcaaggagtgtgaaaagagtttctgtatgctgtcccaccttgcacaacacaagcggatccacagtggtgagaagccatacaaatgcaaggaatgtggcaaagcctacaatgaagcgagtaacctctctactcacaagcgaatccacaccggcaagaagccatataagtgtgaggagtgtggaaaagccttcaatcgcctgagccacctgactacccacaagatcattcatacaggcaagaagccttataaatgcgaggaatgcggaaaggcgtttaaccaatcagctaacctgacaactcacaaacgcattcacacaggggagaagccgtacaaatgtgaggagtgcgggcgcgcgttctcccaatctagcactctcactgctcataaaattatccatgctggagaaaaaccatacaagtgcgaagaatgcgggaaagccttctcccagagctcaactttgactacacacaagatcatccataccggagagaagttttacaagtgtgaagaatgcggcaaagctttctcccgcttgtcccacctgactacccacaagcgcatccattccggcgaaaagccatataaatgcgaggaatgtggcaaggcctttaaacagtcaagcacacttactacgcacaagcgcatccatgccggagagaagttttataagtgtgaggtgtgctccaaagccttctcgcgattttcccacctgacaactcataaaaggatccacacgggcgaaaaaccttacaaatgtgaagaatgtggtaaggcctttaacctgtcgtctcaattaaccacacataagatcattcatactggagagaaaccatataagtgcgaagagtgtggaaaagcatttaaccaaagctctactctgtctaagcacaaggttatacatacaggcgagaagccttacaagtgtgaggagtgtggaaaggcttttaaccaatcttcccatcttacgacgcataagatgatccataccggagagaaaccgtacaagtgcgaagagtgcggtaaagcatttaacaattcctcaatcctaaaccggcataaaatgattcacacaggagagaaactctacaagccagaaagttgtaataacgcttgtgataatattgcgaagattagcaagtacaaaagaaattgcgctggtgagaaatag

SEQ ID NO: 141650 - DNA, 3114 bp, synthetic construct
  misc_feature 1..3114: note = Description of Artificial Sequence: Synthetic coding sequence
  source 1..3114: mol_type = other DNA
atgtccttctggtcagagaaatgtaccaggttgatcttatatgaccttaagattgccttgaagaatggctctttgaccttttgggatgtgaccatcgagttcgctcttgaggaatggcagtgcctggatatggcacaacagaacctctaccgcaacgtgatgttagaaaactatagaaacttggttttcctgggtatcgccgtgtcgaagctagatctgattacttgcctcaagcagggaaaggagccatggaatatgaagcggcatgagatggtgacaaagcctcccgtgatctccagccacttcactcaggatttttggccagatcaatccatcaaggattccttccaagagattattctgcgaacatacgccaggtgtggccataaaaacttgagactgaggaaggactgcgagtccgttaatgaaggcaagatgcatgaagaagcctataacaaactgaatcagtgctggaccactacacaaggtaaaatcttccaatgcaacaagtatgtcaaagttttccataagtacagtaacagtaaccgctacaagatcatccacacaggtaagaagccttacaagtgtgaggagtgcggaaaagctttcaaacaatcaagccatctgactcgccacaaggcaatacacaccggagagaagccctacaaatgtgaggagtgtggtaaggcctttaaccatttctctgctctgagaaaacaccagatcattcacaccgggaagaaaccctataagtgtgaggagtgcggtaaggccttctcccagtcttctactctcaggaaacatgaaattatccacacagaagagaaaccatacaagtatgaagagtgcggaaaggccttttccaacctgtctgcgctgcggaagcacgaaatcatccacacaggccagaaaccgtataagtgtgaggagtgcggcaaagcgttcaagtggtcaagcaagctcacggttcacaaggtaatccatacagcggagaagccgtgcaagtgcgaagagtgcggcaaggcttttaagcgctttagtgctctgagaaagcataaaattatccacactggtaaacaaccgtacaagtgcgaggaatgctccaaggcattcagtaattttagtgctctgcgcaaacacgaaatcatccataccggcgaaaaaccttacaaatgtgaggaatgcgggaaagctttcaagtggtcgagcaagctgaccgtccacaaggtcatccacatggaagagaaaccgtgcaagtgtgaggagtgtgggaaggcttttaaacatttcagcgccctgagaaagcacaagattatccacactggaaaaaagccatataagtgtgaggagtgcggaaaagcctttaacaacagtagcacattgatgaaacacaagattatccatacgggcaagaagccctacaagtgtgaagaatgtgggaaagcctttaaacagtcatcccaccttactaggcacaaagccatacacaccggtgagaaaccctataagtgcgaggaatgtgggaaggcctttaaccatttctccgctcttcggaaacaccagatcatccatacagggaaaaagccctacaaatgtgaggaatgcggcaaggccttctcacagtcgagtaccctgcgtaaacatgagatcatccacacaggtgaaaaaccctataagtgcgaggagtgtggtaaagccttcaaatggtcaagtcatctcaccagacataaagtgatccataccgaggagaagccttataagtgcgaggaatgtggcaaggctttcaatcatttctccgcattgaggaagcacaagatcatccacacgggtaaaaagccgtacaaatgcgaggaatgtggcaaggctttctcacagagttccaccctccgcaagcacgaaatcatccacacgggggaaaaaccttacaagtgtgaggagtgcggaaaggcctttaaatggagctccaagttaactgtccacaaggtgattcataccgctgagaaaccatgcaagtgcgaggagtgcggtaaagcattcaaacattttagtgccctgaggaagcacaaaattatccacacagggaagaagccttataaatgcgaagaatgtggcaaggcttttaataattcgtccacgctgcggaaacacgagatcattcatacaggggagaagagttacaaatgcgaggagtgcgcactccgcaaacacgaaattattcacacgggcaagaaaccctataagtgtgaagagtgcggaaaagccttcaataattcaagtaccctgcggaagcacaaaatcatctatactgggaagaaaccatataagtgtgaagagtgtggcaaagcttttaaacagtcttcacatctgaccaggcacaaggctgtgcacaccggagagaagccttataagtgcggagaatgcgggaaggcgttcaacaacagctccactcttaagaagcacaagctcatccacacccgggaaaagagctacaagtgtgaagagtgcggtaaggcttttagtaacttctccgccctcaggaaacataaaatcatacatacaggcgaaaagccttacaagtgcgaagagtgtgaatgtgggaaagccttcaataattctagcaccctgatgaagcacaaaatcattcacactggcgaaaaaccatacaaatgcgaagagtgtggaaagggatttaacaactttagtacactcatgaagcacaagattatccacacaggagaaaagccctacaagtgtgaagagtgcggaaaggcttttaaacagagttctcacctaaccaagcacaagtccattcataccggagagaagccttataagtgcgaggaacgaggcaaggcattctcccacttttccagactgactaagcatagaattattcacactggcaaaaagccatacaaatgtgaagagtgcggagaaaagccttacaagtgcgaggaatgcggtaaggcttttaaccagagtagtcatctgacgcaacacaagaccatccacacaggcggaaagacctacaaatgcgaggaatgcggaaaggccttcaaccacctgagtgctctgacaaagcacaaaatcattcacaccggagaaaagccatag

SEQ ID NO: 141651 - DNA, 3021 bp, synthetic construct
  misc_feature 1..3021: note = Description of Artificial Sequence: Synthetic coding sequence
  source 1..3021: mol_type = other DNA
atgtctcggaggaaacagtcaaaccctcgacagataaaacgttccttaggggatatggaggctagagaggaggttcagctggttggggcctcacatatggagcagaaagccacagcgccagaagctccttctcctccttcggctgacgtgaattctccccctccgctgcctcccccaacatcccccggcggccccaaggaactggaggggcaggaaccagagcctcgcccgactgaggaggagcctggatcgccatggtccggtcctgacgagttggaacctgtggttcaggatggacagcggcgcattagagcccggctttcccttgccactgggttgtcgtggggaccgtttcacggatccgtgcagactcgtgcctcttctccgagacaggctgagcctagccctgcactgaccctgctactagttgatgaagcttgctggttgcgcaccctacctcaggccctaactgaagccgaagcaaatacggaaatccacaggaaagacgatgccctgtggtgcagagtgacgaagcccgtgcccgccggagggctactgtcagtgctgctcaccgctgagccgcatagtactcccggccacccagttaaaaaagaaccggcagagcccacctgtccagcccccgcgcatgacttgcagctcttaccgcagcaagctgggatggcgtctattctggcaaccgccgtaattaataaagatgtgttcccatgcaaggactgcggcatttggtataggagtgagcggaatctacaggcacacctcctttattactgtgcctcccggcagggtaccggcagcccggccgccgccgcaaccgatgagaaacccaaagaaacatacccgaacgagagagtgtgtccctttccccagtgtaggaaatcttgtccaagcgcctcatccctggagatacatatgcgatctcattccggcgagcgtccttttgtgtgcctgatatgtctttcagcctttacaacaaaggcaaactgcgagaggcacttaaaagtccacacagatacactgtctggcgtgtgccactcttgtgggttcatctcaaccacaagggacattctttattctcatttggtgaccaaccatatggtgtgccagcccggttcaaagggtgaaatctactctccaggcgctggccatcctgccacgaagctgcctcctgatagcctaggctcctttcagcagcagcacacagcactccagggaccactcgcatcggcagaccttggtctggctcctacccctagtcccgggctggatcggaaagcgctggccgaagccacaaatggagaggctagggcggagccgttggcacagaacggcggatcgtccgaacccccagccgcgcctaggagtataaaagtggaggcagtagaggagccagaagccgctcccatattggggcccggtgagccaggcccccaagctccttcaaggacccccagccctcgcagccccgcgcccgcacgagtgaaggctgaactgagctctcctaccccgggtagctccccagtgccaggtgaactgggtctagccggcgccctgttcctcccacagtacgtgtttggtccagacgcagcacccccagctagtgagatcttagcaaaaatgtccgaactggtgcattcccgacttcaacaaggcgccggagccggggcaggaggcgcacagaccggcttgtttccaggggcgccgaagggggccacttgctttgagtgcgaaattaccttctctaacgtcaataactattatgtccacaagcggctctattgcagtggacgcagggcaccagaggacgcaccagccgctaggcggccgaaggcacctccaggcccagctagggcccctcccggtcagccagccgaacctgatgcccccagatcctctcccggacctggggctagggaagaaggggctggcggagccgcaacacctgaggacggggcggggggacgagggtctgaaggatctcagtcgcccgggagctctgtagatgacgcggaggatgacccctcacgaacactgtgcgaagcctgcaatatccgcttcagtcgccacgagacatatacagtgcacaaaagatattattgcgcctccagacacgatcccccgcccaggcgtcccgccgccccacctggcccccctggtcccgctgctcctcccgcgccatccccggctgccccagtgagaacaagacggaggcggaagctgtatgagcttcacgcagcaggagcccccccccctcctcctcccggccacgctccagcgccggaaagccctcgacccggctccggcagcggttctggacccggactggcaccagcgagatctcctggccccgcggcagacggtcccatcgatctgtccaagaaacccagaaggccattaccgggagctcctgcaccagcactcgctgactatcacgagtgtactgcatgcagagtaagttttcatagcttagaagcttacctagctcataagaaatactcatgtcccgccgcgccgcctccaggggccctggggctgcctgccgcggcctgcccttactgcccacccaacggccccgtgaggggggatctgttggaacactttcgcctcgcacatggactactgctaggtgcacccctggccggccccggagtggaagccagaacccccgccgacagagggccatcccccgccccagctcccgccgcgagtcctcagccgggctccaggggacctagggacggtctgggtcctgaaccgcaggagcccccacctggaccccctccgagcccggcggctgcacctgaggccgtgcccccgccgcccgctccgccttcatactctgacaagggggtgcagactccatcaaagggaactccagctccattaccgaacggtaatcatagatattgccggctctgcaacataaaatttagcagtttgtcaacttttattgcacataaaaagtactactgctcgtcacacgctgcagaacacgtcaaatag

SEQ ID NO: 141652 - DNA, 2649 bp, synthetic construct
  misc_feature 1..2649: note = Description of Artificial Sequence: Synthetic coding sequence
  source 1..2649: mol_type = other DNA
atgtactactgcagtggtcgccaacgcgaggctgccccagtttccgaggagaacgaagattccgcccaccagatctcttcattgtgccctttcccacagtgcactaaatcttttagtaacgctagggctttagagatgcacctgaattcacatagtggcgtgaaaatggaggagttcctgccccccggtgcttctctgaaatgcacggtgtgctcatatactgccgattctgtgataaacttccatcagcatctgttcagtcatctgacgcaagcggcatttcgttgcaatcactgtcactttggttttcagacacagcgtgaacttctgcagcaccaggagttgcatgtgccctccggtaagctgcccagggaatccgatatggagcatagcccgagtgctactgaagattccttgcagcctgccaccgacctgctgaccagaagcgagcttcctcagtctcagaaggccatgcaaaccaaggatgcatccagcgatacagagcttgataagtgcgagaagaagacacagttatttctcaccaaccagcgaccggaaattcagcctacaaccaacaaacagtctttcagctacacaaaaattaagtccgaaccctctagtcctcgactagcaagtagcccagttcaaccaaatatcgggccatcttttcccgttgggcctttcctgtctcaattctccttcccccaggacattaccatggtaccacaggcgagtgaaatcttggccaagatgtctgaactagtgcaccggcggctcagacacggaagctctagctacccaccggttatttactcaccactgatgccgaaaggggcaacctgcttcgagtgtaacattacattcaataacttagataattacctggtgcacaagaagcactactgttctagccgctggcaacaaatggccaagtcccctgaatttccttcggtgagtgagaagatgcctgaggcactgtccccgaacacaggccagacctccatcaatctgctgaacccagccgcccactctgctgacccagaaaatccacttctgcagacctcttgcataaattcgagcaccgttctggacctgattgggcccaatggcaagggccacgataaggacttttccacacagaccaagaagctgagcaccagctcaaacaacgacgacaaaattaatggcaaaccggtggatgtgaagaatccttccgttcctctggtggacggtgaatccgaccccaataaaactacgtgtgaggcgtgtaacatcaccttctcacgccacgagacatacatggtccacaaacaatattactgtgccaccaggcacgatcctcctttgaaacgttcagctagtaacaaggtgccggcaatgcaacggacaatgcgaacccgaaagaggcggaagatgtatgaaatgtgtttgccagagcaggaacagcgacctcctctggttcagcagaggttcctcgacgtcgcgaatctgaacaacccgtgtaccagtacccaagagccgaccgagggcctcggagaatgctatcatccgagatgtgacattttccctggaattgtttcgaaacatcttgagactagcctgacaattaacaaatgcgtccccgtgtcaaaatgtgatacgacacactccagtgtctcctgcctcgaaatggatgtgccaattgacttgtcaaaaaagtgcttaagtcaatcggaacggacaaccacatcccctaagcgcctcctcgactatcatgagtgcaccgtatgcaaaatttcattcaacaaagtggagaattacttggcccataaacagaacttttgccctgtcacagctcatcagcggaacgatctcggacagctggatggcaaggtattccctaacccagaatcagagcgcaactcccccgacgtgagttacgagagatctataatcaaatgtgaaaaaaacgggaacttaaagcagccctccccaaacggcaaccttttctcctcgcacctagcaacgcttcagggtttaaaggtcttttcagaggctgcacagctgatcgctactaaggaggaaaataggcatctgtttctgccccagtgtctgtatccgggtgcgatcaaaaaggcgaaaggcgccgaccaactgtcaccttactacgggataaaaccatcagactacatctccggatccctggtgatccacaatactgatattgaacaatctcgcaatgccgagaacgagagccctaaggggcaggccagcagcaatgggtgcgccgcactcaagaaagattccctgccccttctgcccaaaaaccgtggaatggtgatcgtcaatggcggacttaagcaggatgagcgaccagcagccaacccacagcaagagaacatctcccagaatccacaacatgaggacgatcacaagtctccctcttggataagcgaaaaccccctagctgctaatgaaaacgtgagccccggaataccttcggcagaggaacaactctctagtatcgcaaaaggtgtgaacggttcctctcaggctcccacctctggtaaatactgtaggctgtgcgatattcagtttaacaacctgtccaactttataacacacaagaaattctattgcagttcccacgccgccgagcatgtgaaatag

SEQ ID NO: 141653 - DNA, 3456 bp, synthetic construct
  misc_feature 1..3456: note = Description of Artificial Sequence: Synthetic coding sequence
  source 1..3456: mol_type = other DNA
atgagtcgtagaaaacaatcaaagccccggcagataaagcggcctctcgaagacgccatcgaggacgaagaggaagagtgccctagcgaagaaaccgacatcatctctaaaggggacttcccgctggaagagagcttttcaacggagttcggacctgagaatctctcgtgcgaagaggtcgagtacttctgtaacaagggtgatgacgagggcatccaggaaacggccgagagtgatggtgatacccagtcagagaaaccaggccaaccaggggtggagaccgatgattgggacggacccggcgagttggaagtgttccaaaaggatggcgagcgcaagatccaaagccgacagcagctgcccgtgggcactacttggggcccattcccaggaaaaatggaccttaacaacaattctttaaagaccaaggcccaggttccaatggtcctgacggccgggccaaagtggctgctggacgtaacatggcagggtgtggaggataacaagaacaattgcattgtttatagtaaggggggacagctgtggtgcacaactacaaaggctatctctgagggggaagaactaatcgcgttcgttgtcgatttcgatagtagactgcaggccgcttctcagatgaccctcactgaaggcatgtacccagcacggctactcgatagcatccaactgctgccccagcaggccgctatggcaagtatacttcctaccgcaatcgtgaataaggatatttttccctgcaaatcgtgcggtatttggtatcggtccgagcgaaatctgcaggctcacctcatgtattattgcagcggacgtcagcgcgaggccgctccggtgagcgaggagaacgaagattcggctcatcagataagctccttatgcccgtttccgcaatgcacaaaatctttttcaaatgcgcgcgccctggagatgcacctgaactctcactccggggtcaagatggaggagtttttgcctccaggagctagcttaaaatgcacggtatgtagctatacagcagattcagtgataaacttccaccagcatttgttcagccaccttacgcaggctgcattcagatgcaatcattgccacttcggttttcagacccaaagggagttgcttcagcaccaggagcttcacgtcccctctgggaagctgccacgtgaatcagacatggaacactcccccagcgccactgaggattccctgcaaccggccactgacctgctcactcgatcagagcttccccaatcccagaaggctatgcaaacaaaggacgcttccagcgacaccgagctcgataagtgcgagaaaaagactcagctctttcttacaaatcagagacctgaaatccagccaaccacaaataaacagagcttctcctataccaagatcaaaagcgaaccaagttccccacgactcgcgtccagccctgtgcaacccaacattggtccatcctttcctgtggggccttttctgagccaatttagcttccctcaggatattaccatggtaccccaggcttcggaaatcctcgccaaaatgtcggagctggttcatcggcggctgagacatggttcatctagttatccacccgtaatctattcccccctaatgccaaagggggctacctgctttgaatgcaacataacatttaacaacctcgacaattatctcgtgcataagaagcactactgttccagtcgttggcagcagatggcgaaatcacctgagttccccagtgtatccgagaagatgcccgaagcactgtcccctaacaccggacagacctcaattaacctactgaaccctgctgcacattcagccgatccggaaaatcccctactgcagacgtcttgtatcaactcctcgacagttctggatctaataggacccaacggcaagggacacgataaagatttttcaacccaaacaaaaaaactgtctacatctagcaacaacgatgacaagatcaacggaaagcccgtcgacgtgaagaatccttctgtgcccctggtggatggggaatctgaccccaataagacaacttgcgaggcatgtaacatcaccttctcaagacatgagacctatatggtacataagcagtattactgcgctaccagacacgatcctcccttaaaaaggagcgcctccaacaaggttcctgccatgcagaggactatgaggaccaggaaacggcggaagatgtacgagatgtgtctaccggagcaggagcaaagaccgccacttgtgcagcaacggttcctggatgtggctaacttaaacaacccatgcacatctacacaggaacctacagaaggactcggggaatgttatcacccgcggtgtgatatctttcctggaatcgtgagtaaacacctcgagacaagcctaacaattaataaatgcgtacctgtgtctaagtgtgataccacgcattcctccgtgagttgcctggagatggacgtgccgatcgatttaagtaagaaatgtctctctcagtccgagcgcacaacaacctctcccaagcgcctcctcgattaccacgagtgcacagtctgcaagatttcattcaacaaagtcgagaattatttggctcacaagcagaatttttgcccggtgactgcgcatcagcgcaatgatctgggacagctagatggcaaagtgttccctaacccagaatccgagcggaacagtcctgatgtgtcctatgaacgatcaattattaagtgtgagaaaaatgggaacttgaaacagcccagtccaaatggcaacttgttttcgagccacttggctacacttcagggtctgaaggtgtttagtgaagccgcacagctgattgccacaaaagaggagaatagacacctttttctgccccagtgcctttaccccggagctataaagaaagctaagggtgctgatcaactgtcaccatattatggtatcaagccttcagattacatctccgggtccctggttattcataacaccgatatagagcaaagccgcaatgcggaaaacgagagtcctaaggggcaggcttcttcaaatggctgtgcagcattaaaaaaagactctctgccgctcctgcccaaaaaccgcggaatggtgatcgtgaacggcgggctaaagcaggatgagaggcctgcagcgaacccacagcaggaaaatatcagtcagaaccctcagcacgaagacgatcacaaatccccttcctggataagtgagaacccactggctgccaatgaaaacgtgtcacctggtatcccatcagcagaagaacagctcagtagcatcgccaaaggagtcaacggctcgagccaggccccaacctctggcaaatactgccgcctgtgtgacatacaattcaataacctttcgaactttataacacacaagaagttctattgttccagtcacgccgcagaacacgtcaagtag

SEQ ID NO: 141654 - DNA, 3060 bp, synthetic construct
  misc_feature 1..3060: note = Description of Artificial Sequence: Synthetic coding sequence
  source 1..3060: mol_type = other DNA
atggacctgaacaataactctctgaaaacaaaggcccaggtcccaatggtactcacggcaggcccaaaatggctcttggatgtaacttggcagggtgtggaggacaataagaacaactgtatcgtgtatagtaaaggcggccagctgtggtgcacgacaaccaaggccattagcgaaggagaagagctgattgcgtttgtggttgacttcgatagccgcctgcaggccgcatctcagatgactttgaccgaggggatgtacccagctcggctgttagactctattcagttactccctcagcaagcggccatggccagcatccttccaactgccattgtgaacaaggatatcttcccttgtaaatcatgtggcatctggtaccgctcggaacgcaacctgcaggcacaccttatgtattactgctcaggaagacagcgagaagctgcgcccgtttcggaagagaatgaggactcggcacaccagatcagctcactctgtccgttccctcagtgcaccaaatccttttccaacgcccgggctctggagatgcatctgaatagccacagtggcgtgaaaatggaggagtttctccccccgggtgcctccttgaaatgcaccgtgtgctcctatacagctgattcagtcatcaactttcaccaacacttgttttctcacttaactcaagctgcattccgctgcaatcattgtcattttggctttcagactcaacgggagctgctgcagcatcaggagcttcacgtgccgtctgggaagctgccccgggaatcagatatggaacactcgccaagtgcaactgaggatagtctgcagccagccactgaccttctcacaaggagcgaactgccacagagccaaaaagctatgcagaccaaggacgcttcgtcagacacagaactggataaatgtgagaaaaagacccagctgtttctgaccaaccagaggccggagatccagccgacaactaataagcagtctttttcttatacaaagatcaagtccgagccttcttcaccccggctcgcatcctcgcccgttcaaccaaatattggccctagtttccccgtcgggcccttcctctctcagtttagctttcctcaggatattacgatggtgcctcaggcaagtgagatcctggccaagatgtcggagctggttcatcggcggttgagacatggaagctcaagctaccccccagtgatttattctccactgatgcccaaaggcgccacctgttttgaatgtaacattacctttaataacctggacaattacctggtgcacaaaaagcactattgttccagccgatggcagcagatggcaaaatcacccgagttcccaagtgtgtccgagaaaatgcccgaagccctgtcaccaaacacgggtcagacaagcattaacctcctcaaccctgcagcccactcagccgatccagagaatccgctcctacagacgagctgtattaattcctctactgtccttgaccttataggcccgaacggtaaaggacacgacaaagatttcagcacccaaacaaagaaactcagtacttcctccaacaatgatgataaaatcaacggtaaacctgtggacgtgaagaatccttctgttccactcgttgacggcgagtctgaccccaacaaaactacttgcgaagcttgtaatataacattctcccgccacgaaacttatatggtgcataagcagtactactgtgctacaaggcatgacccccctttaaagaggtcagcttcaaataaggtccccgcgatgcagcgcaccatgcggaccaggaagaggcgtaagatgtacgagatgtgtctgcccgagcaggagcagaggccacctctagtccagcagcgattccttgacgtggccaacctcaacaatccatgtacctctacccaggaaccaactgaagggctcggggagtgttatcatcctcgttgcgacatttttcctggaatcgtttccaaacacctggaaacttccctcaccataaacaagtgcgtgcctgtaagcaagtgtgacaccacccactcttctgtgagctgtctggagatggacgtgccaattgacctcagcaagaagtgtttgagccagtctgagcggaccactacctccccaaagaggctcctggattaccacgaatgtacagtttgcaagatatcatttaacaaggttgagaactacctggcacacaagcaaaatttctgccccgtgaccgcacaccagcggaacgacctagggcagctagatgggaaggtgttcccaaatcctgagtcggagagaaactcaccagatgtgagctacgaacgttccatcattaagtgcgaaaagaatggaaacctcaagcaacccagccctaacgggaatctgttctcctcccacttggccacattacaggggctcaaagttttctcagaagcagcccagttaattgcaaccaaggaagaaaacagacacttgtttttgcctcagtgcctctatcctggtgcaattaagaaggcaaaaggggcagatcaactctcgccctattatggcatcaaaccatctgactacatctcaggttctcttgtgatccacaatacagatattgagcagtcgagaaatgctgagaatgagagtccgaagggacaggccagcagtaatgggtgtgctgcgctgaagaaggactccctgccactgctcccaaagaaccgcggcatggtgattgttaatggcgggctaaagcaggatgaaagacccgcggcgaatcctcagcaggagaatatcagtcagaaccctcagcatgaagacgaccacaagagcccttcttggatttctgagaaccctctggctgccaacgagaatgtttccccaggcatcccctcggcggaagaacagttgagctcaatcgcaaaaggagtcaacggatcgagtcaggcacctacttctgggaagtactgcaggctgtgcgacatccagttcaacaacctgtcaaacttcatcactcacaaaaagttctattgctctagtcatgcggcagaacatgtgaagtag

SEQ ID NO: 141655 - DNA, 3060 bp, synthetic construct
  misc_feature 1..3060: note = Description of Artificial Sequence: Synthetic coding sequence
  source 1..3060: mol_type = other DNA
atggacctcaataataactctctaaagacaaaggcacaggtccccatggttctgacagcgggcccaaagtggctgctggatgtgacttggcagggcgtggaagacaataagaataattgtattgtttattcaaagggcggccagttgtggtgtaccaccacgaaagccatctcagaaggcgaggaactgatcgcttttgtggtggactttgattcccgactacaggcagcatcacagatgaccctgaccgagggaatgtaccccgcaaggctgttggattctatccagttacttccgcagcaggcagcaatggccagtatccttcccaccgccattgtaaacaaagacatttttccatgtaagtcttgtggcatttggtacaggtctgagcggaatctgcaggctcatcttatgtactactgttcagggagacagcgcgaggccgcacccgttagtgaagaaaacgaggattccgcacatcagattagctccctgtgccccttccctcagtgcacaaagtctttcagcaatgctcgggcactcgaaatgcacttgaattcacattcaggagtgaaaatggaggaattcttgccacccggagcaagtctcaagtgtaccgtctgcagctatacggccgactccgtcattaactttcaccaacatctgttcagccacttgactcaggccgcttttcgatgtaaccattgtcattttggctttcagacccagcgcgagctgttacagcaccaggaactgcacgtgccttcaggtaaactgccgcgggaatctgacatggagcattcaccctcagcaacggaggacagtctgcagcccgcaactgacctgcttacacgctctgagctgcctcagtcgcagaaggccatgcagactaaagatgccagctccgacacagagctggataagtgtgaaaagaaaactcagctgtttttaactaaccaacgcccggagattcaacctacaacaaataagcagagcttttcatatacaaagataaagtccgagccctcctcaccaagattggcaagctcccccgttcaacccaatataggtccaagtttcccagtgggaccctttctgtcacaattttcgttccctcaggatatcactatggtgccgcaggcgtcagaaattttggcaaagatgtccgaactcgtccacagacggctgaggcacgggtcatcgtcatacccacccgtgatctactctccactgatgcccaagggtgctacctgttttgaatgcaacatcacattcaataaccttgataactacttggtgcataaaaagcattattgtagttcccggtggcaacagatggccaagtcgccagaattcccttccgtcagcgaaaagatgccggaggctctgagtcccaacaccggacagacgtccatcaatctgttaaatcctgctgcacacagcgctgaccctgaaaatcctctattgcaaacctcttgcatcaacagcagcaccgtcctggacctgatcggccccaatgggaaaggacatgataaagacttctccacccagacaaagaaattaagtacatcttctaacaatgatgataagataaacggaaagcctgtcgatgttaagaaccctagtgttcctctagtcgacggagagagcgacccaaataaaaccacttgcgaagcctgcaacatcaccttctcccgccatgagacgtacatggtccacaagcaatattactgcgctacccgacacgacccacccctgaaaagatccgcatcaaataaggtcccagcaatgcagagaactatgaggacccggaagcggcggaaaatgtacgagatgtgtcttcccgagcaggaacagcggccaccgctggttcagcagaggtttttggatgtggctaatctgaataatccctgcacaagtactcaggaacccacagagggcctgggcgagtgttatcacccccgttgcgacatcttccctggcattgtctccaagcacctcgagacctcgctgaccatcaacaaatgtgttccggtttcaaagtgcgataccacccactccagcgtgtcctgccttgaaatggacgtcccaattgacctctctaaaaagtgtttatcgcagagcgagagaactaccactagccccaagaggctgcttgactaccacgagtgtactgtttgcaaaatctcatttaataaagtagaaaactatctggcccataaacagaacttctgtccagtcaccgcacaccagagaaatgatctcggtcagcttgacggtaaggttttcccaaacccagagagtgagaggaattccccagacgtgtcctacgagagatcaattattaagtgcgagaaaaacgggaacctaaaacagccctcgcccaatggcaacctatttagttcgcatttggccactctgcaggggcttaaagtgttttccgaagccgcacagttgatagccacgaaagaggagaatagacatttgttcctgccacagtgcctataccccggcgcgatcaaaaaagccaagggcgctgatcagttgagcccttattatggcataaagcctagcgactatatttctggctccctggtgatacataacacagatatcgaacagtccaggaatgctgagaacgaatctccaaagggtcaagcttcaagcaacggctgcgccgccctgaaaaaagattctttaccccttctccctaaaaatcgagggatggtgatcgttaatggcggcctcaaacaggatgagaggcctgcagcaaacccgcagcaagagaatatctcgcaaaacccacagcatgaggacgatcacaagtctccatcctggataagcgaaaatcccttagcagccaacgagaacgtctcgcctgggattccctccgcggaggaacagctgtcctcaatagccaaaggggtcaacggatcgagccaagcccctacttctggcaaatattgccggctctgcgacattcagttcaacaatttatccaattttattacacacaagaagttctattgttccagtcatgcggcggaacatgttaagtag

SEQ ID NO: 141656 - DNA, 2418 bp, synthetic construct
  misc_feature 1..2418: note = Description of Artificial Sequence: Synthetic coding sequence
  source 1..2418: mol_type = other DNA
atggacgaggacggattggaactgcagcaagagcccaattccttcttcgacgccactggggccgacggaacccatatggatggtgaccagatcgtcgtagaagttcaagagacagtcttcgtgtccgatgttgtggatagtgatataaccgtccataactttgtgcccgatgatccagattccgttgttatccaagacgttattgaggatgtggtcatcgaggatgtacaatgcccggacatcatggaggaggccgacgtctccgagaccgtaattattcccgaacaggtactggacagtgatgttactgaggaggtctcactggctcattgtactgtaccggatgacgttcttgccagtgatatcactagtgcttccatgagcatgccagaacatgtgcttaccggcgattccatccacgtttcagacgtcgggcacgttggccacgtaggacatgtcgagcacgtagtgcacgattccgtcgtagaggctgagatagttacagatccactcaccaccgatgtcgtctccgaggaggtgctggttgccgactgtgcctcggaagccgtcatcgacgccaacgggattccggtcgaccagcaagatgacgataaaggaaactgtgaggattacctgatgatttcgctcgacgacgccgggaagattgagcacgacggttccagcggaatgacaatggacaccgagagtgagatcgacccatgtaaggtcgacgggacatgccctgaggttatcaaggtatacatcttcaaggctgaccccggtgaagacgatttgggaggcactgtcgacatcgtagagtcagaaccggaaaatgaccacggcgtggagcttcttgaccagaactcatctatcagggtgcctcgagagaaaatggtttacatgacagttaatgacagccaacccgaagatgaggacctaaatgtcgcggagatcgctgatgaagtttacatggaagtgatcgtcggcgaggaggacgcggcggccgctgccgcagctgccgcagtgcacgagcaacaaatggacgacaacgagataaagacatttatgcctatcgcctgggcagccgcctatggaaataactctgatggcatcgagaatcgaaacggcaccgcgagcgcactgttgcatatcgacgagagtgcaggactcggaaggcttgcaaagcaaaaacctaagaagcggcgaaggcccgattcgcggcaataccaaactgcaattatcattgggccagatgggcaccctctgactgtctatccatgcatgatctgcgggaagaaattcaagtctagggggtttctcaagaggcatatgaagaaccatccagagcatctggccaaaaagaagtaccggtgcacggattgtgactatacaactaacaagaagatcagtcttcataaccacctcgagtctcacaagctgaccagtaaggccgagaaggctatcgaatgtgacgaatgtgggaagcacttcagccacgccggggctctgttcacacacaaaatggtgcacaaggagaagggtgcaaataagatgcacaaatgcaaattctgcgaatatgaaacagcagaacagggcttgctgaacagacacctgctggcagtgcatagtaagaattttccgcatatctgcgttgaatgtggcaaagggtttagacacccctctgaattgaaaaagcacatgaggattcatacaggcgagaagccctaccaatgccagtactgcgaatatcggagcgccgattcttctaatctgaaaacccacgtcaaaactaagcacagtaaagagatgccttttaaatgtgacatctgcctgctcacattctccgacaccaaagaggtgcagcagcatgcgttaattcaccaggaatctaaaactcatcagtgcctgcactgtgaccataagtcgtccaattcatctgacctgaagagacacataatttccgttcacactaaggactatccacacaagtgtgacatgtgcgataaaggttttcatagaccctcagaattaaagaaacacgtcgccgcccacaaggggaagaaaatgcatcagtgtcgccactgtgattttaagatcgcggatccattcgtgctgtcaagacacatactgtctgtgcataccaaggacctgccttttaggtgtaagaggtgccgaaaaggatttcggcaacagagcgagttaaaaaagcacatgaagacgcactcaggacgaaaggtgtaccagtgtgagtattgtgagtatagcaccacggatgcctcggggttcaaaagacacgtgatcagtattcacaccaaggattacccacacaggtgcgagtactgtaagaaaggcttccggaggccgtccgagaaaaaccagcacatcatgcgacatcacaaggaggtaggattgccctag

SEQ ID NO: 141657 - DNA, 2268 bp, synthetic construct
  misc_feature 1..2268: note = Description of Artificial Sequence: Synthetic coding sequence
  source 1..2268: mol_type = other DNA
atggatgaagatggactggagctacagcaggaaccaaatagctttttcgacgccacaggggcagacggcacccatatggacggggaccagatagtcgtagaagtgcaggaaacagtctttgtgagtgatgtcgttgactcagacatcacagttcacaacttcgttccagacgaccctgattccgtggtgattcaggacgtaatcgaggatgttgtgatcgaagacgtgcagtgcccagacatcatggaggaggccgacgtctcagagacagtgattatacctgagcaggtcctcgattctgatgtgactgaggaagtgtctctggctcattgtactgtgccagatgatgtgctcgctagtgacatcacctctgcttctatgagcatgcctgaacatgttttgacaggtgattccatccacgtaagcgatgtgggccacgtaggtcacgttgggcacgtcgagcatgtcgtccacgactccgttgttgaggcggagatcgttactgatccactgaccaccgacgtggtttcagaggaagtgctggtcgcagactgtgcttccgaggctgtcattgatgccaacggcatcccagtcgaccaacaggacgacgataagggcaactgtgaggactatctgatgattagctgcggtaccgtcgacattgttgagtcggagccagaaaatgatcatggcgtagagttgctggatcagaacagtagcatccgtgtgcctagggaaaagatggtctacatgacagttaatgattcgcagcccgaggatgaagatctcaatgtagcagaaattgccgacgaggtgtatatggaagtaattgttggagaggaggacgccgcagccgccgccgctgcggcagcagtacatgagcaacagatggacgacaatgagatcaaaaccttcatgcctatcgcctgggcagccgcttacgggaacaatagcgatgggatcgaaaatcgcaacggcacagcgagtgcattactgcacattgatgagagcgccgggctcggtaggttagccaaacaaaagcctaagaaacggcggaggccagactctcgtcagtaccagacagccataattatagggccagacggccaccctttgaccgtttacccgtgcatgatttgtggcaaaaaattcaagagccggggctttttgaagcgtcacatgaaaaatcaccctgagcatttggctaagaaaaaatataggtgcaccgactgcgattacacgaccaacaaaaagatctctctccacaaccacctggagtcacacaaattaacttctaaggctgagaaagctattgaatgcgacgaatgtgggaaacacttttcacacgcgggggcattgttcacccataagatggttcacaaggagaagggggctaataagatgcataaatgcaagttttgcgagtacgagaccgctgagcagggactgctgaataggcatcttctagccgtgcattccaaaaacttccctcatatctgtgtcgaatgtggcaagggatttagacaccccagtgaactcaaaaagcatatgaggatccatactggagagaaaccgtaccagtgccaatactgcgagtacagatctgccgattcctcaaatctgaagacccacgtgaagaccaagcactccaaagaaatgcccttcaaatgcgacatttgtttattaacgttttcggacacaaaggaggttcaacagcacgcactgatccaccaggaaagtaagacacaccagtgcctgcactgcgatcataaaagtagtaattcttccgatctaaaacgtcacatcattagcgtgcatacgaaggattacccacacaagtgcgatatgtgcgataaaggcttccacaggccaagcgagctcaagaaacatgtcgccgcccataagggcaaaaagatgcaccagtgtagacactgtgacttcaagatagccgaccctttcgtactgtcacggcatatattgtccgttcatactaaggatttaccctttagatgtaaaaggtgccgcaaagggtttcgtcaacaatctgaactgaagaagcacatgaagacccactctgggcggaaggtctaccagtgtgagtattgtgagtattctacgaccgatgccagtgggttcaagcgccacgtgatttcaatccacactaaagactatcctcaccgctgcgaatactgtaagaaaggttttcgaaggccttctgaaaaaaatcagcacataatgcgccatcataaggaagtgggcctgccctag

SEQ ID NO: 141658 - DNA, 2418 bp, synthetic construct
  misc_feature 1..2418: note = Description of Artificial Sequence: Synthetic coding sequence
  source 1..2418: mol_type = other DNA
atggatgaggacggtctcgagctccagcaggagccaaatagctttttcgacgctactggagccgacggcactcacatggatggcgatcaaattgtcgtggaggtgcaagaaactgtgtttgtctccgatgtagtggactcagatatcacagtgcataattttgtgccagatgacccagacagcgtggtgatacaggacgtgatcgaggacgtggtgatcgaagacgttcagtgtccagatatcatggaagaggccgacgtctcagagactgtgatcattccagagcaagtgttagacagcgacgtcaccgaggaggtaagcctcgcccactgcactgtgcctgacgacgttcttgcgagcgacattactagcgcttctatgagtatgcccgaacatgtgttaaccggggattccattcacgtcagcgatgtagggcacgtggggcatgtgggacacgtggagcatgtggtacatgacagcgtagtggaagcggaaatagtcaccgaccctctgaccactgacgtagtgagtgaagaagtgttggtcgccgattgcgccagtgaagccgtcatagatgctaatggcatacctgttgaccaacaggacgatgataagggcaactgtgaagactatctgatgatctctctggacgacgctggcaagattgagcatgacgggtcttctggcatgacaatggacactgaaagcgagatcgacccgtgcaaagtagacgggacctgtcccgaggtcattaaagtgtatattttcaaggccgaccccggagaagatgatcttggcgggaccgtagatatcgtcgagtccgagcccgagaatgaccatggagttgagctgttggatcagaactcatctattagagtgccccgcgagaaaatggtctatatgaccgtcaacgactcccagccagaggacgaagaccttaatgtggcagagattgccgatgaagtctatatggaggtgatcgttggggaggaagacgctgccgcagcagcggccgccgctgccgttcatgaacagcagatggacgataacgaaatcaagacattcatgcctatagcctgggccgccgcctacggcaataactcagacggcattgaaaatagaaacggtaccgcctcagctcttcttcacattgatgaatctgcagggctcggcaggcttgcaaagcagaagccgaaaaaacggagacgacccgactcaagacagtatcaaactgccatcatcatcggacccgatgggcaccccttgacggtatacccatgcatgatctgcggcaagaaatttaagtcaagagggtttttgaaacggcatatgaagaatcatcctgaacacctggccaaaaaaaaatatcggtgcaccgactgcgattacacaacaaataagaaaatcagtttgcacaatcaccttgaaagtcacaaactcacatccaaggcagagaaggctattgagtgtgacgaatgtggaaagcatttctcacacgctggagccctgttcacacacaaaatggtccacaaggagaaaggagctaataagatgcacaaatgtaagttttgcgagtacgagaccgccgaacaggggctactgaatagacacctgctagcggtccatagcaagaattttccacatatttgtgtcgagtgtggtaaggggtttcggcatccctcagaactgaagaaacatatgaggatccacaccggggagaagccttaccaatgccagtactgtgaataccgaagtgccgactccagtaacctgaagacacacgtgaagacgaaacattccaaagagatgccatttaagtgtgacatctgcctcctgaccttttcagacaccaaggaggttcagcagcatgcactgatccaccaagaatctaagactcaccagtgtctgcactgtgatcacaagagcagtaattctagcgacttgaagcgccacatcatatcggtccataccaaggactacccccacaagtgcgatatgtgtgacaaaggctttcaccggccctccgaactgaaaaaacatgtggcagcccacaagggtaagaagatgcaccagtgtcggcactgtgatttcaaaattgctgaccccttcgtgctgtccagacatatcctttctgtacacaccaaagatctgcccttcaggtgtaaacgatgtaggaaagggttccggcagcagtctgaactcaaaaagcacatgaaaacacactccgggagaaaggtgtaccaatgtgaatattgtgaatattctactacagacgcatccggcttcaagcgccatgtgatctccatccatacaaaggactaccctcaccggtgtgaatattgtaaaaagggtttccgtcgcccgtcagagaagaatcagcatataatgagacatcacaaagaggttgggctcccatag

SEQ ID NO: 141659 - DNA, 2418 bp, synthetic construct
  misc_feature 1..2418: note = Description of Artificial Sequence: Synthetic coding sequence
  source 1..2418: mol_type = other DNA
atggatgaggatggactggagctgcagcaagaacctaattcgttcttcgacgcaactggagcagacggtacccatatggatggggaccagattgttgtggaggtacaggagaccgtgtttgtgtccgacgtggtggattccgatattaccgtgcacaattttgtgcccgacgatcccgacagcgtagtgatccaggacgtaattgaagacgtcgttatcgaggatgttcagtgcccggatatcatggaggaagctgatgtcagcgaaacagtgataatcccggagcaagtattagactccgacgtgaccgaggaggtgtcccttgcccattgtaccgttccagacgacgtcctggcctctgatatcacgagcgcgtccatgtccatgcccgaacatgttctgacaggtgattccattcacgtgagcgacgttggccatgtggggcacgttgggcacgtcgagcacgtcgttcacgactccgtcgtcgaggccgagattgtgacagatcctctgacaactgacgtggtctccgaagaggttttagtagccgactgcgcaagcgaagccgttattgatgctaatggtatccccgtggaccagcaggatgatgataaagggaactgcgaagactacttaatgatttctcttgacgatgccggcaaaatcgagcacgatggcagttctggcatgactatggataccgagtcagaaattgacccttgtaaagtggatgggacctgccctgaggtgataaaggtttacatttttaaggcggatcctggcgaagacgatctcggcggcactgttgatatcgtggagtcggagcctgaaaatgaccatggcgtcgaacttctggaccagaactcatcgattagagtgcctagggagaagatggtgtacatgacagttaacgattcacagcccgaggacgaggatttgaatgtggcggagattgcggatgaggtgtatatggaagtgattgtgggtgaggaggacgctgctgctgctgctgcagctgcagctgtccatgagcaacagatggacgataatgaaattaagactttcatgcctatcgcctgggcagcagcttatgggaacaattccgacggaatcgaaaatcgcaatgggaccgcatccgcactgctccacattgatgaatctgctggccttggacgtttggcaaagcaaaagccaaaaaaacggcgtagacccgacagccggcagtatcagactgccataattatcggtcctgacggccatccactgactgtctatccatgtatgatctgtggtaagaagtttaagtcccggggattcttgaaaaggcacatgaagaaccaccctgagcacttagctaagaaaaagtatagatgcacagattgtgactacacaactaacaaaaagatttcactgcacaatcatctggagagtcataagctgacatcaaaggccgagaaggccattgagtgcgacgagtgtggcaagcactttagccacgccggtgccctgttcacgcacaaaatggtacataaggaaaagggtgccaataagatgcacaagtgcaaattctgcgaatacgagaccgccgaacagggactgctgaatcgtcatctgcttgcagttcatagcaaaaatttcccccacatctgcgttgagtgtggaaaagggtttagacacccaagcgaattgaagaagcacatgcggatacacaccggtgagaaaccatatcagtgtcagtattgcgagtaccgatccgcagatagcagcaacttaaagacacacgtgaaaaccaagcatagcaaagagatgcctttcaagtgtgatatttgtcttcttactttcagcgatactaaagaagtgcagcaacacgctttgatccatcaagaaagcaagacacaccagtgcctgcactgcgaccataaatcttctaattcttctgacctgaagagacacattatttccgtacacactaaggattacccccacaagtgcgacatgtgtgacaagggattccatcgcccttctgaactcaaaaaacatgttgccgcacacaagggcaagaaaatgcatcagtgtcggcactgcgacttcaagattgcagacccatttgtgctctccagacacattctgtccgtgcacacaaaagatttgcctttcaggtgcaagaggtgtagaaaaggttttaggcaacaaagcgaattaaagaaacacatgaagactcacagcgggaggaaagtttatcaatgcgagtattgcgagtatagcactactgacgccagcggttttaagagacatgtcatttctattcacacgaaggactacccacaccgttgtgagtactgcaagaaaggcttccgacgccctagcgaaaagaaccagcacatcatgcgacaccataaggaggtgggcctcccctag

SEQ ID NO: 141660 - DNA, 99 bp, synthetic construct
  misc_feature 1..99: note = Description of Artificial Sequence: Synthetic coding sequence
  source 1..99: mol_type = other DNA
atggacgaggatggactggagttacagcaggagcctaactcttttttcgacgctacaggggctgacggcacacacatggacggcgaccagattgtatag

SEQ ID NO: 141661 - DNA, 408 bp, synthetic construct
  misc_feature 1..408: note = Description of Artificial Sequence: Synthetic coding sequence
  source 1..408: mol_type = other DNA
atggatgaagatgggttggagctgcagcaagagcctaattctttttttgacgccaccggcgccgatggcactcacatggatggggatcagatagtcgtggaagtacaggagaccgtctttgtgagcgacgtagttgactccgacatcacagtgcataactttgtccccgatgaccccgattcagtggtgatacaggatgtgatcgaggatgtggtgatcgaggacgttcagtgcccagacattatggaggaggccgatgttagcgagacagtgataattcctgagcaagtactggattctgacgtgactgaagaggtgtcccttgcacattgtacggtaccggatgatgtgctcgctagcgacatcacttctgcctccatgtctatgcccgagcatgttctgacatag

SEQ ID NO: 141662 - DNA, 1584 bp, synthetic construct
  misc_feature 1..1584: note = Description of Artificial Sequence: Synthetic coding sequence
  source 1..1584: mol_type = other DNA
atggacacggagtcagagattgatccgtgtaaagtcgatgggacctgccccgaagtgattaaggtgtacatctttaaagctgaccctggagaagacgacctgggcggaaccgttgacatcgtcgagagtgaaccagagaacgaccatggggttgagctcctggaccagaactcctccatacgggttccaagggagaaaatggtctatatgacagtgaacgattcgcagccagaagacgaggatctcaacgttgccgagatcgccgatgaggtctacatggaagtgattgtgggcgaggaagatgcagccgccgccgctgcagccgccgctgtgcatgagcagcaaatggatgacaatgagattaagactttcatgcccatcgcctgggcagcagcttacgctataattatcgggcctgatggccatcctttgacagtgtacccctgcatgatctgtggcaagaagtttaaatcaaggggattcctcaagaggcacatgaagaaccaccctgaacaccttgcgaagaagaagtaccgatgtactgattgtgattatacaacgaacaaaaagatttccctccacaatcatcttgaatctcacaaattgacgagcaaggctgaaaaggctatcgagtgtgacgagtgtggaaaacacttttctcacgccggggctttgtttacacacaaaatggtgcataaagagaagggggcaaacaagatgcacaaatgtaaattctgcgagtacgagacagcggagcagggtctgttaaacagacacctcctggctgtgcactctaagaattttccccacatttgtgttgaatgtggcaaaggcttccgtcatccttccgaactcaaaaagcatatgcgcattcacacaggcgaaaaaccataccagtgccaatactgcgaatataggtccgcagacagtagcaatctcaaaacacatgttaaaacaaaacactctaaggaaatgcccttcaagtgcgatatttgtctgctcacctttagcgatactaaagaggtccagcaacacgcactgatccatcaggaaagcaagacccaccagtgcctccattgtgatcacaaaagctcaaacagcagtgatctgaagcggcatatcattagtgtacacactaaagactaccctcataagtgcgatatgtgcgacaagggtttccacaggccgagcgagctgaaaaagcacgttgcagctcataagggtaagaagatgcaccagtgcaggcattgtgatttcaaaatcgcggacccctttgtgttgtccagacacattctgtcggttcacacgaaggacctacccttccgttgtaaaaggtgtaggaagggctttcgccagcagtcagaattgaaaaagcacatgaaaactcattcggggaggaaggtttaccaatgcgagtattgcgagtattctacaaccgacgctagcggattcaaacggcatgtcatttccatccacacaaaggattacccccatcggtgcgaatattgcaaaaagggcttcagaaggcctagtgagaagaatcagcacatcatgcggcatcacaaggaggttggcctgccctag

SEQ ID NO: 141663 - DNA, 789 bp, synthetic construct
  misc_feature 1..789: note = Description of Artificial Sequence: Synthetic coding sequence
  source 1..789: mol_type = other DNA
atggacgaagatggcttagagctgcaacaggaaccaaacagtttttttgatgcgacaggtgccgacggaactcacatggatggtgatcaaatcgtggtggaggtacaggaaaccgtcttcgtgtcagacgttgtggactctgacatcacggtgcacaattttgtgcccgatgaccctgatagtgtagtaatacaagatgtcatagaagatgtggtcatagaagatgttcaatgtccagacataatggaggaagcagacgtatcggaaaccgtcattattccggagcaggttctcgacagcgacgtcaccgaggaggtatccctcgctcattgtactgtacctgatgacgtgttagcttctgacattaccagcgcaagtatgtcaatgcccgagcatgtcctcactggcgatagcatccatgtttcagatgttggacatgtggggcacgtcggacacgtggaacatgttgtccatgactctgttgtcgaagcggagatagtgaccgatccattgactactgacgtcgtgtccgaggaagtgctcgtcgctgactgcgcatctgaggctgtgatagatgccaacggcatcccggtggaccagcaggacgacgataagggcaactgtgaagactatctgatgatcagttgcaataatagtgacggtatcgagaataggaatgggaccgcaagcgcccttctccatattgacgaatcggctgggctgggtcggctcgctaagcaaaaaccaaagaagagaaggagacctgatagtcgccagtatcagacttag

SEQ ID NO: 141664 - DNA, 1731 bp, synthetic construct
  misc_feature 1..1731: note = Description of Artificial Sequence: Synthetic coding sequence
  source 1..1731: mol_type = other DNA
atgaccatggacacagaatcggaaattgatccatgtaaagtggacggaacctgtcccgaggtaatcaaagtgtatatattcaaggctgacccgggtgaggatgaccttggtggaaccgttgacatcgtcgagtccgagccagagaatgatcatggagttgagctgcttgatcagaattcctccatcagggtccccagagagaaaatggtttatatgactgttaatgacagccaacccgaggatgaggatctgaacgttgccgagatcgccgacgaagtctatatggaggtgatcgtgggggaagaggacgcagcagcggccgccgccgccgctgccgttcacgaacagcagatggatgacaacgagatcaagaccttcatgccaattgcatgggcggcagcgtacgggaacaacagcgatgggattgaaaaccgaaacggcacagcatctgctctccttcatatagatgagtccgctgggctagggcggctggcaaaacagaagccaaaaaagcgacgaaggcctgactcccggcagtatcagactgctattatcattgggcccgatggacaccccctgaccgtgtacccgtgcatgatctgcggaaagaagttcaaaagccgggggttcttgaaacggcacatgaagaaccaccccgagcaccttgccaagaagaagtaccgctgcacagattgcgactacaccactaacaagaaaatttccctgcacaatcacctggaatctcacaaactcacatccaaagccgaaaaagccatcgagtgtgacgagtgcgggaaacatttctcgcatgccggcgctttgtttacacacaagatggtacacaaagagaagggtgctaataagatgcataaatgcaaattttgcgaatatgaaaccgccgagcagggcctccttaatcggcatctcctagcagttcactccaagaatttcccccacatctgcgtggaatgcgggaagggatttcggcaccccagtgaattaaagaaacatatgaggattcacaccggcgagaagccgtatcaatgccagtattgcgaatatagaagtgctgacagtagcaacctgaaaacccatgtgaagaccaaacatagcaaggaaatgcccttcaagtgcgacatatgtctgctgaccttctcggacactaaggaggtacagcagcacgctcttattcaccaggagagcaagacgcatcagtgtctgcattgtgaccacaagtcctcaaactcatccgatctgaaaaggcacattatctctgtccataccaaggactaccctcacaagtgtgacatgtgcgataagggctttcaccggccgtccgagctgaaaaagcacgtagcggcccacaaaggaaagaagatgcatcagtgcaggcactgtgattttaaaattgcagatccctttgtcctgagtcgccacatactgtctgtgcataccaaggacttgccatttcggtgtaagagatgtagaaaagggtttagacagcagtccgagctcaaaaagcatatgaagacacatagcggcagaaaggtataccaatgtgaatactgtgagtacagcacgaccgacgcatctggcttcaagcggcatgtgatatcaattcataccaaagattatccacacagatgtgaatattgtaagaagggattccgtcgtccttcagaaaaaaatcagcatatcatgcgccatcataaagaagtgggtctgccctag

SEQ ID NO: 141665 - DNA, 2535 bp, synthetic construct
  misc_feature 1..2535: note = Description of Artificial Sequence: Synthetic coding sequence
  source 1..2535: mol_type = other DNA
atggacgaggacggactggaactacagcaggagcccaacagctttttcgatgccaccgatcgggtgagcttctgccatcccgggtggtccaccgtggctccctccggaagcactgctacgtccgccagtcaggcccaggtgatttgctctgcgagccgcgttaccggagcaaccggagctgatggaacacacatggacggcgatcagatcgtcgtggaggtccaggagacagtgttcgtgagtgatgtcgttgactccgacataaccgtgcacaacttcgttcccgacgacccagacagcgtggtgatccaggacgtcatagaggacgtcgtgatcgaggacgttcaatgtcctgacattatggaggaggcggatgtgagcgagactgtgatcatccccgagcaggttcttgacagcgacgtaacagaagaggtttcactcgcacattgcaccgttcccgatgacgtgctcgccagcgatataacctcagcaagtatgtctatgcccgagcatgtgctgacaggggactcaatccatgtcagcgacgtcggccatgttggtcatgtcggtcacgtagaacacgttgtgcacgattctgtagtggaagccgagatcgtaaccgatcccttgaccaccgacgtagtttccgaagaggtgcttgtggcagattgcgcgtcagaagcagtaattgatgcaaatgggatccctgtagatcagcaggatgatgataaaggaaattgtgaggattatctgatgatttctctggacgacgctggcaaaattgagcatgacgggagttccgggatgactatggatacagagtcagaaattgacccttgcaaagtggatgggacatgccctgaggtgatcaaggtttatatttttaaggcagatccgggagaagatgatctcgggggaactgtggacatcgtggaaagcgagcccgagaacgaccacggtgtggaactgcttgaccagaatagttctattcgcgttccaagggagaaaatggtgtatatgacagtgaacgacagccagcccgaggacgaagatctcaacgtcgcagagatagcagacgaagtttatatggaagtcattgtgggggaagaggacgcggcagccgctgctgccgccgcagccgtgcacgagcagcaaatggatgataacgaaatcaaaaccttcatgcctatcgcttgggctgcggcatacggcaataattcagatggcattgagaataggaatggaaccgcgtccgccctcctgcatattgacgaaagcgcaggtcttgggagactggccaaacagaagccaaagaagaggagacggcctgattctaggcagtaccagactgcaatcatcatcggccctgacggccatcccctgacggtctacccttgtatgatctgcgggaagaaatttaagagccgagggtttcttaagaggcatatgaagaaccatccagagcatcttgccaagaagaaataccggtgcactgactgcgactacacaactaacaaaaagatttcgttgcacaatcacctggagtcccataagttaactagcaaggcggaaaaagcaatcgaatgtgatgaatgtgggaagcacttttctcatgcaggagccctgttcacgcacaagatggttcacaaagagaaaggcgcaaataagatgcataagtgcaaattttgcgaatacgaaacagccgagcagggtctgcttaatcgacatctgctcgccgtgcacagtaagaacttcccccatatttgcgtggagtgcggtaaaggcttccggcacccttccgaattgaaaaaacacatgagaatccatactggcgagaagccatatcaatgccaatactgcgagtaccgcagcgcagattcgtccaatctgaaaacacacgtcaagacgaaacacagcaaagagatgccctttaagtgcgatatctgtctgttaactttttctgatacaaaagaagttcagcagcatgccttgatccatcaggagtctaaaacacatcagtgtctgcactgcgatcacaaatcctccaactcatccgaccttaagagacacatcatttccgttcatacaaaggattacccccataagtgcgatatgtgcgacaaaggctttcaccgtccttctgagctaaaaaagcatgtggctgcacacaaggggaaaaaaatgcaccagtgtagacattgcgactttaaaatcgccgatccattcgttttgagtcgacatatcctgtctgtgcacacaaaagatctgcccttcaggtgcaagcgttgtagaaaaggcttcaggcagcaatcagaactcaaaaagcatatgaagacacatagcggcagaaaagtgtatcagtgcgaatactgcgagtactctacaaccgatgcatctgggtttaagcggcacgtgatttccatccacaccaaagattatccccatcgctgcgagtattgtaagaagggcttcagacgtccatctgagaagaaccagcacattatgagacaccacaaggaagtcggactaccttag

SEQ ID NO: 141666 - DNA, 522 bp, synthetic construct
  misc_feature 1..522: note = Description of Artificial Sequence: Synthetic coding sequence
  source 1..522: mol_type = other DNA
ggaggctgttcccaatacttacttttgttcgtggatgacgccggcaagatcgaacacgacggctcgtccggaatgaccatggacacggaatccgaaatcgacccctgtaaggttgacggtacatgccctgaagtgatcaaagtttacatcttcaaggctgatcccggggaagacgaccttggaggcacagtggatatcgtcgaaagtgaaccggagaacgaccatggcgtcgagctgctcgaccagaacagcagtatcagagttccgagagagaagatggtatacatgacagtcaacgacagccaacccgaggatgaggatttgaatgtggcggagatcgctgatgaggtctacatggaggtgatcgtgggcgaggaagatgccgcagccgcagcggcagccgccgcagtccacgagcagcaaatggacgataatgaaatcaaaacctttatgccaattgcctgggccgccgcttacgggaacaactcagacggcattgagaatcgcaacgggacggcatag

SEQ ID NO: 141667 - DNA, 2406 bp, synthetic construct
  misc_feature 1..2406: note = Description of Artificial Sequence: Synthetic coding sequence
  source 1..2406: mol_type = other DNA
atggacgaagatgagttcgagcttcaaccacaggaacccaactcattctttgatggtataggtgctgatgccacgcacatggatggcgatcaaatcgttgtcgaaattcaggaggccgttttcgtctcgaatatcgttgatagtgatatcaccgtgcacaacttcgtgcccgacgaccctgattccgtcgtgatacaggatgtggtggaagatgtcgtgatcgaagaagatgtacaatgctctgatatcctggaagaggccgatgtgagcgagaacgtcataattcccgagcaagtcttggacagcgacgtgactgaggaagtctctctcccacactgcactgttccagacgatgtcttggcaagcgatattacaagcacgagcatgtccatgcccgagcacgtacttacttccgagagcatgcacgtatgtgacataggacatgtcgagcacatggtgcacgatagcgtcgtggaagccgagattatcacagacccccttacttctgatattgtgtctgaggaagtgcttgtcgccgactgcgcacctgaagcagtgatcgacgcaagtgggatctccgtagaccagcaggataacgacaaagcctcctgcgaggactacctgatgatctcgctggatgacgctggaaagatcgagcatgacgggtctacaggagtgaccatcgatgctgagtccgaaatggacccctgcaaggtcgatagcacctgtcctgaggttatcaaagtgtacatctttaaggcagatccaggtgaggatgatctgggcggaacggtcgacatcgttgagtccgagccagagaatgatcatggcgtggaactgctcgaccagaattctagcattagggtgcccagggagaagatggtctacatgacggtgaatgacagtcagcaggaggacgaagacctgaacgtggctgagatagcagatgaagtgtacatggaagtgattgtcggtgaggaagacgcagccgtagccgcagctgcagctgccgtgcacgagcagcagattgacgaagatgaaatgaaaacattcgtcccaatcgcgtgggcagctgcgtacggaaacaatagtgatggaatcgagaaccggaacggaaccgcaagcgccctattacatattgatgaatcagccggcttgggcaggctggctaaacagaagccaaagaaaaagagacgacctgatagtcgccagtaccagaccgctattatcattggcccagatggccaccccctgaccgtgtacccttgtatgatctgcggaaagaaattcaagtcacgagggttcttaaagaggcacatgaaaaaccatccagaacatctggcgaagaagaaataccactgtacagactgcgattataccaccaacaaaaaaatcagccttcacaatcatttggagtctcacaagctcacctctaaagccgaaaaagctatcgaatgcgacgaatgcggcaaacacttcagtcacgccggagctctgttcacccacaagatggtacacaaagagaagggagcaaataagatgcacaaatgtaaattttgtgaatatgaaactgccgagcagggcctgctgaatagacacctgctcgcagtccactccaagaattttccacacatctgcgtggaatgcgggaagggcttcaggcaccctagcgaactaagaaaacacatgcgcatccataccggtgagaagccctatcaatgtcagtattgtgagtacaggtcggcagactcctcaaatctgaagacacatatcaagacaaagcacagcaaggaaatgccctttaaatgtgatatctgtctcctgaccttttctgacacaaaggaggtccagcagcacacgttagtgcaccaggaaagcaaaacccaccagtgtttacactgcgaccataagtccagtaactcctctgaccttaaaagacatgttatctcagttcatactaaggactacccacataaatgcgaaatgtgtgaaaaaggatttcatagaccctctgaactgaagaaacatgtggccgtgcacaaggggaaaaagatgcaccaatgtaggcactgtgatttcaagatcgcggacccttttgtgctgtctcgccatattctgagtgttcataccaaagacttgccattcaggtgcaagcgatgtcgcaagggctttcgccaacaaaatgaacttaagaagcatatgaagacccactccggcagaaaggtgtatcagtgcgagtattgcgagtacagtacgaccgatgcctcagggttcaaacgtcatgtcatttctattcacaccaaagattatcctcacagatgtgagtattgtaagaaggggttccggaggccgagcgaaaagaatcagcacattatgagacaccataaggaagttggcttaccctag

SEQ ID NO: 141668 - DNA, 2406 bp, synthetic construct
  misc_feature 1..2406: note = Description of Artificial Sequence: Synthetic coding sequence
  source 1..2406: mol_type = other DNA
atggatgaggatgaatttgagctccagccccaggagccaaacagcttttttgacgggataggagctgatgccacgcacatggacggcgaccagatcgtcgtggaaatccaagaggctgtctttgtcagtaacatagtcgactctgacatcacagtgcacaactttgtacccgatgaccctgactccgtcgtgatccaggatgtggttgaagacgttgttatcgaggaggatgtgcagtgctctgatattctggaagaagcagacgtgtcagagaatgtgatcatccctgaacaagtactggattcagacgtcactgaggaggtgtctctcccccactgcaccgttcccgacgacgttctggcttcagatatcacctcaacaagcatgtccatgccagagcacgtgctgacttcagaaagcatgcacgtgtgtgacatcggccacgtcgaacacatggttcatgattcagtggttgaggccgaaattattacagaccctctcacctctgatatagtgtccgaggaggtcctcgtggcggattgtgcaccagaggcagtgatcgacgcatctgggattagcgtcgatcagcaggacaacgacaaggccagctgtgaggattatttgatgataagcctggacgacgcaggaaagatcgagcacgatggatcgactggtgtcacaatcgacgccgagtccgagatggatccatgtaaagtagattccacttgtccagaggtgatcaaagtttatatattcaaggccgatccaggggaggacgacctcggcggcacagtggacatagtagagagcgagcctgagaacgaccatggggtggagctgctggatcagaattccagtatccgtgtacctcgcgaaaagatggtctatatgactgttaacgacagccagcaagaagacgaagacctaaacgtggccgaaatcgccgatgaagtgtatatggaagtgatcgtgggtgaggaagacgccgccgtcgccgctgcagccgcagccgtgcacgaacagcagattgacgaagatgaaatgaaaacatttgttcctatcgcgtgggccgccgcttatggaaataattccgacggcatcgagaaccgaaacgggactgcttcagctttactacacatagatgagagcgctggcttggggagattagctaagcagaaaccaaaaaagaagcgtagacccgattcacggcaataccagacggctatcattatcgggcctgatgggcatcccctgacagtttacccttgcatgatctgcgggaagaagtttaaatcacgaggtttcctgaaaaggcacatgaaaaaccatccggagcacctcgccaaaaagaagtatcactgcactgactgcgattacacgaccaataagaagatatccctccacaaccacttggagagccacaagctgaccagcaaagctgagaaggctatagagtgcgatgagtgcggaaaacacttttcccatgcaggcgctctttttactcacaagatggtgcataaagagaaaggtgccaacaagatgcacaaatgcaaattctgtgaatacgaaactgcagaacagggcctgctcaacagacaccttctcgcggtgcactccaaaaacttcccccacatctgcgtggaatgcggaaagggattccggcaccctagtgagctgaggaagcatatgcgcatccacactggagagaaaccctatcagtgccagtattgtgaataccggtctgccgattcaagtaatctgaagacccacataaaaactaaacattctaaggagatgccattcaagtgcgacatttgcctgctcactttctcagacaccaaagaagtacagcagcatacccttgtccatcaggagagcaagacacaccagtgcctgcattgcgatcataagtctagtaattcatctgacctgaaaagacatgtgattagcgtccataccaaggattacccacacaagtgcgaaatgtgcgagaagggatttcaccgcccatccgagctgaagaagcacgtggccgtgcacaaagggaagaaaatgcaccagtgtaggcactgcgattttaagattgcggacccttttgtgctgagtcggcatattttgagcgtgcataccaaggatctgcctttcagatgcaaaagatgtcgaaagggcttccgccaacagaatgaacttaaaaaacatatgaagactcactctggacgtaaagtgtatcagtgcgaatactgtgagtactccactacggatgcctcagggtttaagaggcacgtcatctctatccacacaaaggactacccgcatagatgtgaatattgtaaaaagggcttccggcggccatcggaaaagaatcagcacataatgcggcaccacaaggaagtcggcctaccttag

SEQ ID NO: 141669 - DNA, 1833 bp, synthetic construct
  misc_feature 1..1833: note = Description of Artificial Sequence: Synthetic coding sequence
  source 1..1833: mol_type = other DNA
atggatgaagatgagttcgaactccagccccaggaacctaactccttcttcgatgggatcgttgatgatgctggaaagatcgaacatgatggatcaaccggggtaactatcgatgccgagtccgaaatggacccatgtaaggtcgattccacgtgccccgaagtgatcaaggtatacatattcaaggccgaccctggtgaggatgatctgggaggcacagtcgatattgtggagtcggaacccgagaacgatcacggagtggaattattagatcaaaattcatcaatcagggtgcctcgcgaaaagatggtctatatgactgtcaacgactctcaacaggaagacgaagatctaaacgtggcggaaatagccgacgaagtctacatggaagtaatagtgggcgaggaagatgcagctgtcgccgcggcagccgctgccgtgcacgaacagcagatcgatgaggacgagatgaaaacatttgtgcccatcgcttgggccgcagcttacgggaacaactccgatggaatcgagaacagaaatggaacagcatccgccctgctccatatcgatgagtccgcaggactcggccgccttgctaagcaaaaacccaagaagaagagacgccccgattcaagacagtatcaaaccgcaataatcataggacctgatgggcatccacttactgtatacccttgtatgatctgcgggaagaaattcaagtcccggggattcctcaaaaggcatatgaagaaccacccggaacacctcgcaaagaagaagtatcactgtaccgattgtgattatacaactaacaaaaagatctccctgcataaccacttagagagccataaactgacaagcaaggctgaaaaggccatcgagtgtgacgaatgcggtaagcacttttctcacgcaggggcactgtttactcacaaaatggtgcacaaggaaaagggggcgaacaagatgcataagtgtaagttttgtgagtacgagacagcagagcaggggctactcaaccgccatctgttggcagtccattccaagaacttcccacatatctgtgtggagtgcggaaaaggatttaggcacccttcagaattaaggaagcatatgagaatccacacgggggaaaaaccataccagtgccaatattgtgagtaccgctccgccgattcatccaacctgaagacacacatcaaaaccaagcattcaaaagagatgccattcaaatgcgatatctgtctgctaaccttttctgacaccaaagaggttcagcaacatacgctcgtgcaccaggaatccaaaacccaccagtgcctgcactgcgatcacaaatcttccaatagcagcgacctgaagaggcacgtcatatctgttcacacaaaagattatccccataagtgcgaaatgtgcgagaaaggtttccacaggcccagtgagctgaaaaagcatgtcgccgttcacaagggtaagaagatgcaccaatgtaggcactgcgactttaaaatagctgatccttttgttctatctaggcacatcctttccgtgcataccaaggatctgccattcagatgtaaaaggtgcagaaaggggtttcgccagcagaacgagttaaaaaagcacatgaaaacgcacagcgggagaaaagtgtaccaatgtgagtactgcgagtacagtactacagatgcctccggctttaagaggcatgtgatctccatccataccaaagattaccctcatcggtgcgaatactgcaaaaagggttttcgtcgccccagtgagaagaatcagcacattatgcgccaccacaaggaggtgggcctgccttag

SEQ ID NO: 141670 - DNA, 276 bp, synthetic construct
  misc_feature 1..276: note = Description of Artificial Sequence: Synthetic coding sequence
  source 1..276: mol_type = other DNA
atggatgaagatgagttcgagctgcagcctcaggagcccaatagcttcttcgatggaattggcgcagacgccacacacatggatggagaccagatcgtagtggagattcaggaagctgttttcgtctccaacatcgttgatagcgacattactgtgcataactttgttcctgatgaccccgatagcgtagttatacaagacgtggttgaggatgtggtcattgaagaggacgttcagtgttccgatatcttggaggaagctgatgtgtccgagtag

SEQ ID NO: 141671 - DNA, 2175 bp, synthetic construct
  misc_feature 1..2175: note = Description of Artificial Sequence: Synthetic coding sequence
  source 1..2175: mol_type = other DNA
atggacggagaccagattgtcgtggagatccaagaggcagtctttgtctcaaatatcgtcgacagtgacatcactgtacacaatttcgttcctgacgaccccgactccgtggtcatacaggacgtggtagaggatgtggtaatcgaagaagacgttcagtgcagcgacatcttggaggaggctgacgtatcagagaatgtaattatacctgaacaggttctggacagtgatgtgacagaagaagtgtctctgccgcattgcactgtcccagacgatgttctcgcatccgacatcacttcaacgtctatgtccatgcccgagcacgtcctcaccagtgagagtatgcacgtctgcgatataggacatgttgagcacatggtccatgattcggtggtggaagcagagatcatcaccgacccacttacaagcgatatcgtgtcagaggaagtgttagtggctgactgtgcccccgaggcagttatcgatgcctctgggatttcagttgaccagcaggataacgacaaagcatcatgcgaagactatttaatgatcagcctcgatgacgctggaaagatcgaacacgacggatcgacaggagtcaccattgatgctgagtctgagatggatccctgtaaggtagacagcacatgcccggaagtgataaaagtctacatcttcaaggccgaccccggcgaagacgatttaggaggcacggttgatatcgttgaatccgagcccgagaatgaccacggcgtggagctgctcgaccagaattcctctatcagggtgccgcgcgagaaaatggtttacatgaccgtcaacgatagccaacaggaggatgaggatttgtcaaacaacagcgatggaatcgagaatagaaacggcaccgccagcgcccttctgcatatagacgagtcagcgggtcttggacgactcgccaagcagaaacccaaaaaaaaacgccgtccggattcccggcagtatcaaaccgccattatcatcgggcctgatggccaccctctgaccgtttacccatgcatgatctgcggcaaaaagttcaagagtagggggtttcttaagcgccatatgaaaaaccacccggagcacctggccaaaaaaaagtaccattgtaccgattgcgattatactacgaacaagaaaatctccttacacaaccatctggaatctcataagctcacgtccaaggccgaaaaggccatagaatgcgatgagtgcgggaagcactttagtcacgctggagcccttttcacacataagatggttcacaaggagaaaggcgctaataagatgcacaaatgcaagttttgtgagtatgagactgctgaacagggtctgctgaaccggcacttgctagccgtgcactcaaaaaatttcccacacatatgtgtcgaatgtggcaaaggcttcagacatccatcggaacttagaaaacacatgcggatacatacaggcgaaaagccctatcagtgccagtattgtgagtaccgctcggcagacagtagcaatctcaagacccatataaaaaccaaacatagcaaggaaatgccatttaagtgtgatatctgcctgcttactttttccgacactaaggaggtacagcagcacacactggttcaccaggagtccaaaacccatcagtgcttacattgcgaccacaaaagcagtaatagcagcgatttgaaaagacacgtgatatctgtccacacaaaagactatcctcataagtgcgagatgtgcgaaaagggtttccaccggccttctgaactgaaaaagcatgttgccgtgcataagggaaaaaaaatgcaccagtgtcgccactgtgattttaagatcgccgaccccttcgtgctgtcccgccatattctcagcgtgcacactaaagatctcccatttcggtgtaagaggtgccgaaaaggtttccggcagcagaatgagctcaagaaacacatgaaaacacattcaggaagaaaggtttaccagtgtgagtattgtgaatacagcacaacagatgcatccgggtttaagagacacgtcatttcgatccacacgaaggactatccccacagatgcgaatattgcaagaaagggtttagacggccaagcgagaagaatcaacacataatgcggcaccacaaggaggtgggcctaccgtag

SEQ ID NO: 141672 - DNA, 1617 bp, synthetic construct
  misc_feature 1..1617: note = Description of Artificial Sequence: Synthetic coding sequence
  source 1..1617: mol_type = other DNA
atggcgcgagagctgtctgaatctacagccctagacgcacagagcacagaggatcaaatggagctgcttgtaatcaaggttgaggaagaggaggccgggttccctagttctccagatctgggatcggaagggagtcgggagaggtttcggggttttcgttatcccgaggcagcaggacccagggaggcgctgtcacggctcagggagctctgcagacagtggctccaacccgagatgcacagcaaagaacagatcctcgagctgttggtactcgaacagtttctcacaattctcccaggaaacctgcagtcctgggtcagagagcaacaccccgagagtggggaggaagtcgtggtcctgttagagtatctggagcgccagttggacgaaccggccccacaagtgtcaggagttgatcagggacaagaactactgtgctgtaaaatggccctgctgacaccagccccaggaagccagtcttcccagttccaactgatgaaagcactgcttaagcacgagagtgtgggaagccagccattacaggacagagtactgcaagtgccggtcctcgcccatggcggctgttgccgcgaggacaaagtcgtcgcttccagactgacaccagagtcacaggggctgctgaaggttgaggatgtagccctgacactgacgccggagtggacacagcaagattcctctcagggtaatctgtgtcgagatgagaagcaggagaaccacggaagtttggtcagcctgggagatgaaaaacaaacaaagtccagagacctcccgcctgctgaggaactaccggaaaaggagcacggcaagatctcttgccatttgagagaggatatcgctcagatacctacatgtgctgaagcaggagaacaggaaggacgcctccaaagaaagcagaagaatgccaccggcggcaggcgtcacatctgccacgaatgtggaaagtcttttgcacagtcgtctggactctctaaacatagacggatccacaccggagagaaaccatacgaatgtgaagagtgcggaaaagcgttcataggaagttccgctctggttatccatcagcgagtgcacaccggcgagaagccctacgaatgcgaagagtgtggcaaagctttctcccacagctccgacctaatcaagcatcagcggacccatacaggggagaaaccatatgaatgtgacgattgcggaaagacattttctcagtcttgctctctgttggagcaccacagaatccataccggagaaaagccctaccaatgttctatgtgcggaaaagctttcaggagatcatcacacctgctgcgacatcagcggattcacacgggggacaaaaatgtacaggaaccggaacagggcgaggcctggaaatcacggatggagtcccaacttgagaacgtggagactccgatgagctataaatgcaacgaatgtgaaagatccttcacacagaacacaggactaattgaacaccaaaagatccataccggcgaaaaaccctatcagtgcaacgcctgtggaaagggttttacccggatatcctatctggtgcaacatcagcgctcccatgtggggaaaaacatattatcccagtag

SEQ ID NO: 141673 - DNA, 1173 bp, synthetic construct
  misc_feature 1..1173: note = Description of Artificial Sequence: Synthetic coding sequence
  source 1..1173: mol_type = other DNA
atggcactcctcactcccgcccccggatcacagtcaagtcaattccagctgatgaaggcccttctaaagcacgagagtgtggggtcccagccgctgcaggatcgggtgcttcaagtgcctgtgttagcacacggcgggtgttgcagagaagacaaagtggtggcctcaaggctgactccggaaagccagggcttgctgaaggtggaggacgtagctctgactctgacaccggagtggacccagcaggatagttcccagggcaacctgtgtcgcgacgagaaacaagagaaccacggtagtttagtgagtctcggggatgaaaaacaaaccaagtcccgggacctcccacctgccgaagaactgccagagaaggaacacggcaaaatatcatgtcacctgagggaagacattgcacagatcccaacatgcgcagaagccggagaacaggaagggaggttacagcggaagcagaaaaatgctacaggagggcgtcggcacatttgccacgagtgtggaaaatccttcgctcaaagttctggtctgtcaaagcatcgtaggatccacactggtgagaagccttacgaatgcgaagaatgcggaaaagcctttataggctctagcgcattagttattcatcaaagggtgcatacaggcgagaaaccatatgaatgtgaggagtgcggaaaggccttttctcactccagcgatcttatcaaacatcagagaacacataccggggaaaaaccatacgagtgtgatgattgtggaaagactttctctcaatcctgttccttgcttgagcaccacaggattcatacaggcgagaagccctatcagtgtagcatgtgcgggaaggctttccgtcgttcctctcacctgttacggcaccaacgcatacacactggggataagaacgtacaggagccggaacaaggtgaggcctggaagagtagaatggaatcacagctggaaaacgtggaaactcccatgtcttataagtgcaatgagtgtgagcgatcctttacccagaataccggcctcatagaacaccagaaaattcataccggagaaaagccatatcagtgtaatgcatgtggtaaaggttttacccggatttcgtacctggtccagcaccagcgatcacacgttgggaagaatatcctgagtcagtag

SEQ ID NO: 141674 - DNA, 1617 bp, synthetic construct
  misc_feature 1..1617: note = Description of Artificial Sequence: Synthetic coding sequence
  source 1..1617: mol_type = other DNA
atggcccgggagctgtccgagtccactgcactcgatgcccagtccaccgaagatcagatggagctcctcgtgattaaagtcgaggaagaagaggcgggctttcccagctcaccagaccttggctctgagggaagcagggaacggttccggggattcagatacccagaagccgctgggcctcgcgaggcactctcaagactgagagagctctgccggcaatggcttcagcccgagatgcattcgaaggaacagattctggagttactggtccttgagcaatttctgactatcttgcccgggaacttgcagtcctgggttcgtgaacaacaccccgaaagtggagaggaagtcgtcgtgctgctcgaatatcttgagcgccaactggatgagccggcaccccaagtgagcggggtcgaccagggccaagagctcctgtgttgtaaaatggccctcctgactcccgcacctggcagtcagagttcccaattccagcttatgaaggccctgctgaaacatgagtcagttggttcacaacctctgcaggatcgggtgttgcaggtgcccgtgctcgcccatggtggctgctgccgtgaggacaaggtcgtggcctccaggcttacaccagaatcccaggggctgctgaaggttgaagacgtcgccttgactctcactccagaatggactcaacaagacagttcccagggcaatctttgccgggatgaaaaacaggaaaaccatggctcgctggtctcactgggagacgagaaacaaacaaaatccagagacctgccaccagcagaagagctgcctgagaaggaacacggaaaaatctcctgtcacctgcgcgaggacatcgcccaaatacctacctgtgccgaggcgggagaacaggaaggcaggctccagcggaagcaaaagaacgctacaggcggcagacggcatatctgccacgagtgtgggaagagctttgctcagagttcagggctgtcaaaacatcgccgcatacataccggggaaaaaccatacgagtgtgaggagtgtggaaaagcttttataggaagctctgccttggttattcaccagagagtgcacactggagagaaaccttacgagtgtgaggagtgcggaaaagcgttctcacactcttcagacctgatcaaacaccagcgcacacacaccggcgagaaaccatacgaatgtgatgactgtggcaagacctttagtcagtcttgctcattactcgagcaccacaggattcatacaggtgaaaagccataccagtgttcaatgtgtggcaaagcctttcgtagatcgtcacaccttttgaggcaccagaggattcacacaggcgacaaaaacgtgcaagaacctgaacagggggaggcgtggaaatctaggatggagtcccagttggaaaatgtcgagacccccatgtcttacaagtgtaatgagtgcgagaggtcgttcactcagaacaccggcctcattgaacatcagaagatccacaccggcgagaagccctaccaatgtaacgcatgcggcaaggggtttaccaggatttcctatctggtccagcaccagcgctcgcatgtgggcaagaacattctgagccagtag

SEQ ID NO: 141675 - DNA, 537 bp, synthetic construct
  misc_feature 1..537: note = Description of Artificial Sequence: Synthetic coding sequence
  source 1..537: mol_type = other DNA
atggcccgggaactgtccgagagcacagcactcgatgcccagtcaacagaagaccaaatggagttactcgtgattaaggtcgaggaggaggaggccgggttccctagtagcccagacctcggatccgaggggtcgcgggaaaggttccgagggttccgctaccctgaggcagccggacccagggaggccctgtctagactacgggagctttgcagacagtggcttcagcccgaaatgcattccaaggaacagatccttgagcttttagtcctcgaacagttcttaaccatccttcccggaaatctgcagagctgggtgagagagcagcatcctgagtccggagaggaggtggtcgtgcttctcgagtatctagagaggcagctggatgaacctgccccgcaggtggaacggaccggcctcgtatctgaacggtgcggtctgttccccccagagatacctgaccaatctgaggggcacagctttaacatccaagagtttttcatttctttcctttatcgtgaacccccctggcagtag

SEQ ID NO: 141676 - DNA, 993 bp, synthetic construct
  misc_feature 1..993: note = Description of Artificial Sequence: Synthetic coding sequence
  source 1..993: mol_type = other DNA
aggcagaggttccgcggttttcggtaccccgaagcggccggtccaagggaggctctgtcaaggctgcgtgagctgtgtggccaatggctccaacccgagatgcattccaaagaacaaattttggaactgctggtgctggagcagttcctcactattcttcccgggaatctgcaatcatgggttagggagcagcacccagagtctggcgaggaagttgtggtgctgctagagtatctggagcgccagctggacgaacccgcaccacaggtcgagcggaccggacttgtgtcggagcggtgcgcacgcggcatcccactgaggagcagatccagcagctccctcttcgtgctggcttttttaccttggcaaggcattacgcatagctgcagaccttttgtggtctccggcggcgaaatccagacaaaatctcgggatctgccaccagtgaagaaactgcccgagaaggaacatggcaaaatttgccacctgagggaggatatcgcccagattccaacccacgccgaggccggtgagcaggaaggtcgccttcaaagaaaacagaaaaatgctatcggctcaaggaggcactattgtcacgagtgcggcaagagctttgcgcagagctcaggattgaccaaacaccgccgcattcatacgggggaaaagccctacgaatgcgaagattgtggtaagacttttataggtagttctgctttggtgatacatcagcgcgtgcacactggggagaagccttacgaatgcgaagaatgtggaaaagtgttcagtcattcctccaacttgatcaaacatcagcggactcataccggggaaaaaccatacgagtgtgacgattgtggtaagaccttctctcagagttgttcacttctggaacatcataagatacacactggcgagaaaccctatcagtgcaacatgtgtggaaaagcgttcaggcgcaactcacacctcttaagacaccagcgtatccactag

SEQ ID NO: 141677 - DNA, 1638 bp, synthetic construct
  misc_feature 1..1638: note = Description of Artificial Sequence: Synthetic coding sequence
  source 1..1638: mol_type = other DNA
atggctcgagagccccgcaaaaacgccgcactcgatgcccaatcagccgaagaccagactgggctcctcacagtgaaagtggagaaagaggaagcgtcggccctgaccgccgaggtgcgcgcaccttgttcccccgcgcgaggccctgaaaggtctcggcaacggttcagaggtttccggtatcccgaggctgctggaccacgggaagccctcagccgcctgcgtgagctgtgcgggcaatggctacagcctgagatgcatagcaaggagcaaatcttagagctgctggtgttggaacagttccttactatcctcccaggtaacctgcagtcatgggtgagagagcagcaccccgaaagtggagaggaagtagtcgttttgctggagtatctggaaagacagctggacgagccagctccccaagtccctgtaggcgaccaggggcaggagctgctgtgttgcaaaatggcactgctgacacagactcagggatcgcaatcttcccagtgtcagcccatgaaggcgctgtttaagcatgaaagcctgggcagtcagccccttcatgacagagtcttgcaggtgccaggcctcgcccaaggcgggtgctgtcgcgaggatgcaatggtcgcaagtagattaaccccaggcagtcaagggctgctgaagatggaggatgtggccctaaccctaacccctggatggacacagctcgactcctctcaggtgaatctttatcgagatgaaaagcaggaaaatcactcttctctcgtctccctgggtggtgaaattcagactaaatcacgcgatctgccacctgtgaagaagttgccagagaaagaacacggcaagatttgtcacctgcgcgaggacattgcgcagattccgacccacgccgaagctggcgagcaggaagggcggctgcagaggaagcagaaaaacgcgattggatctcgacggcactactgccacgagtgtggcaaatcattcgctcagagcagcggcttgaccaagcaccgacgcatacataccggtgagaagccttacgaatgtgaagattgtggaaagaccttcattgggtctagtgccctggtgatccatcaaagggtgcataccggcgagaagccctatgaatgtgaggagtgtggcaaggtgttctcccactcttctaaccttatcaagcaccagcgaacacacaccggcgagaagccgtacgagtgtgatgactgcgggaagactttcagccaatcttgcagcttactcgagcatcacaagattcatactggcgagaaaccttatcagtgtaatatgtgcggcaaagcgtttcgcagaaatagccatctgctccggcaccagcgcatccacggcgataagaacgtgcagaatcccgaacatggtgagtcttgggaaagccagggccggacagagtcacaatgggagaacactgaggccccggtgtcttataaatgcaacgaatgtgaaaggtcattcactaggaacaggtctttgatcgaacaccagaaaatccacaccggcgaaaagccttatcagtgcgacacgtgcggtaaaggattcacccgcacctcttacctggttcagcaccaacggagccacgtcgggaaaaagaccctctcccagtag

SEQ ID NO: 141678 - DNA, 1173 bp, synthetic construct
  misc_feature 1..1173: note = Description of Artificial Sequence: Synthetic coding sequence
  source 1..1173: mol_type = other DNA
atggcgctgttaacacagacccagggttcccagtcttcgcagtgccaacctatgaaggccttgttcaaacacgagtcactcggctcacagccactacacgatagagtgttgcaggttcccggcttggcccagggaggatgctgcagggaagacgccatggtggcatcccgcctgactccaggatcgcaggggttactcaagatggaagacgtcgctctgacactcacaccaggttggacgcagctcgattctagccaggtgaatctctatcgggacgagaagcaggagaatcattcttctctggtgagcctgggaggggaaatccaaacgaaatccagagatctgccaccagttaagaaactccccgagaaggaacatggcaaaatatgtcatctaagggaagatattgcccaaatacctactcacgcagaggccggtgaacaagaaggccgtctccagcgaaaacagaagaacgccatcggatctcgtcgccactattgtcatgaatgtggcaaaagctttgcccaaagttcaggcttaactaaacaccggcggattcacactggagagaaaccatatgaatgtgaggattgcgggaaaacattcatcgggagtagcgcactggtaatccatcagcgagtgcatactggggagaaaccttatgaatgcgaagaatgcggaaaggtgttctctcacagttcaaacctcataaaacaccagcgcactcatacaggcgagaagccttatgagtgtgacgattgcggtaagactttctctcaatcttgttcactgctagaacaccacaagatacacacaggcgaaaagccctaccaatgtaatatgtgcgggaaagcatttagacggaattctcatcttttgagacaccaacgtatccatggtgacaaaaatgtacagaatccggagcacggcgagtcatgggagtctcaaggccggactgagtcacagtgggagaataccgaagcaccggtaagctacaagtgtaacgaatgcgagagaagcttcacccgtaatcgaagtctgatcgaacaccagaaaatccacactggtgaaaagccatatcagtgtgatacctgtgggaaggggttcacaaggacgtcatacttagtccagcaccaacgttcacacgtggggaagaaaactcttagccagtag

SEQ ID NO: 141679 - DNA, 501 bp, synthetic construct
  misc_feature 1..501: note = Description of Artificial Sequence: Synthetic coding sequence
  source 1..501: mol_type = other DNA
cctacgcacgccgaagctggggaacaagaaggccgccttcaaagaaaacaaaagaatgctatcgggtcccggcgccactactgccacgaatgtgggaagagcttcgctcagagctctgggttgaccaagcacaggcggatccatacgggcgagaaaccatatgagtgtgaggactgcgggaaaacttttatcggctcctctgctttggtcattcatcaacgcgtgcacaccggcgagaaaccgtatgagtgcgaggagtgtgggaaggtgttctctcattcctcgaatctgatcaagcatcagcgcactcacactggcgaaaaaccctatgagtgcgacgactgcggaaaaactttctcacagtcgtgttcactcctcgagcatcataagattcacacaggggagaaaccctaccaatgcaatatgtgcggcaaggctttcagacgaaactctcacctcctgcggcaccagaggatccatgtagtgacagaaatcgtgtag

SEQ ID NO: 141680 - DNA, 438 bp, synthetic construct
  misc_feature 1..438: note = Description of Artificial Sequence: Synthetic coding sequence
  source 1..438: mol_type = other DNA
atggaatttcctgatctaggcaaacattgcagcgaaaagacctgcaaacagctcgacttcctaccagtcaagtgtgacgcctgtaagcaagacttctgtaaggaccactttccctacgctgctcacaagtgtccgttcgccttccagaaggacgtccacgtgcccgtctgccccctgtgcaatacccccattcctgtaaaaaaagggcagatacccgacgtagtggtgggcgaccacatcgacagggattgtgatagccatccaggtaaaaagaaagagaagattttcacataccgatgttctaaggaaggctgcaaaaaaaaagaaatgctgcaaatggtgtgcgcgcagtgtcacggaaatttctgcattcagcacagacacccattggaccacagctgcaggcacgggtcccgacctacaatcaaggccggatag

SEQ ID NO: 141681 - DNA, 543 bp, synthetic construct
  misc_feature 1..543: note = Description of Artificial Sequence: Synthetic coding sequence
  source 1..543: mol_type = other DNA
atggagtttccagaccttggaaaacactgcagcgaaaagacctgtaagcaacttgatttcttaccagtgaaatgcgatgcatgcaagcaggacttttgtaaagaccactttccctatgccgcacataagtgtccgttcgcgtttcaaaaagacgtacatgtccccgtgtgtccgttatgtaatacccccatccctgtgaagaagggacaaatcccagacgtggttgtcggcgatcatatcgatcgggactgcgactctcatcccggtaaaaagaaagagaagatatttacctacaggtgctcgaaagagggttgcaaaaagaaagaaatgctacagatggtttgcgctcagtgccacggaaatttttgtattcagcatcgacatccacttgatcacagttgtaggcacggctccaggccgactattaaggcaggatgcagtcctatgacagtgagcgagagcagacctctgggcgacttcctgactttggcaccaggcgggctggcccagcggctgggctattggtttactcggcttatgtag

SEQ ID NO: 141682 - DNA, 774 bp, synthetic construct
  misc_feature 1..774: note = Description of Artificial Sequence: Synthetic coding sequence
  source 1..774: mol_type = other DNA
atggagttcccggacctgggtgcccactgtagtgaaccttcatgtcagaggctggatttcttgcctcttaagtgtgacgcctgctcaggaatcttctgtgccgatcatgtggcttatgcacagcaccattgtgggagcgcttaccagaaggatatccaggtgcctgtgtgccccctttgtaacgtgcccgtgcctgtggcacggggggagccccctgacagagcagtcggtgaacacatcgatagagattgtagaagtgatccggctcaacagaaaaggaagattttcacaaacaagtgcgaacgagccgggtgccgccagcgcgagatgatgaagttgacctgtgagaggtgttcaagaaatttttgcatcaaacataggcatcctttggaccacgactgctctggggagggccatccgacttcccgtgctggccttgctgcaatcagtcgagctcaggccgtagctagtacaagtaccgtgccaagtcccagtcagaccatgcctagctgtacatctccttctagagccactactagatcgcccagttggaccgcaccacctgtaattgccctccagaatggacttagtgaggatgaggcccttcagcgcgcattggaaatgtcattggccgaaacgaaaccacaggtccctagctgccaggaagaagaagacctcgcactggcacaggcactctccgcctctgaggcggaataccagcgacagcaggcacagtccagatcgtccaagccctccaattgtagcctgtgttag

SEQ ID NO: 141683 - DNA, 531 bp, synthetic construct
  misc_feature 1..531: note = Description of Artificial Sequence: Synthetic coding sequence
  source 1..531: mol_type = other DNA
atggagttccccgatctgggcgctcattgctccgagccaagctgccagcggttagatttcctcccattaaagtgcgacgcctgctcggggattttttgcgcggatcatgtagcctacgcccagcaccattgcggcagtgcctaccagaaagacatccaggtccctgtctgccccctttgcaacgtccccgtccctgtcgcacgtggagaacctcctgaccgagcagtgggcgaacacattgaccgggattgccgctccgatccagcccagcagaaacgcaagatatttaccaacaagtgcgaaagagctggctgtcgacaaagagaaatgatgaagcttacatgcgaaaggtgctcgaggaatttctgcattaagcacaggcacccgctagaccacgactgctctggggaaggccatccaacgtctagggccggcctggctgccatctctagggcacaggccgtggcctccacatctactgtcccatcgccctcccagacaatgcctagttgcacttctccctctaggtag

SEQ ID NO: 141684 - DNA, 774 bp, synthetic construct
  misc_feature 1..774: note = Description of Artificial Sequence: Synthetic coding sequence
  source 1..774: mol_type = other DNA
atggaattccccgaccttggagcccactgcagtgagcccagctgccagagactggatttcctacctctcaagtgtgacgcatgcagcggtatattttgtgccgaccacgtggcttacgcccaacatcattgcggatcagcctaccagaaggatattcaggtgccggtttgtcccttgtgtaatgtgcccgtgcctgttgcccgcggtgaacccccagaccgggccgtcggagaacatattgatcgagactgccgctccgatcccgcgcagcagaagagaaagatcttcactaacaaatgcgagagagccggctgtagacagcgcgaaatgatgaaactcacatgtgagcgttgttccagaaacttttgtataaagcaccgccatcctctggaccatgattgtagtggggagggacaccctacaagtagagccggcctagcagctatctcacgcgctcaggctgttgcctcaacatccaccgtcccctccccgagtcagactatgcctagctgcaccagcccatcgcgagccactacacgatctcccagctggaccgccccacccgtgattgcgcttcagaacggattgtccgaggacgaagcactgcagagagccctggaaatgtcactggcagagacaaaacctcaggtgccaagttgtcaggaggaggaagatctcgctctggcccaggccctgtccgctagtgaggccgagtatcagcgccagcaggcacagtcccgctcatccaagccctccaactgctcgttgtgttag

SEQ ID NO: 141685 - DNA, 531 bp, synthetic construct
  misc_feature 1..531: note = Description of Artificial Sequence: Synthetic coding sequence
  source 1..531: mol_type = other DNA
atggaattcccagacctcggggcccattgttctgagccctcttgccaacgcttggatttcctccctctgaagtgcgatgcctgttctggcattttctgtgccgaccacgtggcctatgcccaacaccactgcggctcggcttatcagaaggacatacaggtgcccgtttgccccctatgcaatgtgccagtcccagtcgcccgaggagagccccctgaccgggcggtaggagagcacatagaccgtgactgccggtccgatccagcacagcagaaacggaaaatttttactaacaagtgcgagcgtgccggttgtaggcaaagagagatgatgaaactcacctgcgagcggtgctctcgaaacttctgcatcaaacaccgtcatccgttggatcatgactgtagcggcgagggccacccaacgagtagggctggcctggccgctatttcgcgcgcccaggctgtagcctctacttctaccgtgccctcaccttcacagacaatgccttcatgcacaagcccaagccgttag

SEQ ID NO: 141686 - DNA, 153 bp, synthetic construct
  misc_feature 1..153: note = Description of Artificial Sequence: Synthetic coding sequence
  source 1..153: mol_type = other DNA
atggaatttcccgacttgggtgcgcactgctcagaaccaagctgtcagcgactcgattttctgccgctgaagtgcgatgcatgctccggaatattctgcgccgatcatgtggcctacgcccagcatcactgcggtagcgcatatcagaaatag

SEQ ID NO: 141687 - DNA, 678 bp, synthetic construct
  misc_feature 1..678: note = Description of Artificial Sequence: Synthetic coding sequence
  source 1..678: mol_type = other DNA
atggagttccctgatctgggggctcactgttctgaaccttcgtgtcagaggctagatttcctgcccctcaagtgtgatgcttgctcagggatcttctgtgccgaccatgtggcttatgcccagcaccattgtggtagcgcatatcaaaaggacatacaggtccctgtgtgtcccctatgtaatgtgcccgtcccggtggcccggggggaacccccagatagggctgttggagagcacattgatcgtgactgccggtctgacccagcccagcagaaaagaaagatctttactaacaaatgcgaaagagctggctgtcgccagcgggagatgatgaaactcacctgcgagcggtgttctcgtaacttttgcattaaacatcgacatccactggatcacgactgcagcggtgaggggcaccctacctctcgcgctggcctggccgccatctcgagagctcaggctgtagcttcaacctcaactgtaccatctccaagccagaccatgccttcatgcacttcaccctctagggcaacaacacgaagcccatcatggaccgcaccacctgtgattgccttacagaacggccttgtgtcatgggccgaagtgggctggactgagacaaacacacagcgagtcaaaagcaaagacgccggacttctatcaccatttgtcgagtag

SEQ ID NO: 141688 - DNA, 684 bp, synthetic construct
  misc_feature 1..684: note = Description of Artificial Sequence: Synthetic coding sequence
  source 1..684: mol_type = other DNA
atgggagacgctggctccgagcgcagcaaggcaccatcactgccaccccgctgcccttgtggcttctggggcagctcaaagaccatgaatctgtgttccaaatgtttcgcagattttcaaaagaagcagcctgatgacgactccgctcccagtacctccaacagtcaatccgacctgttcagcgaagagactaccagcgataataataatacgagcattaccactccaacactgtctccctcccagcagcctctcccgactgagctcaacgtgaccagcccaagtaaggaagaatgtggtccctgcacagataccgctcacgtgtctctgatcacccccacaaagagatcttgcggcacagactcacagagcgagaacgaggctagccctgttaaaagacctcggctgctggaaaacaccgagcgctctgaggaaaccagccgtagcaagcagaagagccggcgaaggtgctttcagtgccagactaagctggagttggtgcaacaggagttgggcagctgcagatgcgggtacgttttttgtatgcttcatagactccccgagcaacatgattgtacttttgaccatatgggtcggggccgcgaagaagctataatgaagatggttaaactggataggaaggtgggcagatcctgccagcgtattggcgagggctgtagctag

SEQ ID NO: 141689 - DNA, 642 bp, synthetic construct
  misc_feature 1..642: note = Description of Artificial Sequence: Synthetic coding sequence
  source 1..642: mol_type = other DNA
atggcacaggaaaccaatcagacaccaggaccgatgctctgctcgacagggtgtggattctatggcaacccccgtacgaatgggatgtgctctgtatgttacaaggaacatcttcagagacaacagaatagcgggcgcatgagccctatggggacggctagtggatccaacagccctacttctgatagcgcgtcagtgcagagggcagacacaagtttaaataattgtgagggcgccgctgggagcaccagtgagaagagtagaaacgtgccagttgcggcacttccagtgactcagcagatgaccgaaatgagtataagtcgggaagataagatcacaactcctaagactgaagtctcggaacctgtggttactcaaccatcaccatccgtaagccaaccatcaaccagccagagcgaggaaaaggccccggaattacctaagccgaaaaaaaaccgctgcttcatgtgtcgcaaaaaagtgggcctgacagggtttgactgcaggtgtggcaacctgttctgtggccttcatcgttactcggacaaacataattgtccatatgattacaaagcagaagccgctgccaagattaggaaggagaatcctgtggtggtcgccgaaaagattcaacgcatatag

SEQ ID NO: 141690 - DNA, 642 bp, synthetic construct
  misc_feature 1..642: note = Description of Artificial Sequence: Synthetic coding sequence
  source 1..642: mol_type = other DNA
atggcccaggagactaatcagacccctggtcctatgctttgcagtacaggctgtggcttttacggcaatccccgcactaacggaatgtgcagtgtgtgttacaaggaacatctgcagagacagcagaattcagggagaatgagtccaatgggcactgcgagcggttcaaacagccctacttcagactcagcctccgtgcagagagccgatacttcgcttaacaattgcgaaggagctgccggcagcacctccgaaaaaagccggaacgtaccagtggccgctctccctgtgactcagcaaatgacagagatgtctatctctcgtgaggataagattactacacctaagacagaggtgtcagaaccggtggtaactcaacctagtcctagcgtgtctcaaccctccactagtcagtccgaagagaaagctcccgagctccctaaaccaaagaaaaatagatgttttatgtgccgaaaaaaggtcggcctgaccggatttgactgcagatgcggaaaccttttttgcggcctacatcggtattctgataaacacaactgcccatacgattataaagcggaggcagctgcaaagatcaggaaagaaaaccctgtagtcgtggccgaaaagatccagagaatctag

SEQ ID NO: 141691 - DNA, 636 bp, synthetic construct
  misc_feature 1..636: note = Description of Artificial Sequence: Synthetic coding sequence
  source 1..636: mol_type = other DNA
atggcaaaacccgagcaggcagcagacggtggtgttcgcggtcgcggagcccgcccccctgcgcaagaggcccaacgaaggcgccggcacccggtcgtcgtagctcgtgatctagcaccgggcgtgccaggatctttgcactcgacccagaagaatatggcccaagagactaaccagactcctggaccgatgctgtgctccactggctgtggattttacgggaatcctcgaaccaacggaatgtgctctgtatgctacaaggagcatcttcaacggcagcagaactctggacgtatgagccccatgggaacagcctctggatcgaatagtcctacatctgattcagcctcagtgcagagagccgatacttcactcaataactgtgagggggctgccggtagtacatcggaaaagtcaaggaatgtcccagttgccgctctgccagtgacacagcaaatgacagagatgagcatatctcgggaggacaaaattaccactcctaagactgaggtatccgagcctgtggtgacccagccgagccccagcgtctctcagcctagtacctctcaatcagaagaaaaagcgccagagctgcccaagcccaagaaaaacagatgcttcatgtgccggaaatag

SEQ ID NO: 141692 - DNA, 642 bp, synthetic construct
  misc_feature 1..642: note = Description of Artificial Sequence: Synthetic coding sequence
  source 1..642: mol_type = other DNA
atggcccaggaaacaaaccaaacacccggccccatgctgtgttcaaccgggtgtgggttctatgggaacccgagaactaacggcatgtgttcagtctgctacaaagaacatttacagaggcaacagaattcaggccggatgtctcctatgggcactgcctcaggcagtaattcccccaccagcgactccgcgagcgtccagagggcagatacttccttgaataactgtgagggggccgccgggtccacaagcgagaagtcacgcaacgtcccagtggccgccctgcctgtcacacagcagatgactgaaatgagcatcagtcgtgaagacaaaatcacgacacccaagactgaggtgtccgagccagtggtgacccagcccagcccctcagtgagtcagccaagcaccagccagtcagaagagaaggctcctgagcttcctaagcccaaaaaaaacaggtgtttcatgtgcagaaagaaggtgggactgaccggctttgactgtagatgcgggaaccttttttgtggactgcacagatattcagacaagcacaactgtccttacgattacaaggcagaggctgcagctaagataagaaaagagaatcccgtggtggtcgctgagaagatccagcgcatttag

SEQ ID NO: 141693 - DNA, 642 bp, synthetic construct
  misc_feature 1..642: note = Description of Artificial Sequence: Synthetic coding sequence
  source 1..642: mol_type = other DNA
atggcccaggagaccaatcagactcccggtcctatgctatgttccactggatgtgggttctacggaaacccccggacaaatggaatgtgttcggtgtgttacaaggagcacctacagaggcaacaaaattccggccgaatgtctcccatggggactgcctctggctctaactcccctacgagcgactctgccagcgttcagagggccgacaccagtttgaataattgcgagggcgcagctgggagtacctctgagaagtcacgtaacgtcccggtagctgcgttgccagtgactcaacagatgaccgaaatgtctatctctagagaagacaaaataaccacccccaaaacagaggtctccgagccagtggtaacacagccaagcccaagcgtcagccagccatccacttcccagagcgaagaaaaggcacccgagcttccaaaaccaaagaagaataggtgctttatgtgtaggaaaaaggtgggactcactggttttgactgtagatgcggcaacctgttctgtgggctccaccggtatagcgataagcacaattgcccctatgactacaaggcggaggccgccgccaaaattagaaaagaaaacccagtggttgttgcggagaaaatacagcggatttag

SEQ ID NO: 141694 - DNA, 627 bp, synthetic construct
  misc_feature 1..627: note = Description of Artificial Sequence: Synthetic coding sequence
  source 1..627: mol_type = other DNA
atggctcaggaaacgaaccatagtcaggtgcccatgctgtgctccacgggatgtggtttttacggaaatccgcgaactaatggtatgtgcagtgtgtgctacaaagagcatttgcaacgacagaactcctctaacggcagaatcagcccacccgccaccagcgtatccagcttgtccgagagcctacccgttcagtgcaccgacggttccgttccagaagcccagagtgcacttgactccacgagttcatctatgcaacctagccctgtgtccaatcagtcactgctgagcgaaagcgtcgcgagttctcagctggatagtacctccgttgacaaggcggttcctgaaacagaggacgtccaggcctctgtgtcagacacagcccagcagcccagtgaggagcagtccaaatctcttgagaaacctaagcagaagaagaatagatgctttatgtgcagaaaaaaggttggactgaccggctttgaatgcagatgtggaaatgtgtattgtggagtgcacagatatagcgacgtccacaattgttcctataattacaaagcagatgctgctgaaaagatcagaaaggaaaatcctgtggtggtaggggagaaaatccaaaagatctag

SEQ ID NO: 141695 - DNA, 627 bp, synthetic construct
  misc_feature 1..627: note = Description of Artificial Sequence: Synthetic coding sequence
  source 1..627: mol_type = other DNA
atggctcaggaaaccaatcattctcaagtgcctatgctgtgcagtacaggttgtggattttacggaaacccaagaactaatggaatgtgcagcgtttgctataaggaacacttgcagaggcaaaacagtagcaacgggcgcatatccccacccgctacttccgtgtccagtctatcagagagtcttccagtgcaatgcactgacggcagcgtacctgaggcgcagagcgcgctggactccacctccagcagcatgcagccatcgcctgtttctaaccagagtctgctgagtgagtcagtcgcctccagtcaactcgactcgacttctgtcgacaaggccgtcccagaaacagaggatgtgcaggcctcagtgagcgacacagcacagcaacccagtgaggagcagtccaaaagcctggagaaaccgaagcagaagaagaaccggtgttttatgtgtcggaaaaaagtgggacttacggggtttgaatgtcgttgcggaaacgtgtattgcggggtccatcggtatagcgacgttcacaactgttcctacaactataaagcagacgccgcagaaaagattcgcaaagaaaacccggttgtcgtgggagaaaagatacagaaaatatag

SEQ ID NO: 141696 - DNA, 591 bp, synthetic construct
  misc_feature 1..591: note = Description of Artificial Sequence: Synthetic coding sequence
  source 1..591: mol_type = other DNA
atggcccaggaaacaaatcacagccaggtgcctatgctgtgtagtaccgggtgcggattctatgggaacccacgcaccaatggtatgtgtagtgtgtgttataaggaacacctacagaggcagaacagctctaacggccgcattagcccacctgtccagtgcaccgatggaagcgtaccggaggcccagtccgccctggattctacgtctagttccatgcagccttctccagtctcaaaccaatccctattgtcggagagcgtggcttcctctcagctcgattctacatctgtcgacaaagccgtccccgagacagaagacgtgcaggcaagcgtctctgatacagcacagcagcctagcgaagagcagtctaaaagcctggaaaagcccaagcagaaaaagaatcgctgtttcatgtgtcgcaaaaaggtggggctgacagggtttgagtgtcgctgcggtaacgtttactgcggagtgcacagatactctgacgtgcacaactgctcctacaactacaaggcagacgccgcggaaaaaattcggaaagagaatcctgttgtcgtgggcgagaagattcagaagatctag

SEQ ID NO: 141697 - DNA, 627 bp, synthetic construct
  misc_feature 1..627: note = Description of Artificial Sequence: Synthetic coding sequence
  source 1..627: mol_type = other DNA
atggcccaggaaactaatcactcacaggtgccaatgttatgttcaacaggatgtggattttatgggaacccacgaaccaatggcatgtgttccgtgtgctataaagaacacctgcaaagacaaaacagctcaaatgggcggatttcaccccctgctacctctgtcagctccctgtctgagtccctccctgtgcaatgcaccgatggctctgtgcccgaggctcaatcagcactggactcaacatccagttccatgcagccctcgcccgtcagcaaccagagcctgctgtccgaatcggtggcgtctagccagctggatagcacaagcgtggacaaagccgtaccagaaaccgaggacgtccaggcctctgtctcggacacggcacagcagccaagtgaggagcaatccaaaagcttagagaaaccaaagcagaaaaaaaataggtgcttcatgtgccgaaagaaggtgggactgaccgggttcgagtgccgatgtggaaacgtgtattgcggcgtgcacagatattctgacgtgcataactgttcctacaactacaaggccgacgccgcagaaaagatccgtaaggagaacccagtagtcgttggcgagaaaatccagaaaatttag

SEQ ID NO: 141698 - DNA, 627 bp, synthetic construct
  misc_feature 1..627: note = Description of Artificial Sequence: Synthetic coding sequence
  source 1..627: mol_type = other DNA
atggcccaggagaccaatcactctcaagtgccaatgctgtgcagcaccggttgtggtttctacggtaacccccgcactaacggcatgtgctcagtgtgctacaaggaacatctgcagagacagaatagtagtaatgggagaataagtccaccagccacgagcgtgagttccctttccgaaagtcttccagtgcagtgcacggacgggtccgtgcccgaggcccagtctgcgctggactccacctcatctagtatgcaaccttcccctgtgtctaatcagtcactgctctccgagagcgtggctagttctcaactggactctacatcagtcgataaggccgtccctgagacggaagatgttcaggccagtgtgagtgacacagctcaacagccaagcgaagaacaaagtaagagccttgagaagcccaaacagaagaaaaatcgctgctttatgtgtcgcaaaaaagtcgggctcacggggttcgaatgcagatgcgggaatgtctattgcggtgtccacaggtactccgatgtgcacaactgcagctacaactataaggcagacgccgccgaaaagatacggaaagagaatcccgtcgtggtgggagagaaaatccaaaaaatctag

SEQ ID NO: 141699 - DNA, 627 bp, synthetic construct
  misc_feature 1..627: note = Description of Artificial Sequence: Synthetic coding sequence
  source 1..627: mol_type = other DNA
atggcccaggaaacaaatcacagccaagttccgatgctgtgttccacaggctgtggcttttacggcaaccctaggactaacggaatgtgttccgtgtgctacaaagagcacctacaaagacagaattcctccaatggccgaatctcaccaccagccacatccgtctcatccctgtctgagtcactacctgtccagtgtacagatggtagtgtgccggaggctcagagcgcacttgactcgacatcttctagtatgcagccgagtcctgtaagcaatcaaagtttgctgtcagagtccgttgcatcctcccaattggactctactagcgtcgataaggccgtgcccgagacagaagacgtgcaagcatctgtgagtgacaccgcccagcagccatccgaggagcagtccaagagtctggaaaagcccaaacagaagaaaaacagatgtttcatgtgccggaagaaagtcggactcacaggattcgagtgtcgctgtggaaatgtgtattgcggcgtccaccgctacagcgacgttcacaactgtagctacaattataaggctgacgctgctgaaaagataagaaaggagaaccccgtcgtggtgggcgagaagattcaaaagatctag

SEQ ID NO: 141700 - DNA, 2085 bp, synthetic construct
  misc_feature 1..2085: note = Description of Artificial Sequence: Synthetic coding sequence
  source 1..2085: mol_type = other DNA
atggaaaacaaaagcttggagagcagccaaactgacttaaagctggttgctcaccctagagccaaaagcaaggtatggaagtatttcgggtttgatactaatgccgaaggctgtattctgcaatggaagaagatctattgtagaatatgcatggcccaaatcgcctacagcggaaacacatctaatctgtcataccatttggagaagaatcatcccgaggagttttgcgagttcgtgaagtccaataccgaacagatgagagaggcgttcgctacagctttctcaaaactgaaaccagaaagcagtcagcagcctgggcaggatgccctggcggtgaaggcagggcacgggtacgattcaaagaaacagcaggaactgactgctgcggtgctggggcttatctgtgaaggcctgtatccagcctcaattgtggatgagccgacctttaaggtattgctcaagacggcggatccaagatatgagctgcccagcagaaagtatatctccactaaggccattcccgaaaagtacggtgctgtacgcgaggtaatactcaaggagcttgctgaagctacttggtgtggcatttcaaccgatatgtggcgaagcgagaatcagaatagagcatacgtgactctggctgcacacttcttggggctaggagcacccaattgtctgtcaatggggtcacgctgcttgaagacatttgaggtgcctgaggagaatactgcagaaaccataacgcgtgtgctgtacgaagttttcatcgagtgggggatctccgcaaaggtttttggcgctactaccaactacggtaaggacattgtgaaggcttgtagcttgctggatgtggcggttcacatgccttgcctcgggcacacctttaacgccggaatacaacaggcctttcagttgcccaagctgggcgcgctattgtctcggtgccggaagttggtggaatacttccagcaatctgctgtagcaatgtatatgctgtacgagaagcagaaacagcagaatgtcgctcattgcatgttggtttctaatcgcgtatcatggtgggggtcaactctcgccatgctacagaggttaaaagagcaacagttcgttattgccggagtgttggtggaagatagcaataatcaccatctgatgctggaggcttcagagtgggccactattgaaggactcgtggaactgctccagcccttcaagcaggttgccgagatgctatccgccagtcggtatcctaccatttccatggtgaagccactcctccatatgttgctgaacacaaccttgaacatcaaggaaactgacagtaaggaactcagtatggccaaggaggttatagcaaaagaattgagcaagacctaccaggaaacgcccgaaattgatatgtttttaaatgttgccacatttttagacccccggtataagagactcccgttcctctcagcgttcgaaaggcaacaggttgaaaacagggtggtggaggaggctaagggcttgctggacaaagtcaaggacggtggataccgacccgcagaggacaaaatattccccgtgccagaagagccacctgtgaagaaactgatgaggacaagcacacctccacctgcaagcgtcattaataacatgctggcagagatcttttgtcaaaccggcggtgtggaggatcaggaggaatggcacgcccaagttgtggaggaactgtctaactttaagtcccagaaagtcctcgggctaaatgaggatcccctgaagtggtggtctgataggctggcgctgtttccactgctgcctaaggtgcttcaaaagtactggtgcgtgacggctactagggtggctcccgagaggctgttcggctccgctgccaacgtggtgtcagccaagagaaatcgcctcgctcctgcacacgtagatgagcaggtcttcctgtatgaaaatgcacggtcaggcgccgaggccgaaccagaagatcaggacgagggggaatggggtctggatcaagaacaagtcttcagcctgggcgacggggtctctggcggattcttcggcattagggattcttcctttttgtag

SEQ ID NO: 141701 - DNA, 2085 bp, synthetic construct
  misc_feature 1..2085: note = Description of Artificial Sequence: Synthetic coding sequence
  source 1..2085: mol_type = other DNA
atggaaaacaagtcactggaatcatcccagacagacctcaagctggttgcccacccccgggcgaagagcaaagtgtggaagtacttcggatttgatacaaatgcagaagggtgtatactccagtggaagaagatctattgcagaatctgcatggcccagatagcttactcaggcaacaccagcaacctgtcatatcatctggaaaaaaatcatcccgaagagttctgcgaattcgtgaaatcaaacaccgagcagatgagagaggccttcgccacagctttctctaaactcaaacccgaatcttctcagcagccgggtcaggacgcattggctgtgaaggctgggcatggttacgactctaagaagcagcaggaattgacagccgcagttctgggactgatctgtgaaggactatatcctgcttctatcgtcgacgagcccacgttcaaagtgctactcaagactgccgatccccgatatgagctccctagtcgtaagtacattagtaccaaagcgatccccgagaaatatggtgccgtaagggaagtgatcctgaaggagttagctgaagctacatggtgcggtatttctacagatatgtggaggtccgaaaatcagaatagagcgtacgtcactctcgccgcgcactttcttggattgggcgcaccaaactgtctctccatgggctctcggtgcctgaaaacattcgaagtgcctgaggagaacaccgcagagacgattaccagagtgctctatgaggtattcatagagtggggaatatcggccaaggtgtttggcgctaccacaaattacggcaaagatattgtgaaggcttgtagcctgctggatgttgccgtgcatatgccctgtctgggacacacctttaatgcaggcatccagcaggccttccagctgcccaaactcggagcgctgctgtcccgatgccgaaagctggttgaatacttccagcagtctgcagtggccatgtacatgctgtacgagaaacagaagcagcaaaacgtggcacattgtatgctggtctccaatcgagttagctggtggggatccaccctcgcgatgctccagaggttgaaagagcaacagttcgtgattgctggagtcctggtcgaagacagtaataatcatcatctgatgctcgaggcttctgaatgggcaaccatcgagggactagtagaactgctgcagcctttcaagcaagtggcagaaatgctctcagcgtccagatatcctaccataagtatggtcaagccactactacacatgcttctgaacacaactctgaatatcaaggagacagatagtaaggagctctctatggctaaagaggttattgccaaagaactcagcaaaacatatcaggagacccccgaaattgatatgtttctcaatgtggctacgtttctggatccccggtataagagattaccattcctctctgctttcgaacgacaacaagtggagaatcgagtcgtagaagaagctaaaggactgctggacaaagtcaaagacggcgggtatagaccggccgaagataagattttccccgtacccgaagaacctccagtgaagaaactcatgagaacatccaccccgccacctgcctcagtcatcaataatatgctggctgaaattttttgtcagacaggaggggtagaagaccaggaggaatggcatgcccaagtggttgaggaactcagcaacttcaaaagccaaaaggtccttggccttaacgaggatcctctgaagtggtggtctgatcggttggcccttttccctttgctgcctaaggttctccagaagtactggtgcgtcacagctacacgcgtcgcacctgagagacttttcgggagtgcagccaatgtggttagcgccaagagaaacagacttgcccccgcccacgttgacgagcaggtattcttgtatgagaacgctcggtccggcgcagaagccgaacccgaagaccaagacgaaggtgaatggggactagatcaggagcaggtgttctccctgggggatggagtgagcggaggcttcttcgggatcagagattctagttttttatag

SEQ ID NO: 141702 - DNA, 2085 bp, synthetic construct
  misc_feature 1..2085: note = Description of Artificial Sequence: Synthetic coding sequence
  source 1..2085: mol_type = other DNA
atggaaaataagagtctcgagagttcccaaactgacctaaagcttgtggcccatcctcgggccaagagcaaggtttggaagtatttcgggttcgatacgaatgctgagggatgtattcttcaatggaagaaaatatattgccggatctgtatggcccagattgcatattccggaaacacatccaaccttagctaccatcttgaaaagaatcacccagaagagttctgtgagttcgtgaagagcaatactgagcagatgagggaggctttcgccaccgccttttcaaagctgaaaccagaaagttcgcaacagcctggtcaggatgccttagctgtcaaagctggccatgggtatgactcaaagaaacagcaggaattgaccgcagctgtgctcggtctgatctgcgaaggtctgtaccctgcctccattgttgacgaacccacattcaaggttttactgaaaacagcagaccccagatacgaactgccaagtcgtaagtatataagcacaaaagcaatacctgagaagtatggggccgtacgcgaggtcattctcaaagaactagctgaagccacctggtgtggcatttctactgacatgtggagatccgaaaatcagaaccgggcttacgtgactctagctgcccatttcttgggcctcggagctcctaattgtctgagcatgggctcacgctgtctgaagaccttcgaggtacctgaggagaacactgccgaaacgattacgagagtgctctacgaggttttcattgagtggggtatttcagctaaggtattcggtgccacaactaattacggcaaagacatcgtgaaggcgtgcagtctcctggacgtcgcggtgcacatgccgtgtctggggcacactttcaatgccggaatccagcaggctttccaactgcccaagcttggcgccttgctgtcacgctgcaggaaactagtggaatactttcaacagagcgccgtggcaatgtatatgctttacgaaaaacagaagcaacagaacgtagcacattgtatgcttgtgtccaatcgggtgtcttggtggggatctacattagccatgctgcagagactgaaggagcagcagttcgtcatcgccggtgttctggtcgaggattcaaacaaccatcacttgatgcttgaagcaagcgagtgggccacaatcgagggtctggtggagctgttgcagccttttaagcaagttgccgaaatgctaagcgcctcaagataccccaccatatccatggtgaagcccctccttcacatgctcctgaatacaacccttaacatcaaagagaccgatagcaaagagctatccatggctaaagaagtaattgcaaaagagctctccaagacctaccaggaaacacctgagattgacatgttcctcaatgttgccacattcttggaccctcgctataagagactgccctttctgtcagcatttgagcggcagcaggttgagaaccgagtggtggaggaggctaagggcctcctcgacaaagtgaaggacggaggataccggccagccgaggacaaaattttcccagtgccggaggaaccccccgtgaagaaactcatgagaactagcactcccccacccgcctctgtcatcaacaacatgctggcagaaattttctgtcagaccggaggcgtggaagaccaagaggagtggcatgctcaggtggtggaggagctgagtaatttcaaaagtcagaaagtgttgggtctcaatgaagacccgcttaagtggtggtccgatagactcgctctgtttcccctgctgccgaaagttctgcagaagtactggtgtgtgaccgccacgcgcgtagccccagaacgtctgtttggctcagctgccaacgttgtgagtgcaaagagaaaccgactcgctcctgcgcacgtggatgagcaggtattcctgtatgagaatgcacggtctggggccgaggcagagcccgaagaccaagacgagggggagtggggcctcgatcaggaacaggtatttagcctgggtgatggtgtctctggcggtttcttcgggatcagggattcaagcttcctctag

SEQ ID NO: 141703 - DNA, 819 bp, synthetic construct
  misc_feature 1..819: note = Description of Artificial Sequence: Synthetic coding sequence
  source 1..819: mol_type = other DNA
atggagaataaaagcctggaatcttcccaaaccgacctgaagttggtcgcccatcctcgcgccaagagcaaggtgtggaaatattttggcttcgatacaaacgctgagggctgcatacttcagtggaagaaaatctattgtcgaatctgtatggcccagatagcatatagcggaaacaccagcaacctctcatatcacctggagaagaaccacccggaggaattctgcgaatttgttaagagcaatactgaacaaatgagggaagcttttgccactgccttctcaaagctgaagccagaatcttcccagcagccgggccaggacgctctggccgtcaaggccggccacggctatgactccaagaaacagcaggaattaaccgccgcggtgcttggtctgatctgtgagggcctgtatcctgccagcattgtggacgagccaaccttcaaagtccttttaaagacagccgacccacggtatgaattaccatcgcgaaagtacataagcacaaaggccattccggaaaagtatggcgctgttagagaagtgatcctgaaggaactggctgaagccacctggtgtgggatcagcacagacatgtggcggtcagaaaaccaaaatcgggcctacgtgacactggctgctcacttcctcggcctgggtgctcccaactgcttgtccatgggttccagatgtttgaagacgttcgaagtgcccgaggagaacacagcagagactatcaccagagtgttgtacgaggtatttatcgagtggggtataagtgcaaaggtgttcggagctactaccaactacgggtag

SEQ ID NO: 141704 - DNA, 3177 bp, synthetic construct
  misc_feature 1..3177: note = Description of Artificial Sequence: Synthetic coding sequence
  source 1..3177: mol_type = other DNA
atgagacgcaaggggcggtgccacaggggttcagctgcacggcaccccagctcaccctgcagcgttaaacattcaccaactcgtgagacgctgacctatgcccaggcacaacgtatggtcgagatcgaaatagagggtcgcttgcataggatctcgattttcgaccccctggagatcattctcgaagatgacctcacagcccaggaaatgtccgagtgcaattccaacaaggaaaattccgagcggccaccagtgtgcctgagaaccaagcgccacaagaacaatcgcgtgaagaagaaaaacgaggccctcccctccgcccacggtactcctgctagtgctagcgcattgcctgaaccgaaagttaggatcgtcgaatactctccccctagcgctccaaggagaccgcccgtgtactataagtttatcgagaagtccgctgaggaactcgataacgaagttgagtacgatatggatgaggaggactacgcatggctggagatcgtgaatgaaaaacgaaagggagactgtgtgcccgctgtgtcacagagcatgtttgaattcctgatggacaggtttgagaaggaaagccattgtgagaaccagaaacagggtgagcagcagtcccttattgatgaagacgccgtctgctgcatctgtatggacggggaatgtcagaactcaaatgttatcttattttgtgatatgtgtaatctggcagtccatcaggagtgctatggtgtgccatacattcctgaaggacagtggctgtgcaggcattgtctccaaagcagagctaggccagccgattgtgtgctgtgccctaataaaggcggggcttttaaaaaaaccgatgatgacaggtggggacacgttgtctgcgctttatggatccccgaagtgggctttgctaatactgtttttattgaacccattgacggcgtccgtaatatccctcctgccagatggaagctgacgtgttacctctgcaagcagaaaggcgtgggcgcatgcatacagtgccacaaagcaaactgctacacggcatttcacgtgacatgtgctcagaaggccgggctgtacatgaagatggaacccgtcaaggaacttaccggcggaggtactacattcagtgtgaggaaaacagcctattgcgacgttcatactccgcctggctgtacaagaaggcctctaaacatctacggcgacgttgaaatgaagaacggggtatgtagaaaggagtcaagtgtgaaaacagtgcgctcaacctctaaggtgagaaaaaaagccaagaaagcaaagaaggctctggctgagccttgcgccgtgttacccaccgtttgcgccccctatatcccaccacagcgtctgaacagaatcgcaaaccaggtggcgattcagcggaagaagcagtttgtcgaacgcgcccactcctattggctcttaaagcgccttagtcggaacggcgcacctctcctccgccgcttgcaaagttcgctgcagtctcaacggagcagtcaacaaagagagaatgatgaggaaatgaaagctgcaaaagagaaactgaagtactggcaacgcctgagacatgacttggaacgcgcacgtcttctgatcgagctcctgagaaagagggagaaactgaagcgggagcaagtcaaagtggaacaggtcgcaatggaactcagactgacccccctgacagtcctactgaggtcagtgctcgatcagctccaggacaaggaccctgcccgaatcttcgcacagccagtttccctgaaggaagtgccggattatcttgaccatatcaagcatccaatggacttcgctaccatgcggaagaggctggaggcgcagggctacaaaaatctccatgaatttgaggaagactttgacctcatcatagataactgcatgaagtacaacgcacgggacactgttttttacagggcggccgtgagactccgcgaccagggaggcgtggttcttcgacaggcaaggcgcgaggtcgatagtataggtctggaagaggcgtcgggcatgcacctgcccgagcgtccagcagccgcaccaaggaggccatttagctgggaggacgtggataggttacttgaccctgccaaccgggcccatcttggactcgaagagcaactgcgagaactgctagacatgctcgatcttacatgcgctatgaagagtagcggttcccgctctaagagggcaaagctcttgaaaaaggaaatcgctttgttacggaacaagctgagccagcagcatagtcagcctttgcccaccggacctggcctagagggattcgaagaggatggggcagcactgggacctgaggccggagaggaggtcttgcctagactcgagaccctgttgcaaccacgcaagcgctcgcgttcaacatgtggtgatagtgaagtggaggaggagtctccaggaaaacgattggatgctgggctgactaacggatttggcggggcaaggtccgaacaggagcctggaggtgggctgggcagaaaggccaccccgcgcaggcggtgcgctagcgaaagttcaattagctctagcaatagtcccctgtgtgattcttccttcaacgcacctaaatgcggccggggcaagccggccctggtgagaaggcataccctggaagataggtcagagcttatcagctgtatcgagaatgggaattatgccaaggcagcacggattgccgcagaagttgggcagtcaagtatgtggatttctaccgacgctgccgcctcagtgctggagccattgaaggttgtttgggcgaaatgcagtggctacccttcctatcccgccttgatcatcgatcctaagatgccacgtgtgccaggccaccacaacggtgtgacgattccagccccgcccttagatgtcttgaagatcggagaacacatgcagacaaagtccgacgaaaaactttttctggtgctgttctttgataataagagatcctggcagtggttacctaagtctaagatggtgcccctcggcattgacgaaacgatcgataagctgaagatgatggaaggacgcaattcatctattcgaaaagccgtgcgtattgcttttgatagggcgatgaaccacttatctcgggtgcacggcgagcctacaagtgatctaagtgatattgactag

SEQ ID NO: 141705 - DNA, 2940 bp, synthetic construct
  misc_feature 1..2940: note = Description of Artificial Sequence: Synthetic coding sequence
  source 1..2940: mol_type = other DNA
atgtctgtctgcaccctgagtgtgcctgtgtcaagtttgtcccccggtcgtagatgcaacacattctcagacagcggcatcctcggttgtgtgcccatcaactctaacacagatgaagaagacgtagttgaagaaaagatggtcgcggaaggcgttaacaaggaggccaagcagccagctaagaagaagagaaagaaagggttacggataaagggcaagagacggcgcaagaagctaatcttagcgaagaagttctcgaaggacctgggaagtgggcggccagttgccgatgctccagcgttgttggcttccaacgacccagaacaggacgaggagtcgctgtttgagagcaacattgaaaagcagatatacctgccttccacacgggctaagacatctatcgtctggcactttttccatgtagacccccagtatacgtggagagccatatgtaacctatgcgagaaatcagtatcgcgggggaagccaggttcccatttgggaacttccacccttcagcggcatctccaggcgcggcactccccccactggactcgcgcaaacaagtttggtgtagcgtctggagaggaagatttcaccctggacgttagcttgtccccctctagcggttccaatgggagtttcgaatatatacccaccgaccctctggacgataataggatgggcaaaaagcatgataaatccgcatcagatgcgttgagagctgagaggggcaggtttttgatcaagtccaatatagttaaacacgctctgatccctggaacgcgggctaagaccagcgctgtttggaatttcttctacaccgatcctcagcacatatcaagagctgtttgcaacatctgtaagcggagtgtgtcacgcggtcgtcccgggtctcacctcggcaccagtacccttcagaggcacctccaagctactcatcctatacattgggcagtggcaaataaagattctggcgctgtggctaacgggttagacgaggctgagactgaaagaagtgatttactatctgacaccctacatggcgaaaagtctacaggatctcaagatctcacggcagaggacctgtctgactctgactccgacgaacccatgcttgaagtcgagaacaggtcagagtctcccattccagtagcagagcaagggacgctcatgcgggcacaggaaagagagactacctgttgtggaaacccggtgtcatcccatatctctcaggcgattattcagatgatagtggaggacatgcatccatataactacttttctactccggccttccaacggtttatgcaaatagttgcaccagactacagactcccaagtgagacatattttttcaccaaggctgttccccagctgtatgattgcgtgagggagaagatctttttgacactggagaatgttcagagtcaaaagattcacctgactgttgacatttggacccacgacccatctaccgattactttatcgttacagttcactgggtgagcttggagactgcatccttcctgaataatgggagaatcccagatttcaggaagtgggccgttttatgtgtcacaggtttggctaaggactgcttgatcacgaatatcttacaggaactgaatgaccaaataggtttatggctatcacccaacttcttaattccgagcttcattgtctccgacaattccagtaacgtggtgcacgctatcaaagacgggggattcacccatgtcccatgcttcctccattgccttaacatggtgatccaagacttcttctgcgaacacaagagtatcgagaacatgctggtcgcagccaggaagacttgccaccattttagccacagtgtgaaggctcgccagatcctccaggaatttcagaatgatcaccagcttccatggaaaaacctgaagcaggatgagacaggacattggatttccaccttttacatgttaaagtggctcctggaacactgctactctgtccatcattccctcggccgcgcttccggcgtggtgctcacaagcctgcagtggactcttatgacttacgtttgtgacattcttaagccctttgaagaagctacccagaaagtgagcgttaaaacagctggacttaaccaggttctccctctgatccaccacctccttctttctctgcaaaagttgcgcgaggatttccaagtgagagggataacgcaagcactcaacctggttgactctctatctctgaagctggagacggacactctgctgtcggccatgctgaagtccaagccatgtattctggccactctcctggacccgtgcttcaaaaacagtctcgaagacttctttcctcagggcgccgatctggagacctataagcagtttctggctgaggaggtttgtaactatatggagtcctctcccgaaatatgtcagataccgacctccgaggcatcttgtcccagcgtgactgtcggggcagattcctttacatcctccctgaaggaaggaaccagctcatcgggctctgtagattcctccgctgttgacaacgtcgcactcggctccaaatcatttatgttcccgtccgctgtggctgtggtggacgagtacttcaaggagaaatacagtgagttcagcggaggagatgacccgctgatttactggcagaggaaaatctcaatttggccagccttgacccaggtcgccattcagtatctatcctgcccaatgtgcagctggcagtccgaatgcatcttcactaagaactcgcatttccatccaaagcagatcatgagtttagactttgacaacatcgaacagctgatgtttctgaagatgaacttaaagaacgtgaactacgactacagcactctggtcctcagctgggacccagaacagaacgaggtggtgcagtcctctgaaaaggagattctgccatag

SEQ ID NO: 141706 - DNA, 4938 bp, synthetic construct
  misc_feature 1..4938: note = Description of Artificial Sequence: Synthetic coding sequence
  source 1..4938: mol_type = other DNA
atggaggaaagtaaaacactcaagagtgagaatcatgagcccaagaaaaacgtgatttgcgaagaatccaaagcggtgcaagtgatcgggaatcagactttgaaggccaggaacgacaagtcagtcaaggagatagagaatagcagtccaaacaggaacagctccaagaaaaataaacagaacgacatatgtatcgaaaagaccgaggtgaaatcatgcaaagttaatgccgctaacttgcccggccccaaggacctcgggctcgttctgcgggatcagtctcattgcaaggcaaaaaaatttccgaacagccccgtaaaggctgagaaagctaccatcagtcaggctaagagcgagaaggcaacgagtctgcaggcaaaggcagagaagagccccaagagccccaacagtgtgaaagcagagaaggcttcatcctaccaaatgaagtcggagaaggtgccttctagtcccgccgaagcagaaaagggcccctcgctcctgctcaaggacatgcggcagaagaccgaactccagcaaatcggaaagaaaataccttcatcttttacgagcgtggacaaagtgaatatcgaggcggtgggaggcgaaaaatgcgccctgcagaactcacctagaagccaaaaacaacagacttgcacggataataccggggattccgatgacagcgcctccgggattgaggatgtaagcgacgacctgagtaaaatgaaaaatgatgagtccaataaagaaaactctagtgaaatggactacctggagaacgcaacagtgattgacgagtccgctttgacccctgaacagcgcttgggcctaaagcaggcagaagagagacttgaacgtgaccatatatttcgcttggaaaaaagatcccctgagtataccaactgtcgatacctttgcaaactgtgcctcatccatatcgaaaatattcagggagcacataaacacatcaaggaaaagaggcacaagaagaacattctcgagaaacaagaggagtctgagctgcggtctctgcctcccccttctcctgctcatctggctgcactcagtgtcgccgttatcgagctggctaaagaacacggcatcacggacgatgacctgagggtgcggcaggaaattgttgaggaaatgtccaaggtgataactacgtttctccccgaatgcagccttcggctctacggctcttccctgacacgcttcgctctgaagtcctcagatgtgaatatcgacatcaaatttccacccaaaatgaaccacccagatctcctgattaaggtccttggaatattgaaaaaaaacgtcctctacgtggatgtggagtcagacttccacgctaaggttcctgtagtggtctgtcgtgaccggaaaagtggtctcttatgtcgagtcagtgccggaaacgacatggcatgcctgactacagacctgttgactgctcttggtaaaattgaaccagtctttattccccttgtgctcgcatttcggtattgggccaaactctgttacatcgattcacaaactgacggcggcattccctcttattgttttgcactgatggtcatgtttttcctgcagcagcgcaaaccgccgttactcccatgcctacttggatcctggatagagggatttgatccaaaacggatggatgactttcagttaaagggtattgtcgaagagaagttcgtcaagtgggagtgtaattcgagctcagccactgagaaaaattcaatcgccgaagagaacaaggctaaagctgaccaacccaaagatgacacgaagaaaaccgagacagataaccagtctaacgcaatgaaggaaaagcatgggaagagcccactggctctcgaaaccccaaatagagtgagccttggtcagttgtggctagagctgctgaagttctatactctcgacttcgctttggaggagtatgtaatctgcgtgcggatacaggacattctgaccagggaaaacaagaactggcccaaacgacgcatcgccatcgaggatcctttctccgtcaaacggaacgtcgcacgaagcttgaactctcaattagtgtacgagtacgtggtggagagattccgagctgcctatcgctattttgcttgtccacaaacaaaaggaggcaacaagagcactgtggacttcaaaaaaagagaaaagggtaagatctccaacaagaaacctgtgaagagcaataatatggcaacaaacggatgcatcctgctcggggagactacagagaaaattaatgccgaaagggaacagcccgtgcagtgtgatgaaatggattgcacaagtcagagatgtatcattgacaataacaatctgttagtgaatgagttagacttcgcagaccacggccaggactcatcttctctgtccactagtaaatcatctgagatagaacctaagctggacaagaagcaggatgatctggcgccctcagagacatgtctgaagaaagagctgagccaatgtaattgcatcgacttgtctaagtcacccgatccagataaatccaccggaaccgattgccgctctaatctcgagacagaaagttctcaccagtcggtgtgcacagacacctccgcaacaagttgtaattgtaaggccaccgaggatgccagtgatcttaacgacgatgacaacctccccacccaggagctctattatgtcttcgataagtttatcctgacatcaggcaaaccaccaaccattgtttgtagcatctgcaagaaggatggacactctaaaaacgattgtcctgaagatttccgtaagatcgacctcaaaccactgcctcccatgaccaatcgtttcagggaaatcctggacctagtttgcaagagatgtttcgacgagctttcgcctccctgttcagaacaacataatagagaacagattctgattgggctggagaagtttatccaaaaggaatacgacgaaaaggctagattgtgtctttttggtagctcaaagaacgggtttggctttagggatagcgacttggatatctgcatgacactggaaggccatgaaaacgcagagaagctgaactgcaaggagatcattgaaaatctggccaagatcctgaaacgacaccccggcctgagaaacatcctcccaatcacaacagcaaaggtcccaatcgtgaaattcgaacatagacgatctgggctggagggagacattagcctttataacacattggcccagcacaacactaggatgctggcaacatacgccgctatagaccctagagttcagtacttgggctacacaatgaaggtttttgccaagcgctgcgacatcggcgacgcttcgcgcggatccctgagcagctacgcatatattcttatggttctgtactttctccagcagcggaagccaccagtcatccctgtcctccaagaaatcttcgatggcaagcagattccacagaggatggtggatggctggaatgccttcttctttgacaagactgaggagttgaagaagagactccctagtctcggcaaaaatacagagtctctgggagaattatggcttggcttgctgcgcttctacactgaagaattcgattttaaggagtatgtgatctccattcgccagaagaagcttctaactacctttgagaaacagtggacttcgaaatgcatcgcgattgaagaccctttcgacctgaaccataatctgggtgccggagtgtccaggaagatgaccaattttatcatgaaggcattcatcaacggccgcaagcttttcggtacccctttctatccactcatcgggcgcgaagcggaatacttttttgacagccgcgtgctcaccgatggagagctggcccccaacgacagatgttgtcgcgtgtgcgggaagatagggcattacatgaaggactgccctaaacgcaagagctccttactgttcaggctgaaaaagaaagactctgaagaagagaaggaaggcaacgaagaggaaaaggacagccgcgacgtcctggacccccgggatcttcacgatacgcgcgattttcgtgatcccagggatcttaggtgttttatatgcggcgacgcaggccacgttcggagggagtgtcccgaggttaaattggcccgacagcggaattcctctgtggccgctgcccaactggtgcgtaatctcgtcaacgcccagcaggtagcgggcagcgcacagcagcagggagatcaatcaattagaacgcgacagagtagcgagtgctcagaaagccctagttattccccacaacctcagccatttccacagaattcatctcagtcggcagcaattactcagccgtcttctcagccaggttctcaacctaagctaggaccccctcaacaaggggcccagcctccgcatcaggtgcagatgcccctgtataacttcccccagtctccaccggcccagtatagccccatgcacaacatgggactcctccctatgcatcccttacagattcccgcaccctcatggccgatacatgggcccgtaatccattctgcacccgggtctgcgccctctaacatagggctgaatgacccttcgatcatatttgcccagccggcagctcggcccgtggccatccctaatactagtcatgacggacactggccgagaactgtggcacctaacagcctagtcaactcgggagccgtgggtaacagtgaacccggctttcgcgggctgacccctcccattccatgggaacacgccccccgcccgcacttcccgctggtccccgccagctggccctacggcttacaccaaaactttatgcatcagggaaatgctagatttcagcctaacaagcctttctacacacaggataggtgcgctactcggcgctgccgagagagatgcccccacccgcccagaggaaacgtgtccgaatag

SEQ ID NO: 141707 - DNA, 4935 bp, synthetic construct
  misc_feature 1..4935: note = Description of Artificial Sequence: Synthetic coding sequence
  source 1..4935: mol_type = other DNA
atggaagaatcaaagacactcaagtctgagaatcatgagccaaagaagaatgttatttgcgaggaaagcaaggctgtccaggtgatcggtaaccaaacactgaaggcgcgcaacgataaatctgttaaagagattgaaaactctagccctaatcgaaacagctctaagaagaataagcagaatgacatatgtatcgagaaaacggaggtaaaaagttgcaaggttaatgcggcaaaccttcctggtcctaaggatctgggcctcgtcctgcgcgatcagtcccactgcaaggctaaaaaattcccaaactctcctgtgaaggccgaaaaagccaccatcagccaagctaagagcgagaaagctacctcactgcaagcgaaagccgagaagtctccgaagtctccaaattctgtaaaagccgaaaaggcttcttcctaccagatgaagagtgaaaaggtcccctcatctccagccgaggcagaaaaaggcccctctcttttactcaaggatatgagacaaaagaccgaactgcagcagattggtaagaaaatccctagtagtttcacttctgtcgataaggtgaatatcgaggcagttggcggagaaaaatgcgcactccagaacagtcctcggtctcaaaagcagcagacgtgcaccgataacacgggtgactccgatgacagtgcttcagggatcgaggacgtatctgatgacttgagcaaaatgaaaaatgatgaaagcaacaaagagaacagcagcgaaatggactatctggagaacgctaccgtcatcgacgaaagcgcactgacgcccgaacagagattgggcctgaagcaggccgaggaacgtcttgaacgcgatcacattttcaggctagaaaaacggtctcccgagtatacgaactgtcgctatctgtgtaagctttgtttgatccacatcgaaaacattcaaggcgctcataagcacatcaaagaaaagcgtcacaagaagaatatattagagaagcaagaggaatccgagctgaggagcctgccaccaccaagtccagcccacctggctgcattgtctgtggccgtcatcgaactggccaaagaacacgggatcaccgatgatgatctgcgcgtgcggcaggagatcgtcgaggagatgagcaaggtcattactaccttcttaccagagtgctccttgaggctctacggtagctcattgacacggttcgccttgaaatcgagcgacgtcaacattgacatcaaatttcctcccaagatgaaccaccctgacttattgatcaaggttctcgggatcctaaagaaaaacgtcttgtacgtggatgtggagagtgactttcatgctaaggtacctgtggttgtgtgtagagataggaaaagcggcctcctttgtcgggtctctgctgggaatgatatggcgtgccttacaacagacttgctgaccgccttggggaagattgagccggtatttatcccattagtgcttgctttccggtattgggccaaactgtgttacattgattcacaaacagatggagggatcccctcctactgtttcgcgctgatggtaatgttcttcctgcagcagcgcaagcctcccctgcttccatgtttactgggttcttggattgaagggttcgaccccaaacgcatggacgactttcaactgaaaggcattgtggaagaaaaatttgtgaagtgggagtgcaactctagtagtgcaacggagaagaatagtattgccgaggaaaacaaggccaaggctgatcagccaaaggatgatacgaaaaagaccgagaccgacaaccagagtaatgccatgaaagagaaacacggtaaatccccactggcattagagactcctaaccgagtcagtttgggccagttgtggctggaactcctgaagttttatactttagacttcgccctggaggaatacgtgatttgcgtgcgcatccaggatattctcacccgagagaataaaaattggcctaagagaagaatcgctatagaagaccccttctccgtaaaacgtaatgtggcgcggtctctgaatagtcagctcgtgtacgagtatgttgttgaacgttttcgcgccgcctaccggtattttgcctgcccacagactaagggcggtaacaaatcaactgtggatttcaaaaaacgagaaaaaggaaagattagtaacaagaagcctgtaaagagcaacaacatggccactaatggttgtatattactgggcgagacgaccgaaaagatcaacgccgaacgggagcagcctgtgcaatgtgacgagatggactgcacaagccagcgctgtatcatcgacaataataaccttttagtgaatgagttagatttcgccgatcatggacaggactcaagttccctgtcgacatcaaaatcatctgagatcgagcctaaactggacaagaagcaggatgacttggccccatccgaaacttgcctgaagaaggagctgagccagtgtaattgtatagatctgtcaaagtcgcctgacccagacaaatcgacaggaaccgattgtaggagcaacctcgaaacggagtctagtcatcaaagcgtgtgcactgatacgagcgccacttcttgtaactgcaaggcaactgaggacgcgtccgatctaaacgacgacgataatctgccaacccaagagttgtactatgtgttcgataagttcatcctgactagcgggaaaccccccactatcgtatgttctatatgcaaaaaggatggtcattcgaagaacgactgtcccgaggacttcaggaagatcgacctgaagccactgcctcctatgaccaatcggttccgcgagatactggatctcgtctgtaagaggtgttttgatgagttgtcaccgccatgctctgagcaacacaacagagaacagatcctgatcggattagaaaagtttatccaaaaagaatatgatgagaaggccaggctgtgtctgtttggaagcagtaaaaacgggttcggctttcgcgactctgacctggatatttgtatgacgttggaagggcatgagaacgcggaaaaactgaactgcaaagaaatcatcgaaaatttggccaagatcctgaagcggcaccctggcctcaggaacattctgccaattaccaccgcaaaggttcccattgttaaattcgagcatcgcaggtcaggcctagagggcgacattagcctgtacaacacactggctcagcataacacaagaatgctggcaacgtatgctgcaatcgacccccgcgtgcaatatctaggctataccatgaaagtttttgctaaacgatgtgacatcggtgacgccagtcgcggttctctctcatcttacgcctacatcctcatggtgttgtatttccttcaacagcgaaagccccccgtcattccagtgctccaggagatattcgacggcaagcaaattccccaaagaatggtggatggctggaatgcgttcttcttcgataagacagaagagctaaaaaagcggttgcccagtctcggcaagaatactgagtctttgggcgaattgtggctcgggctgctgcgattctacacggaagaatttgacttcaaagagtatgtgatctcgatcagacagaagaagttgctgacgaccttcgagaaacagtggaccagtaaatgcatagcgatcgaggacccatttgacctgaaccataatctaggcgctggagtgagtaggaagatgacaaacttcatcatgaaggcattcattaatggccgcaaactgttcggcacacctttttaccctttaataggccgagaagccgaatactttttcgactcacgggtgctgacggacggcgaactggcccccaacgatcgctgttgtcgggtttgcggtaaaatcggccattatatgaaggactgtcctaagcgaaaatcgctgttatttcgcttaaaaaagaaagattccgaggaggagaaagagggaaatgaggaggaaaaagatagtagagatgtgcttgacccccgcgacctgcatgatacccgagattttagagacccacgtgaccttcggtgttttatctgcggcgatgcaggtcacgtccgccgcgaatgcccagaagtcaaacttgcgcggcagcggaactccagcgtcgccgccgctcagctggtcagaaacctcgtcaacgcccagcaggtcgccggatccgcccagcaacagggcgatcagagcatacggactaggcagtcctccgaatgctccgagtctccatcatacagcccccagccccagccgtttccccagaatagttcacagtctgccgcgatcacacagccgagtagtcagcctggatcccagccaaaactcggccctcctcagcaaggggcccagccccctcaccaggtgcagatgcccctttacaacttccctcagtcccctcctgcacagtattcccccatgcacaacatgggccttttacctatgcaccctctccagatcccagccccttcatggcccatccacggcccagtcatccactccgctcctggaagcgcgccatccaatatcgggctgaacgatccatccataatcttcgcccagccggccgcccggcctgtggcaatcccaaacacctcccacgatggccattggccccgcacagtcgcgcccaactctttggttaattcaggagctgtgggcaattcggagcctggtttccggggtctgacgcctcctataccatgggagcatgctcccagacctcatttcccattggtgccggcaagctggccctacgggctccatcagaacttcatgcaccaaggcaacgcaaggttccagccaaacaagccattttatacgcaggatcggtgtgcgacccgtcggtgtcgagaaaggtgtccacaccccccccgggggaatgtgtcagagtag

SEQ ID NO: 141708 - DNA, 264 bp, synthetic construct
  misc_feature 1..264: note = Description of Artificial Sequence: Synthetic coding sequence
  source 1..264: mol_type = other DNA
atggaggaatccaaaactctcaagtccgagaaccacgaaccaaagaagaacgtgatttgcgaagaaagtaaagcggtgcaggtgataggcaatcagacccttaaggccaggaatgataagagtgtgaaagagatagagaactcctcccccaatcgcaactcaagcaagaagaataagcagaatgacatctgtatcgaaaaaaccgaagtgaagagctgtaaagtaaacgcggctaacctgccaggccctaaggacctgggctag

SEQ ID NO: 141709 - DNA, 234 bp, synthetic construct
  misc_feature 1..234: note = Description of Artificial Sequence: Synthetic coding sequence
  source 1..234: mol_type = other DNA
atggaggagtctaagaccctcaagtccgaaaatcatgagcccaaaaaaaatgtgatttgcgaggaatccaaggctgttcaagtcattgggaatcaaacactcaaagcgaggaacgacaagtccgtgaaggagattgagaactcttctccaaacagaaacagtagtaagaaaaacaagcagaacgatatttgcattgaaaagaccgaggtgaagtcatgcaaagtgaatgcatag

SEQ ID NO: 141710 - DNA, 1209 bp, synthetic construct
  misc_feature 1..1209: note = Description of Artificial Sequence: Synthetic coding sequence
  source 1..1209: mol_type = other DNA
atggcctccatcattgcaagagtgggcaatagccgaaggttgaacgcgcccctgccgccctgggcacacagtatgctgcgttcactgggtaggtccctaggacccattatggcgtcaatggccgacagaaatatgaaactgttctccgggcgcgtggtgcctgcgcaaggggaagaaacctttgaaaattggctgacccaggttaacggcgtgctccctgactggaatatgtcggaggaggaaaagctgaaaagattgatgaagacgcttcgcgggccagcccgtgaagtgatgcgggtcctacaagcaacaaacccgaacctcagtgtcgccgacttcttgcgagcaatgaaactggtatttggggagagtgagtccagtgtgactgcccatggtaagtttttcaatacactgcaagcccagggagaaaaggcaagcctctatgtaatcaggctggaggttcagctgcagaatgcaattcaggccgggattatagctgagaaggatgcgaacaggaccagattgcagcaactgcttctgggtggggagttgtctcgagatctgcggctgcgactgaaagatttcttacggatgtatgctaacgaacaggaaaggctgcccaattttttggagcttattcgcatggtgagggaagaggaggattgggacgatgccttcataaaacgaaaacggccaaagaggtccgagagtatggtggagagagcagtgagtcctgtggcgtttcaggggtcaccacccatcgtgatagggtccgccgactgcaatgtcatagagatcgacgacactctggacgattcagatgaggacgtgattttagttgagtcacaagacccgcccctgcccagctggggggctcctccacttagggaccgcgctcgccctcaggatgaagtgctggtgattgatagcccccacaactctcgggctcaatttccttccacttcaggaggcagcggatacaaaaacaatgggcctggggaaatgcgaagggcccggaaacgtaaacacacgattagatgtagttactgtggagaggagggccattccaaagagacttgcgacaacgagtccgacaaggcccaggtgtttgagaacctcattatcacactgcaggagctgacgcatacagaaatggagcgctccagggtggcccccggcgaatacaacgactttagtgagccactgtag

SEQ ID NO: 141711 - DNA, 1542 bp, synthetic construct
  misc_feature 1..1542: note = Description of Artificial Sequence: Synthetic coding sequence
  source 1..1542: mol_type = other DNA
atggccgcctctcgcaacggatttgaggcggtagaggcagaaggatcggccggatgtcgtggatcctctggcatggaagtggttctgcctctcgacccagctgtccctgcccccctttgcccccacggcccaactttacttttcgtgaaagtaacccaggggaaggaagaaacgagaagattctatgcttgctctgcatgtagggataggaaagactgcaacttttttcagtgggaggatgagaaactaagtggcgccaggcttgccgcccgcgaagcacacaatcgacgatgccagcctcctctgtctcggactcagtgcgtggagcgatatttgaaattcattgaactcccactcacccagcgcaagttctgccaaacctgtcaacagctactgctgcccgacgactggggtcagcacagcgagcaccaagtgctgggaaatgtgagcattacccagctgaggaggcctagtcagctactgtatccgctggaaaataagaaaacaaatgcacagtacctatttgcggataggagctgtcagttcttggtggatctgctgtccgcactgggatttcggcgggtgctgtgtgtcggaaccccaagactgcacgaattgatcaagttgaccgccagtggcgataaaaaaagcaatatcaagagcttattattagacattgatttccgatactcccagttctatatggaggacagcttttgccactacaacatgtttaaccaccacttctttgacggaaaaacagcactggaggtgtgccgcgctttcctgcaggaagataagggggagggaataatcatggtgacggaccccccttttggaggactggtcgagcctttagcaatcacatttaagaagctcatcgcgatgtggaaggaaggtcagtcccaggacgacagtcacaaagaactgccgatcttctggatcttcccatacttcttcgaaagccgaatttgtcaattcttccctagctttcagatgctggattatcaggttgattatgataatcatgccctctacaagcacggcaagacgggtcgcaagcagtcacccgtgagaatttttacaaatatcccccccaacaagattatcctgcctacagaagagggttatcgtttctgctccccttgccagcggtacgttagcctggagaatcagcattgcgagctgtgcaatagttgcacaagtaaagatggtcgcaaatggaaccattgtttcttgtgcaagaaatgtgtgaaaccgagctggatccattgttccatctgcaaccattgcgcggtgcccgatcactcttgcgaaggaccgaaacacgggtgttttatttgtggagaactcgatcacaagcgcagcacatgccctaacatcgcaacttcaaaacgggcaaataaagccgtccgcaaacagaagcagcgcaaaagcaacaagatgaagatggagactactaagggtcagtcaatgaatcatactagcgccaccagacgaaagaagcgcagagagagagcccaccagtatcttgggtcatag

SEQ ID NO: 141712 - DNA, 384 bp, synthetic construct
  misc_feature 1..384: note = Description of Artificial Sequence: Synthetic coding sequence
  source 1..384: mol_type = other DNA
atggaggtcgtgctccccctcgaccccgcggttcctgcacccctctgccctcacggtcccaccctcctcttcgtgaaagtgacccaaggcaaagaggaaacacgccggttctacgcctgctccgcttgtcgtgaccggaaagactgtaatttctttcagtgggaagacgagaaactgagtggagccaggctcgccgcccgtgaggcacacaaccgacggtgccagcctcccctttctagaactcaatgtggcaggtacttgaaattcatcgagttgcctctgactcagcgcaagttctgtcaaacatgtcagcagcttcttttgcctgatgactggggccagcattctgagcaccagttttgggtctgcgtcatcacttcatag

SEQ ID NO: 141713 - DNA, 1479 bp, synthetic construct
  misc_feature 1..1479: note = Description of Artificial Sequence: Synthetic coding sequence
  source 1..1479: mol_type = other DNA
atggtaattctgctgttgcagcacggggcagaccccaccctgattgacggagaaggtttctcctccatacatcttgcggtgctctttcagcatatgcccattatcgcctacctgatcagcaagggccagtccgttaatatgacagacgtaaatgggcaaacacctctgatgctgagtgcacacaaagtaatcgggccagaacccactggctttttacttaaattcaatccatcactgaatgtagtggataagatccaccaaaacacgccacttcactgggctgtggcggctggaaacgttaacgctgttgataaactcttggaggcagggagttctctggatatacaaaatgtgaagggcgagacaccgctggacatggccttgcagaataaaaaccagctgataatccatatgctcaagaccgaagccaaaatgcgggctaaccagaaatttcgcctgtggaggtggttgcagaaatgcgaactttttttgctgttgatgctgtcagtgatcacaatgtgggcgatcggctacatactggacttcaattcggattcgtggcttctaaagggatgtctgttggttacgctgttcttcttgacatccctgttcccgaggtttctggtgggttacaagaatctggtgtatctcccaactgccttcttgcttagctccgtgttctggatctttatgacgtggtttattttgttttttccagatctggccggagctccgttctacttcagcttcatctttagcatcgtggcattcctgtactttttttacaagacctgggccacagatccagggtttaccaaggccagcgaggaggagaaaaaggtcaatatcataaccctcgcagaaaccggctctctggacttccggaccttttgcacatcatgtctcatccggaagccactcagatcgctacactgtcacgtttgcaattgttgtgtggctagatacgaccagcattgcttgtggactggacggtgcattggtttcgggaatcatcactattatatattctttctgttttttctgagcatggtctgtggatggattatttatgggtcctttatctaccttagctcgcattgtgccacaacctttaaggaagacggactatggacgtatctgaaccagatcgtagcatgttctccatgggtgttgtacattctgatgctggcaactttccatttcagctggagcacctttctgctgttgaaccagctgttccaaatcgcatttctgggactgacctcacatgagagaattagcttgcaaaagcagagcaagcatatgaaacagaccctcagcctccggaaaaccccatacaatctcggcttcatgcagaacctggccgacttcttccagtgtgggtgcttcggcctcgtgaagccatgcgtcgtggattggacgtctcagtacacaatggtttttcatccagctcgtgagaaagtgttgaggtccgtgtag

SEQ ID NO: 141714 - DNA, 1869 bp, synthetic construct
  misc_feature 1..1869: note = Description of Artificial Sequence: Synthetic coding sequence
  source 1..1869: mol_type = other DNA
atggagggaccgggcttggggtctcagtgtagaaatcactcacacgggccccaccctcccggctttgggcgctacggtatttgcgcacatgagaacaaagaacttgccaacgctagggaagcacttccactgatcgaggattcgtccaattgcgatatcgtcaaggccacccagtacgggatattcgagcggtgcaaggaactagttgaagccggctacgacgtcagacaacctgataaagaaaacgtgagtctgctgcactgggccgctatcaacaatcggttggacttggtcaagttctacatctctaagggcgcagttgtggaccaactgggaggcgacctgaatagcacgcctctgcactgggcaattcggcaagggcacttaccaatggtaatcctgttgcttcagcatggcgcggaccctaccctgatagatggggaaggcttctcttctattcacctagctgtcttgtttcaacatatgccaatcatagcttacttgatctccaagggccagtccgtgaacatgacagacgtgaacgggcaaacgccgcttatgttgtccgcacacaaggtgattgggccagagcctactgggttcttgctgaagtttaacccaagtctgaatgttgtggacaagattcaccaaaatacacccctgcattgggctgtagctgccggcaacgtcaacgctgtggacaaattgcttgaggctggttcatcgctcgacattcagaacgttaaaggtgagaccccacttgacatggcactacagaacaaaaatcaattgattattcacatgctaaagaccgaggccaaaatgagggccaatcagaaatttaggctgtggcggtggttgcagaagtgcgaactgttcctccttttgatgctctccgtgatcaccatgtgggcgattggttatatcctagacttcaacagtgattcctggctgctgaaaggctgtctgcttgtaaccctgttctttctgacatcattgtttcccagatttttagtgggttacaagaacttggtctacctccccacagccttcctcttatcgagtgtgttctggatctttatgacatggttcatcctgttctttccagacctcgccggggctccattttacttctcttttatcttttcgattgttgcatttctctatttcttctataagacctgggccacggatccaggattcaccaaagcatccgaggaagaaaaaaaagtgaatataatcaccctggccgagacagggagtttggacttccgcaccttttgcactagctgtcttattagaaagcctttgcgatccctgcactgccacgtctgcaactgttgtgtagcccgatacgaccagcactgcctatggacaggtcggtgcatcggatttggcaaccaccactattacattttcttcctgtttttcttgagcatggtctgcggctggattatctacggaagcttcatctacctgagcagccattgtgcaaccacattcaaggaggacggcctttggacctatctaaatcagattgtcgcttgtagtccatgggtgctttacattctgatgctggccacttttcatttttcatggagcacgttcttgttgctgaatcagctgtttcagatcgcattcctgggactcacctcacacgagcggatctcccttcagaaacaaagcaagcacatgaagcagacactgtccctgcggaagaccccttataacctcggctttatgcagaacctggcggatttcttccagtgcggttgcttcgggcttgttaaaccttgtgtggttgactggacatcacaatatactatggtctttcacccagctagagagaaggtgcttcgaagcgtatag

SEQ ID NO: 141715 - DNA, 564 bp, synthetic construct
  misc_feature 1..564: note = Description of Artificial Sequence: Synthetic coding sequence
  source 1..564: mol_type = other DNA
atgaggagaggctggaagatggcccttagcggcggtctaagatgctgtaggcgggttctgtcttgggtgcccgtgctggtgattgtcctggtagtgctatggtcttactatgcctacgttttcgagctttgcctagtcaccgtgctgtccccagccgagaaagttatttacctgatcctataccacgccatttttgtgttttttacgtggacgtactggaaaagcattttcacattaccacaacagccgaatcagaagtttcatctttcatataccgacaaggaaagatacgagaacgaggaaagaccagaggttcaaaagcaaatgctggtcgacatggcgaagaagctgcctgtgtatacccggacggggtctggggcagtgcgcttctgtgaccgctgtcacttgatcaaacctgataggtgccaccattgttcagtgtgcgccatgtgtgtgttgaagatggatcatcactgcccgtggggaaattatcccgtattcgctctgtcttccatgagcttcttctttagcctctggcccgcctgttttctctcggccctatag

SEQ ID NO: 141716 - DNA, 1014 bp, synthetic construct
  misc_feature 1..1014: note = Description of Artificial Sequence: Synthetic coding sequence
  source 1..1014: mol_type = other DNA
atgcgacggggatggaaaatggccttgtccggtggcctccgatgctgtcgccgggtgctatcatgggtacctgtgcttgtcatcgttctggtagtgttatggtcgtattatgcctacgtgttcgaactctgcctcgtcactgtcctctcccctgccgagaaggtaatctacctgattctctatcacgcaatcttcgtgtttttcacctggacctattggaagtccatcttcaccctgccacaacagcccaaccaaaaatttcatttaagctacacagacaaagagcgatacgagaacgaggagcgaccagaggttcaaaagcaaatgctcgtggatatggctaagaagctgccggtgtacacccggaccggcagcggagctgtcaggttctgtgatcgatgtcacctgataaaacccgatcggtgccaccattgcagcgtctgtgcaatgtgtgtactgaagatggatcaccattgtccgtgggtgaataactgtatcggtttctctaattataaattctttctgcaatttctggcctacagcgtgctatattgtctttatattgcgactaccgtttttagctacttcatcaagtattggcggggagaactccctagcgttaggagtaagttccacgtgctatttctgttattcgtcgcttgcatgttctttgtttcattggtaattttattcggttatcattgttggctcgttagtcgcaacaagaccacgctggaggccttctgcacaccagtatttacctccggtcccgagaagaatggttttaacttggggttcattaaaaacatacagcaggtgtttggcgacaagaaaaagttctggctcattccaatcgggagctcgccaggggatggacactccttcccaatgcggagcatgaacgagagtcagaatccacttctggctaatgaggagacttgggaggataatgaagacgacaaccaagactacccagaagggagttcatccctcgctgttgagacagagacatag

SEQ ID NO: 141717 - DNA, 987 bp, synthetic construct
  misc_feature 1..987: note = Description of Artificial Sequence: Synthetic coding sequence
  source 1..987: mol_type = other DNA
atgcgccgcggctggaagatggcgcttagcggagggctcagatgttgtaggagagtgttgtcatgggtgcccgttctcgtgattgtgctcgtggtgctctggtcatattatgcgtatgtttttgaactgtgtctcgtcatctatctgattttgtaccacgcgattttcgttttttttacctggacgtactggaagtctatttttaccctcccgcagcagcctaatcagaaattccatctgtcctataccgacaaggaaaggtacgaaaacgaagaacgcccagaagtccaaaaacagatgctcgtcgatatggcgaagaagctgcccgtgtatactagaactggttccggtgctgtgcgcttttgtgatagatgccacctgatcaagcctgatcggtgccaccattgtagtgtgtgcgcgatgtgtgttctcaagatggatcatcattgcccctgggttaataactgtatcggtttctctaattacaaattcttcttgcagtttcttgcctactcagtgctgtattgcctctacatcgctactactgtttttagctactttattaagtactggcgcggagaactaccgtctgtgcggtccaagtttcacgttctattcctgcttttcgtggcatgcatgttttttgtcagcctggtgatactttttggttatcattgttggcttgtgtcacgcaataaaacgacattagaagcgttctgcactcctgtgtttacttcagggcccgagaaaaatggattcaacctgggctttattaaaaacatccaacaggtgttcggagataagaaaaaattctggctcattcctatcgggagtagcccaggggatgggcacagtttcccgatgcgttctatgaacgagtcccagaacccactgctggctaatgaggagacttgggaagacaacgaggatgacaaccaggactacccggaaggtagttcttccctcgccgtggaaaccgaaacatag

SEQ ID NO: 141718 - DNA, 2022 bp, synthetic construct
  misc_feature 1..2022: note = Description of Artificial Sequence: Synthetic coding sequence
  source 1..2022: mol_type = other DNA
atgccccgctcacccggcaccaggctgaagcctgccaaatatattccagttgctactgcagcggccctgctcgtgggctcttctacattgttctttgtcttcacgtgtccttggctcacaagggctgttagtcctgcggttccagtgtacaacggcattatcttcttattcgtgctcgccaattttagtatggccacgttcatggatcccggggtgttccccagagccgatgaggacgaggataaggaagacgacttccgcgctccactgtataaaaacgtagacgtcagaggcatccaggtgcgcatgaagtggtgtgctacatgtcatttctatcgcccgccacgttgctcacactgctcagtctgtgacaactgcgtggaggtgaccggcaaattccgaggcggtgtaaatccttttacacgcggctgctgtggaaacgtagaacatgtgctgtgttctccgctcgcaccccgatacgtggtggagccaccccggctccccctggccgtatccctcaagcctccgtttctgcggccagaacttctggaccgcgcagctccattgaaagtgaagctgtcggataatggactgaaggccggcctggggcgctcaaaatccaaggggagtctggacaggcttgacgaaaaaccccttgacctgggtccacctttaccacctaaaattgaggcaggaacgttcagctcagacttgcagacccctcgccccggatctgcagaaagcgccctctcagtgcagcgcacgagccctccaacacctgccatgtataagttccgacccgcgttccctaccggcccaaaggttccgttttgcgggcccggggagcaagtgccagggccagactcactcaccctgggtgacgacagtattcgctccctggacttcgtctcggagccttccttggaccttcccgactatggccctggtgggctacacgcagcttaccccccttcaccaccgctgtccgcttcggatgcttttagtggggctttacgtagcctgagcttaaaagccagcagtaggcgggggggagaccatgtggcgcttcagcccctccgctcagaaggtgggccccccacgccccaccggtccatcttcgccccacacgccctgcctaaccggaatgggagtctcagttacgattctctgctcaatcctggatcaccaggaggccacgcttgcccagctcaccccgcagttggagtggccggctatcactctccttatctgcaccccggtgcaacgggggaccccccccggcctctccctcgtagctttagcccagtgctagggccaaggccccgcgagccttcaccagttcgttatgataacttgagtcggactatcatggcgtcaatccaggagcggaaggatcgtgaagagcgagagagactcttgcggtctcaggccgattctctgttcggtgactccggcgtttacgatgccccctcctcttacagtctccaacaagcatctgttctcagcgaaggtccaagggggccagccttaaggtacggaagtcgggacgatctagtggccgggccgggatttggcggtgcaaggaacccagctcttcagacttctctcagtagtctgagttcatccgtttctagggctccaaggacctcttcatctagcctgcaggccgaccaagctagctcgaatgctcctgggcctcgccccagttctggctcacacaggtcccctgctaggcaggggctgcccagtccgccagggactcctcattccccaagctatgccggacctaaggctgttgccttcatccatactgatcttccagagcccccccccagcctcaccgttcagcgtgatcacccccagctaaaaacaccgcccagcaaactgaacggccaaagtcctggtcttgccaggctgggaccggccacaggacctccaggccctagcgcgagtccgactcgccatactttggtaaagaaggtgtctggtgtggggggaactacgtatgagatctccgtgtag

SEQ ID NO: 141719 - DNA, 2298 bp, synthetic construct
  misc_feature 1..2298: note = Description of Artificial Sequence: Synthetic coding sequence
  source 1..2298: mol_type = other DNA
atgcctaggtccccagggacccggttaaagccagccaagtatatccctgtcgcgaccgccgccgccctactcgttggttcttcgacactgttcttcgtgtttacctgtccgtggctaacccgtgctgtgtctccagcagtgccagtttacaacggcatcattttcttatttgtcctggccaatttcagtatggcaacttttatggatccgggggtgtttccccgagccgacgaggatgaagataaggaggatgattttcgggccccattgtacaagaacgttgatgttcgaggcatccaggtccggatgaaatggtgtgcgacatgccacttttaccgtccaccccggtgctcacactgctctgtgtgcgataactgcgttgaggattttgaccatcactgtccttgggtgaataattgcattggccgaaggaattaccggtacttctttctgtttctgctcagcctttcggctcacatggtcggagtggtggccttcgggctggtgtatgtgctgaaccacgcggagggcttgggggcagcccacacgacaataactatggccgtcatgtgcgtggctggcctgtttttcataccagtgatcgggttgaccggcttccatgttgtgctggtgactagaggccggacgactaacgagcaggtcactggcaaattccgcggcggagtgaatccgtttacccggggttgctgtgggaatgtagaacacgtcttgtgtagtcctttggctcccagatatgtggtggagcccccacggctacctcttgccgtgtcccttaaaccccccttcctccggccggaactcttagaccgcgctgcaccacttaaggtgaaactctccgacaatggcctcaaggcagggctgggacgctcgaaaagtaagggttccctggacaggctcgacgaaaagcccctggatctgggccctcccctacctcccaaaattgaagccggcacattctcctcggatctccaaactccacgcccaggcagcgccgaaagcgcactgagtgtacagcggactagcccccctacgcctgccatgtataaattccggcctgccttcccaaccgggcccaaagtaccattctgtggacctggtgaacaggtgcctggacctgatagcctgactctgggggatgactcgatcaggtcattggacttcgtctctgaacctagtctggatcttcctgactatggaccaggcggactccatgcagcatatcccccatcaccccccctcagtgcgagtgacgccttttccggtgcactgcggtccctcagtctaaaggcgtcctcccggcgagggggcgatcatgtcgctctgcagcccttgcgcagcgaaggtggcccaccaacacctcatagatcaatttttgccccacatgcactgcctaaccgcaatgggagcctgtcctatgactctctcctgaaccctggttctccaggtgggcatgcttgtccagcacacccagctgttggcgtggccggctaccactcaccgtatctgcatcccggggccacgggagacccacccagacccctccctagatccttctctccagtcctaggaccccgtccacgagagccttctcccgtccggtatgacaatttaagcagaactatcatggcctctattcaagaacgtaaagacagggaagagcgggaacggttactgcgctcgcaggcagattctctgttcggagactctggggtctatgacgcaccttcatcttattctctgcagcaggcttctgtgctgtcagaagggcctcgcggtcctgccttaaggtacgggagcagagatgatcttgtcgcggggcccggcttcggcggagctaggaaccctgccttgcagaccagcctgtccagtctctcgtccagtgtttcacgcgccccccgtacctccagcagttctctgcaagcagatcaagccagttctaatgctcccggcccgcggccatcctcagggagccaccgttctccagccaggcagggcctgccaagcccgcccggcacacctcattctccctcctatgccgggcccaaggccgtagccttcatacatactgacctacctgaaccacctccgtccctcactgtgcaaagggatcacccccaactgaaaacaccaccttctaaactcaacggccaaagccctggactggccaggctcgggcctgctaccggccctccaggcccttctgctagtccaacaagacatacccttgttaagaaagtcagtggcgttggaggaacaacttacgagatatcagtctag

SEQ ID NO: 141720 - DNA, 2337 bp, synthetic construct
  misc_feature 1..2337: note = Description of Artificial Sequence: Synthetic coding sequence
  source 1..2337: mol_type = other DNA
atgccccgcagccctgggacaagactcaaaccggcgaagtacattcccgttgcgactgcagctgcactgttagttggaagttctacgctattcttcgtgtttacttgcccttggctgacccgtgctgtttcaccagcagtgccagtttacaacggaatcatttttctgtttgtgctggccaacttttctatggctacatttatggaccccggagtttttccacgcgccgacgaagatgaggacaaggaggatgatttccgggctcccttgtataagaacgtcgacgtgcgtggtatccaggtgcgcatgaaatggtgtgcaacatgtcacttctatcgtccacctaggtgcagccactgttccgtgtgtgacaattgcgtagaggactttgaccaccattgcccatgggtcaataactgcatcggaaggcggaactaccggtattttttcttgtttctcctgtctctgtccgcccatatggttggagttgtggcctttggtcttgtgtatgtgctgaatcatgctgaagggctaggcgcagctcataccaccattaccatggccgttatgtgcgtcgctggcttgttctttatcccggtaatcggcttgacgggcttccacgttgttttggtcacgaggggcagaacgaccaatgagcaggtgaccggcaaattccggggcggcgtcaacccttttacaagaggatgctgcggaaacgtggagcacgtgctgtgttcaccattggctccgaggtacgtcgtggaacctccgcggcttcctctcgctgttagcctgaagccgccatttcttagaccagagctgctggatcgagcagcccccctgaaggtgaagctgtcggataatggcctgaaggctggccttggtcgatctaaaagcaagggaagcctggatcgactcgatgagaagcccctcgacctgggaccccctctgcctcctaaaatcgaagccgggacattcagcagcgatctccagacgccaagacctggctccgctgagtctgccttaagtgtgcagaggacatcacccccaacgcctgctatgtacaagtttcggccagcatttcctacaggccccaaagttcctttctgtggccctggagagcaggtgccgggccccgatagcttaactctgggcgatgactccatcagatctctggactttgtgagcgaaccatctttagatttgccagactacggaccaggaggactacacgcagcatacccccccagccctcctctgagcgcttcagacgcatttagcggtgccttgaggtccctatcgctgaaggcgtcttccagacgtggcggggaccacgttgctctccagccgctgcgttctgagggagggccgcccacacctcatcgtagtatcttcgccccccatgcactgcccaaccgaaatggatctctcagttacgattctctcctgaacccagggagtcctggcgggcacgcatgccccgcacaccccgcagtgggagtggccgggtaccactccccatatctgcatccaggggctaccggagatccgcctagaccactgcctaggagcttttcccctgtcctgggacctagacctagagagcccagccccgtccggtatgataatctatctcggaccatcatggcaagcatccaagaacgaaaagaccgtgaggagcgcgaaaggctgctgaggtcccaggctgacagcttgttcggcgattcaggtgtttacgacgcaccttcctcttattctctccaacaggccagcgttctctccgagggccccagagggcctgccctgcggtatggcagtagagatgatctggttgccggcccagggttcggtggggcaaggaatcccgcattgcaaacgagcttgtcgtcgctgagctcgtcagtttccagagccccacgaaccagctcgagtagcctgcaagctgaccaggcaagcagcaatgcacccggcccgcgcccatcttccgggtcccatagatcaccagcccggcagggtctgcccagcccacctggcaccccacatagcccgagctacgctggccccaaggcagtcgcctttattcacacagatctgcctgaaccccctccaagcctaaccgttcagcgcggcaggatcggcacctgcacccggggatggggcagacgaggccagccatgggtgccacctggtctacatctgtgccacctgggccggcctgaggaccgcccaccgctgcgagctccttggtcacaagctgccggagcccctcctagaggcgccatgtgccggcttcatctggccgcatcttcactgttccccagcctgagtggcccatag

SEQ ID NO: 141721 - DNA, 1095 bp, synthetic construct
  misc_feature 1..1095: note = Description of Artificial Sequence: Synthetic coding sequence
  source 1..1095: mol_type = other DNA
atgtcggttatggtggtacgcaagaaagtgacgcggaaatgggagaaacttcccgggcgcaacacattctgctgtgatggcagagtcatgatggctaggcagaagggcattttctatttgaccctgtttcttattctgggaacatgcacactgttttttgcattcgagtgtcgctatttggccgtgcagctatctcccgctattcccgtgtttgcggctatgcttttcctgttctctatggctacgcttctgaggacctctttttccgatccaggcgtgatccccagagccttacccgacgaagctgcgttcatagaaatggagatcgaggccacaaatggagcggtgccccagggtcaaagaccaccgcctagaataaagaatttccagatcaacaaccagattgtcaagctgaagtattgttatacctgtaaaattttccgccctcctcgcgcttctcactgttcaatctgtgacaactgcgtggagcgctttgaccaccactgtccttgggtggggaactgtgtcggcaaacgaaactaccgatacttttacctctttatcctctccctcagcctgcttacaatctacgtgttcgcttttaatatcgtgtacgtcgccctcaaatccttgaagatcgggtttctggagacactcaaggagacgccaggcaccgttttggaagtcctcatctgttttttcaccctgtggtctgtggttggactgacagggtttcacaccttcctggtcgcgttgaaccagacaactaacgaagacatcaagggatcctggacggggaagaacagagtgcaaaatccttactcccacggtaacatcgttaagaactgctgcgaggttttgtgcgggccactgcccccaagcgttctggacaggcggggaattctgccccttgaggaaagcggaagtaggccgccctccacccaggagacatcaagcagcctgctgccccagtccccggctccaacagagcacctgaatagcaatgaaatgcccgaagacagtagcacccctgaagagatgcctccgccagaacctcctgagccaccccaagaagctgccgaagccgagaaatag

SEQ ID NO: 141722 - DNA, 1095 bp, synthetic construct
  misc_feature 1..1095: note = Description of Artificial Sequence: Synthetic coding sequence
  source 1..1095: mol_type = other DNA
atgagcgtaatggtggtgagaaagaaggtgacaagaaaatgggagaaactacccgggaggaatacattctgctgcgatggacgggtgatgatggctcgacaaaaggggatattctacctcaccctgttcctgatacttggtacctgtaccctctttttcgcttttgagtgcagatatctcgctgtccaactttcccctgcaataccagtttttgctgccatgctgtttctcttcagcatggcgacccttttgaggacgtcattctcagaccctggcgttatcccccgcgccttgcccgacgaggcagcctttatagagatggaaattgaagcaaccaacggggccgttcctcaagggcagagacccccaccccggataaagaactttcagatcaataaccaaatcgtgaaactgaagtattgctatacatgtaagatctttcggccgccaagagcttcacattgctctatttgcgacaactgtgtcgagagattcgaccaccactgtccctgggtaggcaattgtgtgggcaagaggaattaccgttatttctatctgtttatcctatctctgtcactcttaaccatctacgtttttgcatttaatatcgtttacgtggccttgaaatccctgaaaatagggttcttggaaacgctgaaagagacacctggcactgtccttgaagtgctaatctgcttttttacactgtggtccgttgtgggactgacaggctttcatacatttttagtggctctcaatcagactactaacgaagatatcaaaggaagctggacggggaaaaatcgggtacagaatccttactcacacgggaacattgtgaagaattgttgtgaggtcttgtgcggacctttgcctccgagcgtgctggacaggaggggtatcctgccactcgaagagtccggctcccggccaccgagcacacaggaaacctcctcgtccctgcttccccaatcccctgctcccactgagcatttgaactccaatgagatgccagaggattcttcaactccggaggaaatgcctcctcccgaacccccagagcccccccaggaggccgccgaagcagagaagtag

SEQ ID NO: 141723 - DNA, 513 bp, synthetic construct
  misc_feature 1..513: note = Description of Artificial Sequence: Synthetic coding sequence
  source 1..513: mol_type = other DNA
atgagcgtaatggtggtccggaagaaggtgacgcgtaagtgggagaagcttccgggaaggaacacattctgttgcgatggacgggttatgatggctcggcaaaaagggatattttacctcacattgttccttattttaggcacctgtactctattttttgcgttcgagtgccgatacttggccgtccagctgagccccgccatcccagtttttgccgctatgttgttcctgttctctatggccacactcttacgcacatccttcagcgacccaggcgtgattcctagggccttaccagatgaagcggctttcatagaaatggaaattgaagccactaacggagctgtgccccaagggcagaggccacccccccgtatcaagaactttcagattaataatcagatcgtcaagttgaagtattgctatacctgtaagatcttcagaccaccgagggcaagccactgtagtatctgtgacaattgtgttgaacgcttcgaccatcactgtccttag

SEQ ID NO: 141724 - DNA, 585 bp, synthetic construct
  misc_feature 1..585: note = Description of Artificial Sequence: Synthetic coding sequence
  source 1..585: mol_type = other DNA
tagctttttcttattctcggtacttgcacactttttttcgctttcgaatgtagatacctcgctgtgcagctaagtcccgctatccccgtttttgctgcaatgcttttcctgttctccatggcaacccttttgcgtaccagcttctcagatccaggcgtcattccacgcgccctcccagacgaagcagcattcatagagatggagatcgaagccaccaacggggccgtgcctcaaggacagcgacctccccctagaatcaaaaactttcaaataaataaccagattgtcaagctcaaatactgttatacatgtaagattttcagaccccccagagcttcccactgcagtatttgtgataattgcgtcgaatccctgaaaattggctttctcgagaccttaaaggagacacccggcacggtgttggaggtcctgatctgcttcttcactctgtggtctgtcgtcgggctcactgggttccacaccttcttagtggcgctgaatcaaaccacaaacgaggatatcaaaggatcctggacagggaagaatagagtgcaaaatccctattcgcacggcaatattgtatag

SEQ ID NO: 141725 - DNA, 897 bp, synthetic construct
  misc_feature 1..897: note = Description of Artificial Sequence: Synthetic coding sequence
  source 1..897: mol_type = other DNA
atggaacgcgggatttcagacgtcaccgaccgcaagttgacaatggaggaggaggaggcgaaacgaattgctgaaatgggaaagccagtgcttggggaacacccaaagctggaggtcattatagaagaaagctatgagttcaagaccaccgtcgacaaactgattaagaagacaaatttggctttggtagtcgggactcattcttggcgcgatcagttcatggaggctattaccgtttctgcagcgggcgatgaggacgaggatgaatccggagaggagaggctcccgtcttgcttcgactacgtgatgcacttcctgacagtgttctggaaggtcttgtttgcatgcgtccctccaaccgagtactgtcatggatgggcctgttttgccgtgtcaatcctcattatagggatgctgacagccatcataggggatcttgcctctcactttggctgcaccattggcctaaaggatagcgtcacggcagtggtcttcgttgccttcggcacatccgtcccggacacgtttgcttccaaggccgccgctctgcaggatgtctatgctgatgcctccatcggaaatgttaccgggtccaacgccgttaatgtgtttctgggaattggcctcgcctggtccgtggccgccatctattgggcattgcaggggcaggagtttcacgtgagcgccgggacactcgctttttctgtgaccttgtttacgatcttcgcctttgtgtgtatttcagtgctactttatcggaggagaccgcacctgggaggtgaactgggaggcccacgcggatgtaagctggcaaccacatggctcttcgtgtcactttggctgctatatatattattcgccacgctggaagcttattgctatataaaggggttttag

SEQ ID NO: 141726 - DNA, 705 bp, synthetic construct
  misc_feature 1..705: note = Description of Artificial Sequence: Synthetic coding sequence
  source 1..705: mol_type = other DNA
atgagcagtgaggtgtctgcacggagggacgcaaagaagcttgttaggagcccctccggacttagaatggtccccgagcaccgagcctttgggtcgccttttggtctggaggagccccaatgggtccccgacaaggagtgtcgcaggtgtatgcaatgtgatgcgaaattcgactttctgacccgcaagcaccactgccggagatgcggcaagtgtttctgtgaccgatgctgctcacagaaggtgccactgcggcgtatgtgtttcgtcgaccctgtcagacagtgtgccgaatgtgccctggtcagccttaaagaggcagagttctatgataagcagctgaaggtactgctgtccggcgcaacttttctggtgacctttggtaacagcgagaaacctgaaaccatgacctgtcggctctcgaataatcaacggtacctgtttttggacggagactcgcattacgagatcgagatcgtgcacatctctactgtacagatattgacggaaggcttcccaccaggcggcggaaacgcaagagcgacaggaatgttcttacagtataccgtgccagggactgagggcgtgactcagctcaaactgactgttgtggaggacgtcaccgtaggtagaaggcaggccgttgcatggctggtagcaatgcacaaagcagcaaagcttttgtacgaatcaagggatcagtag

SEQ ID NO: 141727 - DNA, 7620 bp, synthetic construct
  misc_feature 1..7620: note = Description of Artificial Sequence: Synthetic coding sequence
  source 1..7620: mol_type = other DNA
atgaaccatccgttcgggaaggaagaagccgcaagtcagaagcagttattcggctttttttgcgagtgcttgagaagaggggagtgggagctagcgcaggcctgcgttccccaactgcaagagggccagggggacatccctaaacgcgtcgaggatatattgcaggctctggtggtatgtccaaatctgctcaggtgtggccaggatatcaatccgcagcgggttgcttgggtctggttgttagtgctagagaagtggttggcacgagagaagaagctcctgccggtggtcttccgcagaaaactcgaatttcttctcctctccgaggatctgcagggggacatccctgagaacattctggaggaactgtacgaaaccctaacgcagggggcagtgggtcacgtcccagacggcaacccccgacgcgaaagctggaccccaagactctcttctgaggccgtgtcggtcctgtgggatctcctcaggcagagccctcagccagcccaggcactgctcgagctgttgctcgaagaggacgatggaacaggcttatgtcattggcctcttcagaatgcactcgttgatttgatcagaaaggccctgcgagctctccagggcccagactctgtgccccctggtgtggtcgacgccatctatggcgcgctccggacccttaggtgtccagccgagcctctaggggtagaactccatctgctgtgcgaggaattactggaagcctgcagaacggaagggtctcctttgcgagaggaaaggctactctcttgcctcctccataaagcttctagaggactactgtccctttatggccacacctacgcagagaaggtgaccgaaaaaccacctcgagccacggcttctgggaaggtcagtcctgatcacctcgatcccgagagggcgatgctggccctgttcagtaatccaaatcccgccgaggcttggaaagtggcatacttttactgtcttagcaacaacaagcacttcttggagcaaattctggtgacagcgcttacgctactgaaggaggaggatttccccaatctggggtgcctgttggaccgcgagttcagacccctgtcctgtctcttggtgttactcggatggacacactgtcagagtctggaatctgcaaaacgacttctccagaccctccaccgtacccagggtccaggctgtgacgaattactgagagacgcctgtgatggtctctgggctcacctggaagtcttggagtggtgtattcagcagagcagtaatcctatccctaagagggacttgctctatcatctgcacggcggcgacagccacagcgttttgtacactctgcaccacctgaccaatcttcctgctctccgagaagaagacgtcctgaagttgctgcagaaagtccccgctaaggatcctcagcaggagccagacgcagtggatgcccccgtcccagagcatctatcccagtgtcagaacctaacactgtatcaaggcttctgcgccatgaagtacgcaatctatgcgctgtgcgtgaactcacatcaacactctcaatgccaggactgcaaggacagcctatctgaagacctcgcctccgccaccgaacctgccaatgacagtttaagcagcccaggcgctgccaacctgttttcaacttatctcgcacgatgtcagcagtatttgtgttccatccccgattcattatgtctggagctgctggaaaacattttttccctcctgctcatcactagcgcagatctgcatccggaaccacacttgcccgaggattatgccgaggacgacgacatagagggtaaaagcccatccgggctgcgtagcccgtctgaatcacctcagcacatcgctcaccctgaaagaaaatctgaacggggctccctgggagtgcctaaaacgctcgcatacacaatgcctagtcacgtgaaggctgagcccaaggacagttatcctggcccacaccgccacagttttctggacctgaagcatttcacaagcggtattagtggcttcctggccgacgagtttgcgatcggtgcatttctgcggctgctacaggagcagctggacgagatttcgtcaaggagtccccccgaaaaaccaaagcaagaaagccagagctgtagcggaagccgcgacgggctccagagtcgcctacacaggttatctaaagtggtgagtgaggctcagtggagacataaagtcgtgacttctaaccatcgctcagaggagcagccttctcgaagataccagcctgctacccgtcacccctccctgcggcgcgggcgcagaacaaggcggtctcaggccgatggacgcgaccgtgggagcaatccaagcctggagtctacaagctctgagctgagcacttcaacgtcagaggggtcactctccgcaatgtccggccggaacgagctccacagtcgactgcaccctcaccctcaatcctcactgattcccatgatgttttccccccctgaatcattgttggcgagctgcatcctgaggggcaacttcgccgaagcccatcaggtgctgttcacctttaatctgaagagttccccttcttccggggaattaatgtttatggaaaggtaccaggaggtgattcaggagctggcccaggtggaacacaagatcgagaaccagaactctgatgctggtagttctacaatcagaagaactggctccggaagatctacattgcaggcgatcggatccgccgctgcggctggcatggtattctatagcattagtgacgtcaccgataagctgctcaacacctcaggcgatcccatacctatgttacaggaggatttctggatttcaacggctcttgtggagcctaccgctcctctaagggaggttctcgaagatctgagcccacctgccatggccgcctttgatttagcatgtagccagtgccagctgtggaaaacttgtaaacagctgttggagacagcagaacggaggctcaattcatcgctggaaaggagaggccgtaggatcgatcacgttctactgaacgccgatggcattcgtggattccctgtggttcttcagcaaatcagtaagagtttgaactacctcctgatgagtgcctcccaaactaagagcgagtcagttgaggaaaaagggggcggccctccgcggtgctcaattacagagttacttcagatgtgctggccatccctgagcgaagactgtgtggcaagccatactaccttaagtcagcagcttgatcaggttttacagtccttgcgtgaggccctcgaactcccagaacctcgcacacccccgctctcctcattggtagagcaggcagcccagaaggctcccgaagcagaggcacatcctgtccaaatacaaactcagctcctccagaaaaacttaggcaaacagactccgagcggctctagacagatggactacctgggtactttcttctcatactgtagcacgctggccgcagtgctactgcagtccctgtcgtcagaacctgaccatgtcgaggtgaaggtgggcaatccatttgtgctgttgcagcagagttcttcccagctggtgagtcatctgttgttcgaaagacaggttcccccagaaagactggctgcgctgctggcacaagagaacctatctttgagtgtcccacaggtgattgtatcgtgctgctgtgaacccctggctctgtgtagttctaggcaatcacaacagaccagttccctgttgacacggctgggaactcttgcgcagctacatgctagtcactgcctagatgacctgccactgtccacaccaagctctccgcgcacgacagaaaatccgactctggagagaaaaccgtactcctctcccagggatagtagcctcccagcactcacctctagcgcattggcatttttgaagtctagatctaagctccttgccaccgtggcttgcttgggcgctagcccacgcctgaaagtttcgaaaccttctctgtcttggaaagagctgcgcgggcggagggaagtgcccctcgcggcagaacaggtggcaagagagtgcgagagacttctggagcagtttcctctgtttgaggccttcttgctggcggcttgggaacccctgaggggatcccttcagcagggccagtctctggcggtaaatctgtgtggctgggcttccctgtcaaccgtgctcttaggccttcacagccctatcgccctggacgttttgtcagaggctttcgaggagagtctggtagcccgggactggtcacgggcactgcaattaactgaggtgtatggcagagacgtcgacgacctgtcatccattaaggatgctgtcctctcatgtgcagtggcttgtgataaagagggttggcagtacctgtttcccgtaaaagacgctagcctgcggtctagactagctctccagtttgtggaccgctggcccctggagagttgtctggagattctggcctattgcatctctgacaccgcggtgcaggaagggcttaagtgtgagctgcagcgcaagctggccgagctgcaggtctaccagaagatcctggggctccagtctccccccgtgtggtgcgattggcagaccctgcgcagttgttgtgtggaagacccaagtactgtgatgaacatgattttagaagctcaagagtacgaactctgcgaagagtggggatgcctgtaccctatacccagggaacatttaatttccctgcaccagaagcacttactgcatctactggagcggcgggaccatgataaagccctacagctcctcaggagaatccccgaccctacgatgtgtctggaagtgacagaacagtccctggaccaacatacatcgctggctacatcccacttcctggctaattacctgacgacccacttctatggccagttaacagcggtccggcatcgcgagatccaggcactgtacgttggcagtaagatcctgctcacactccctgaacagcaccgagcttcctactcacatttgtcctcaaatccgctttttatgcttgagcagctgcttatgaacatgaaggtagattgggccaccgtcgctgtccagactttacaacaactgctagtgggtcaggagatcggtttcaccatggacgaagtcgactctctcttgtcaagatacgctgagaaggccctcgactttccttatcctcaacgagaaaagcggtccgactctgtgatacatctgcaggaaattgtacaccaggcagcagatccggaaacattaccacggagccccagtgcagagttctcccctgccgcccccccggggatctcatcaatccactccccaagtttgcgcgagcgctcttttccgccaacccagccatcccaggaattcgtacctcccgcgacacccccggcgcgtcatcagtgggttccagatgagactgagtccatctgtatggtgtgctgccgcgagcactttacaatgtttaaccgacggcatcattgccgcagatgcggccggctggtctgttcgtcatgtagcactaaaaagatggtggtggagggctgtcgcgagaatcccgcccgagtttgtgaccagtgttatagctattgtaacaaggatgttcctgaggaacctagcgaaaagcccgaagccctggattcatctaagaacgagagcccgccatatagttttgtggtgagagtccctaaagcagacgaggtcgaatggattctcgatttgaaagaagaagagaacgaactagttcgcagcgaattctactatgaacaagcacccagcgcctctctgtgcatcgccattctgaacctacacagggattccatagcatgtggccatcagctgatcgagcattgttgcagattgtcgaaagggctgaccaacccggaggtggacgccgggctgctcactgatattatgaagcagctgctattttctgctaagatgatgtttgttaaagcagggcagagccaggacctggctctctgtgattcctacatctctaaagtagatgtcttaaacatcctggtcgcagcagcctatcgccacgttccttccctggaccagatcttgcagcccgccgccgttacacgcttgcgtaatcaactcctagaggcagagtattatcagttgggtgttgaagtatccaccaaaaccggcctcgacactaccggagcgtggcatgcctgggggatggcgtgtctcaaggccgggaacctgaccgcagcgagagagaagttcagcagatgtctaaaaccaccattcgatcttaatcagttgaaccacggtagtaggcttgttcaggatgtcgtcgagtacctggagtccacagtgcggcccttcgttagccttcaggatgatgattactttgcgacactccgcgagcttgaggccacactacgtacacagtcactctccctggctgtgatacccgaggggaaaatcatgaataacacatactaccaggaatgtctgttctaccttcataactatagcacaaacctggcaataatctcattctatgtccgtcactcatgtctgcgcgaagccctgcttcacctcctgaataaggagtcccccccggaagttttcatagaagggatttttcagcctagttataaatccggcaagctgcacaccctggaaaatttgctggaatcaatcgatcccaccctggagagctggggaaagtatctgattgccgcttgccagcatctccagaaaaaaaattactatcacatcctgtacgagctgcaacaatttatgaaagaccaggtgcgcgccgcaatgacctgtatccggtttttctcccataaagcaaagtcttatactgaattaggggagaaattgagctggcttctgaaagccaaggatcacttgaagatctacttacaagagacgagtagatcctcaggtcggaagaagacaacgtttttccgcaagaagatgactgcagccgatgtcagccggcatatgaataccctgcaattacagatggaggtgacacgatttctgcatcggtgtgaaagtgctggtacatcccagatcactacccttcccctccccaccctctttggaaacaatcatatgaaaatggatgtggcctgtaaggtgatgctgggtggaaagaatgtagaggatggcttcggcattgcatttagagtcctgcaagactttcagcttgacgcagccatgacctactgccgcgctgctcgtcaactcgtcgagaaagagaagtattccgagatccaacagctgcttaagtgcgtgagcgagtctggtatggccgctaagtccgacggagatacaattctgctcaattgcctggaagcctttaaacgcatcccgccccaggaactcgagggcctgattcaggccattcacaatgatgacaacaaggtgagagcctatctgatctgctgcaagctccggtctgcttacttaatcgcggtgaaacaggaacacagccgggctaccgcactggttcagcaggtgcagcaggccgcaaagagttccggagacgccgtcgtgcaggatatatgtgcccagtggttgcttacgtctcatccccggggcgctcacggaccaggctcacgcaagtag

SEQ ID NO: 141728 - DNA, 7557 bp, synthetic construct
  misc_feature 1..7557: note = Description of Artificial Sequence: Synthetic coding sequence
  source 1..7557: mol_type = other DNA
atgaaccatcctttcggaaaggaggaggcagcctcgcagaaacagctgttcggcttcttctgcgaatgcctgagacgcggagaatgggaactggcccaggcctgtgtgccccagctgcaggagggacagggggatatccccaaaagagttgaagacattctacaggctctggtagtctgccctaatctgctccgatgcggtcaggatatcaacccccaacgagtcgcatgggtgtggctcctggtgctcgaaaaatggcttgcaagagaaaaaaagctcttaccagtcgttttcaggagaaagctggaatttttactcttgtccgaagaccttcagggggacataccagaaaacatcctggaggagctatatgaaaccctcacccagggtgcagtcggtcacgtgccggatggcaacccccgacgggaaagttggacgcctagattatcctcagaggccgtcagcgttttatgggacttgctgcgccaaagtccccagccagctcaggctctcctcgagttgctgctggaagaggacgatgggaccggtctgtgtcattggcccctgcagaatgccctcgtagacttgattcggaaggcacttaggaccctgcggtgtccagccgaacccctgggagtggagctgcacctgctctgcgaggagctgttagaagcctgccgtaccgaagggagtccactgcgggaagagcgactacttagttgtttgctgcataaggcttctagaggtctgctgagcctctacggacacacttacgccgaaaaggtcaccgagaagccccctcgggccacagcctccggaaaagtctcacccgaccacctggatcctgagcgggcaatgctggctctcttttctaatcccaatccagcggaggcttggaaggtggcatatttctactgccttagtaataataaacattttctggagcagatcctggtgaccgctctcaccctgctgaaggaggaagatttcccaaaccttggatgccttttagacagggagtttaggcccttgagctgcctgttagtgttgctgggatggacgcactgccaatctttagagagcgctaagcgcttgctacagaccttacacagaacccagggtcctgggtgtgatgagctgctcagagacgcgtgcgacgggctgtgggcacacttagaggtgctggagtggtgcatccaacaaagcagcaatccaatccccaagcgggacttactgtatcaccttcatggcggtgattcccattccgtgctctacacccttcatcatttgacaaatctgcccgcgctccgcgaggaggacgtgctcaagctactgcagaaagtaccagcgaaagatccccaacaggaaccagatgctgtagatgcgccggtgcctgaacacctttcgcagtgccagaacctaaccctctatcagggattctgtgccatgaagtacgcaatatatgcactctgtgtgaattctcatcaacacagccagtgtcaagattgcaaggactcgttatctgaggacctcgcttctgctacagaaccggccaacgattccttatcctcgcctggcgctgccaacctgttctcaacctatctagccagatgccagcagtatctatgcagcatccctgattccttgtgcttggaacttttggagaatattttctctttgttgcttatcacctccgctgacttgcatccggagccccatctgcccgaagactatgcagaggatgacgacatcgaaggaaagtccccttcgggactcaggtcaccctctgagtctccccaacatatcgcccacccagaacgcaaaagcgagcgcggctccctgggcgtacccaaaaccctggcatacaccatgcctagccacgtcaaagccgaacccaaggactcatatcctggcccgcaccgccactctttccttgacctgaagcattttacaagcggcatctctggattcctggctgatgagttcgcgatcggcgcctttctgcgcttactgcaggagcaactagacgagatctcgagtcggagccccccagagaagcccaaacaggagtcccagtcttgctctgggtccagggatggtttgcagtcccgactgcatagactgagtaaggtcgtgagcgaggcacagtggcgacacaaggttgtgacctccaaccatcgcagtgaagagcaacctagcagacggtatcagcccgcaactcgtcacccctcgctgagacgggggcgaaggaccaggcgatctcaggccgatggaagagaccgcggctcaaacccttcgttggagtccacctcaagtgaactcagtacctcaacatcggagggatcactttccgctatgagcgggagaaatgaattgcacagtcgcctgcatccacacccgcaatcctcactgatacccatgatgttctcaccccccgagtctcttctggcgagctgcattctgcgcgggaacttcgccgaggcccatcaggtgctcttcacctttaatcttaaatctagccccagctccggcgaactgatgttcatggagcgctatcaagaggtgattcaagagctcgcccaggtggagcataaaattgagaaccagaactccgacgctgggagttcaaccattcgtcgaactgggtccgggcggtctacccttcaggctattggttctgcagccgctgctggcatggttttctactcaattagcgacgtgaccgacaagttgcttaacaccagcggcgacccaattcccatgcttcaggaagacttttggattagcactgccctcgtagaaccaaccgccccattgagagaggtgcttgaagatctgtcaccccctgcaatggccgcgttcgacctggcttgttctcagtgccagttgtggaagacctgcaaacagttgctcgagaccgcggaacgccgtttgaatagctcactggaaagacgtgggcgaagaattgaccatgttctgctgaacgccgatggaattcggggctttccagtggtactccagcaaatatccaagtccctgaattacctgctcatgagcgcctcgcagaccaagagcgagtctgtggaagaaaaaggtggtgggccaccacggtgctccattaccgaactgcttcagatgtgctggccgtctctctcagaagactgcgttgcctcccacaccaccttgagccagcagttagatcaagtactccaatccttacgggaggccttagaactgcctgagccgcggacccctccactgtctagcctggtggagcaggcagcgcagaaagctccggaagccgaagcccaccccgtgcagattcagactcagcttctgcagaagaatctagggaaacagactccgtcaggtagcagacagatggattaccttggcacattcttctcttactgctctacactagctgccgtgctgttacaatccctaagttcggaacctgaccacgtcgaggtcaaggttgggaacccatttgttctgctgcagcaatcctcgtcccagcttgtgtcacacctgttgttcgaaaggcaggtccctcccgagcgcttggccgccttactcgctcaggaaaatctgagtctgagtgtccctcaagtgatcgtcagctgttgttgtgagccgctggcactgtgctccagccgtcagtcgcagcagacaagtagcttgctgactcgcctgggaactctcgctcagctccatgccagtcactgtctagacgatctgccactgtccaccccgagcagcccacgtactacagagaaccccactcttgagaggaaaccgtactcttctccacgggatagttcactccccgctcttacctcctccgcattagccttcctcaaatctcggtcgaagcttctggccacagtcgcctgcttaggtgcatccccaaggctgaaggtgtcgaaaccttccctgtcttggaaagaactgaggggtagacgtgaagtgcctctggctgctgagcaggtggcccgcgagtgcgaaagactcctcgagcaatttcctctcttcgaagccttccttctcgccgcctgggagccattgcggggctccctgcagcagggtcaatccctggcagtgaatctctgtgggtgggcttccctctccacagtgctcttaggcctgcactcacccattgcccttgatgtgctgagtgaggcattcgaggaatccctcgttgccagggattggtcccgcgctctgcaactcaccgaggtgtacggccgggacgtggacgacctgtcgtccatcaaagacgctgtgctgagctgtgccgtggcctgcgacaaggagggatggcagtacctatttcccgttaaggacgccagcctgcgctcccgtctcgcactgcaatttgtagaccggtggccactggagagctgcctggagatactcgcttattgcatatccgacacagccgtgcaagagggtctgaaatgtgagctgcagagaaaactggcagagctgcaggtgtaccagaagatactgggtctacaaagcccacctgtatggtgcgactggcagacattgagatcgtgctgtgtggaggatccgtctacggttatgaacatgatcctcgaagcccaggaatatgagctgtgtgaagagtggggctgtttatatcctatcccaagagagcatctcatttctcttcaccagaagcaccttctgcatttgctggaacggagggaccacgacaaggccctgcagctcctgagaaggattcccgaccctacaatgtgtttagaagttaccgaacagtcacttgatcagcatacaagccttgctacctcccatttccttgctaactaccttaccacccatttctacggacagttgaccgcagtgcgacaccgtgaaatccaggccctctatgtgggctcaaaaatattactgactctcccagagcaacatcgcgcttcttacagtcacttgagtagtaatccccttttcatgcttgagcagctgcttatgaatatgaaggtggattgggctaccgtcgccgtgcagactctgcagcaactgctggtggggcaagaaattggcttcaccatggatgaggtggattcgctcctatcccggtacgccgagaaggcactggatttcccctaccctcaacgagagaaacgatctgattccgtgattcatctgcaggagatcgtccatcaggccgcagatcctgagactctgccccgatccccctccgcggagttcagtccggccgcaccccctggaattagcagcatacactcaccatccttaagagagcgtagctttccccccacccaaccctcccaggagttcgtgcctccagctacaccaccagcaaggcaccaatgggttcctgacgagaccgagagtatctgcatggtgtgctgccgagagcattttacaatgttcaatcggcggcaccattgcagacgctgcggcaggctggtgtgctcttcctgctccactaagaaaatggtggttgaaggatgccgtgaaaaccctgcccgtgtgtgtgaccaatgctacagctattgtaacaaggatgttccggaagagccgtctgagaagcccgaggccctggattcgagcaaaaatgagtccccgccctattctttcgtagttcgcgtacctaaggcggacgaggtggaatggatcttagaccttaaagaggaagaaaacgagctcgtgcgttcagagttttattacgaacaggccccgagtgcgtctctgtgtatcgcgattctgaacctacacagagacagtatcgcatgtggtcaccagctcatcgagcactgctgccgcctgtctaaagggctcaccaatccggaagtcgatgcagggctgctgaccgacattatgaaacagctcttgttcagcgcaaaaatgatgtttgtaaaagctggccagtctcaggacctggctctgtgcgattcctatatatctaaggtggacgtgttgaacatcctcgtggcggccgcgtaccgacatgtgccctccctggaccaaatcctgcagcctgctgctgtaacaaggttgcgcaatcagctgctcgaggcagagtactatcagctcggtgttgaggtttccaccaaaacaggattagacactactggcgcctggcatgcctggggcatggcatgcctgaaagctgggaacctcacggccgctagggagaaatttagtagatgtttaaaacccccctttgatctgaaccagctgaatcatggctcgagattagtccaggatgttgtggaatatctcgaaagcaccgtgcggccctttgtctcactgcaagacgacgactacttcgctacactgagagaactggaggccaccctgcgcacccagtcactgtccctcgcagttatccctgaggggaaaattatgaataatacatattatcaggagtgccttttctacctgcacaactactctacaaacttggctattatctctttctatgtgcgtcatagctgtctgcgagaagctctcctacacctgcttaataaggagagtccaccggaggtttttattgaggggattttccagccgtcttacaagtccgggaagctgcacacattggaaaacctccttgagagtatcgatccgacgctcgagagttggggtaagtacctaattgcagcttgccaacatctgcaaaagaagaactactatcatattctgtatgaactgcagcagttcatgaaagaccaggtgcgtgccgccatgacatgtatccggttttttagtcataaagccaaatcatacacagagctgggcgagaaattgagctggctgttgaaggccaaggatcatctaaaaatctatctgcaagagacatccagatcaagtgggcgtaaaaaaacaacattctttagaaagaagatgaccgcggctgatgtgtcacgccatatgaacacgctccagctccagatggaggttacgcgcttcctgcatcgctgcgagtccgcaggcacttcacaaatcaccactctgcctctaccaactctgtttgggaacaaccacatgaagatggacgttgcctgcaaggtaatgctgggcggaaagaatgttgaggatggatttggtatcgcttttcgggtccttcaggatttccagctcgacgcggccatgacatattgtagagccgctagacaactggtcgaaaaggagaagtatagcgaaattcagcaactccttaaatgcgtatccgaatccggaatggccgcaaaatcagacggcgataccatcctgctcaactgtctggaagcctttaagagaatcccaccccaggaactggaggggctgattcaagccatccataacgacgataataaagtgagggcttatctgatatgttgcaaacttcggtccgcatacctcatcgccgtaaagcaggaacatagcagagcaactgcgctggtccagcaagttcaacaggctgccaagtcctcgggcgatgctgtggtgcaggacatctgtgcacaatggcttcttacctctcaccctaggggggcccacggacccggcagccgaaaatag

SEQ ID NO: 141729 - DNA, 1119 bp, synthetic construct
  misc_feature 1..1119: note = Description of Artificial Sequence: Synthetic coding sequence
  source 1..1119: mol_type = other DNA
atgcagaccagcgagcgtgagggctcaggccctgagctctcgccatctgtgatgcccgaggctcctctagaatctccaccattcccgaccaagtcgcccgctttcgacctattcaacctggtcctatcatataaaagactggaaatttacctggaaccactcaaagatgctggagcctggtactctgtcggcgctctgatgatttcagtcccagctctgctgggatacctacaagaggtctgccgagctaggttgcccgattcggagttgatgcgcagaaagtatcacagtgtgcggcaggaggatctgcagaggggcagactatccaggccagaagctgtggctgaggtgaaaagcttccttatccaactggaggctttcttgtctcggctgtgttgtacatgcgaggctgcctaccgagtcctgcactgggaaaatcctgttgttagcagtcagttttatggcgcattgctcggcacggtgtgcatgctctacctgcttccgctttgctgggtgttaacactcctcaacagtactctttttctgggaaatgtcgaattctttcgggtagtttccgagtatcgcgcctctctgcagcaaaggatgaatccaaagcaggaggaacatgctttcgagtcacctcctcctccagatgttgggggcaaggacggattaatggatagtacccccgctctgactccaacagaagatttaactcccggctccgtcgaagaggccgaggaggcggagcccgacgaagaattcaaggacgccatagaagaggatgacgaaggcgcgccctgccccgccgaggacgagctggccctgcaggacaacggttttctgtctaagaacgaagtgctccgatctaaagtttctagattgacagaacggttgcggaagaggtaccccacgaacaacttcggcaattgtaccggctgttcagctactttctcagtgctgaagaagaggagatcctgctccaattgtggcaattccttctgtagccggtgctgcagcttcaaggttccaaaatccagcatgggtgcaactgcgcctgaggcccagcgggaaacagtgtttgtgtgcgcgtcgtgcaaccagaccctgagcaaatag

SEQ ID NO: 141730 - DNA, 1251 bp, synthetic construct
  misc_feature 1..1251: note = Description of Artificial Sequence: Synthetic coding sequence
  source 1..1251: mol_type = other DNA
atgcagacctctgagcgggagggtagtggccctgaattatccccaagtgtgatgcctgaagcacctctggagtcacctccttttcccaccaaatctccagcttttgatcttttcaacctggtgctatcctacaagcggctggaaatctatctggaaccccttaaggatgcaggagatggagttaggtatttactccggtggcagatgcccttgtgctccctgctgacgtgcctcggactaaacgttctgttcttgacgctcaatgagggagcatggtatagcgtgggcgccctcatgatatccgttccagccttacttggatatctgcaggaggtctgtcgagcacgactccccgacagcgaactgatgaggcggaaataccatagcgttaggcaggaagacctgcagaggggtcggttgtccagacccgaggctgttgccgaagtcaagtcattcctgatccagcttgaagccttcctctcccggctttgttgcacatgtgaagccgcttaccgcgttttgcattgggagaatccagtggtctctagccagttctatggggcattgctggggacggtgtgcatgctgtatttgcttcccttgtgctgggtcttgactttgcttaatagcaccctgtttctcggcaacgttgagttcttccgagtcgtgagcgagtaccgtgcctcattgcagcagaggatgaatccaaagcaagaagaacacgcctttgagtccccaccacccccggacgttggcggaaaagacgggctgatggactcaacaccagctttgacccctaccgagtccctttccagtcaggatctgaccccaggatcagtggaggaagctgaggaagcagagccagatgaggagttcaaagacgccatagaggagactcacctggtggtgctagaggatgacgagggcgcaccttgcccggccgaggatgagctcgccctgcaggataacggcttcctgtcaaaaaacgaagtcctccgctcaaaggtttccagactcactgagagacttagaaaacggtatccaaccaataactttgggaattgcactggatgtagcgccaccttcagcgtactgaaaaaaaggcgtagctgcagcaactgcggtaacagcttttgtagcaggtgctgcagctttaaagtgccaaagtcctcaatgggtgctactgcaccggaagcgcagcgagaaacagtgttcgtttgtgcttcctgtaatcagacactgtcaaagtag

SEQ ID NO: 141731 - DNA, 957 bp, synthetic construct
  misc_feature 1..957: note = Description of Artificial Sequence: Synthetic coding sequence
  source 1..957: mol_type = other DNA
atgcagacatccgagcgggagggttcagggcctgaactgagcccttctgtgatgcccgaggcaccgttagagtcaccaccattccctaccaaatcgcctgccttcgatctttttaacctagtgttgagctataaaagacttgagatctacctcgaacccctgaaggacgccggcgatggggtgcgctacctgctgtcacttatccagttggaggcctttctaagcaggctgtgctgcacgtgcgaagcagcgtatagagtactgcactgggagaatcctgttgtgtcgtctcagttttatggggcgttgctgggcaccgtgtgtatgctgtacctactgccactgtgttgggtgcttacgctcctgaacagcacactgttcttggggaacgtggaatttttccgtgtggtgtctgaataccgcgcgtccctgcaacagcgcatgaatcccaagcaagaggagcacgcgtttgaatctccccctccaccggacgtgggcgggaaagacggactaatggactccaccccggctctgacgcctaccgaagatctgactcccggatcagtcgaggaagcggaggaggccgaaccagacgaggagttcaaggatgccatcgaagaggacgacgagggagcaccttgtcccgctgaggatgagctggcgctccaggataatggtttcctgtctaagaacgaggttttaagatctaaagtcagccggttgaccgaacgccttaggaagcgctatcctacgaataatttcggcaattgtacaggctgcagcgccacatttagcgtcctgaaaaagaggagatcttgctccaactgcggcaacagcttctgctcccgctgctgtagcttcaaagtcccgaagagttcaatgggtgcaaccgcccctgaggcacaaagagagacggtcttcgtgtgtgcgtcatgcaaccaaaccttgtccaaatag

SEQ ID NO: 141732 - DNA, 1215 bp, synthetic construct
  misc_feature 1..1215: note = Description of Artificial Sequence: Synthetic coding sequence
  source 1..1215: mol_type = other DNA
atgcaaaccagtgagcgcgaaggatctgggcccgaactctctccctcggttatgcctgaggccccactcgaatcccctcccttcccaaccaaatctccggccttcgacctattcaatctggtgcttagttataagaggctcgaaatttacctcgaaccgctcaaggacgccggagatggtgtgcgatacctactaaggtggcagatgccactttgctccctcctcacatgcttaggtctcaacgtgctgttcctgactttgaacgagggagcctggtattcagtgggcgccctgatgatctctgtccccgcactgctgggatacctgcaggaagtgtgccgggcgcggctgccagatagcgaactgatgagaagaaaataccattcagtgagacaggaagacctgcaaagaggacgcctctccagacctgaagctgtcgccgaagtcaagtcttttctcattcagctcgaagcctttcttagtcggctgtgctgcacctgcgaggcggcttaccgggtactccactgggaaaacccagtcgtttcttctcagttctatggtgccctactgggaaccgtgtgtatgctctatctcctgccactctgttgggtgctcaccctcctaaattccaccctctttcttgggaatgtggagtttttccgggtagtgagcgagtacagagcatccctgcaacagaggatgaacccaaaacaggaggagcatgccttcgagtcccccccacctccggacgttggggggaaagatggtctgatggactccactccagctctaaccccgaccgaggacttgacccctgggagtgttgaagaggccgaggaagctgagcccgacgaagaattcaaagatgccatcgaagaggacgacgagggtgccccgtgccccgcagaagatgaattggctctgcaagacaacgggtttctcagcaaaaatgaagtgctgcgcagtaaagtgtctcgtctgacagagagactgcgcaagaggtacccgacaaataatttcgggaattgcacagggtgcagtgctacattcagcgtactgaagaagaggcgcagttgttcgaattgtgggaacagtttctgttcccgctgttgctcctttaaggtgcccaaaagtagtatgggcgctaccgcccctgaagcgcagagagagacggtgtttgtttgcgccagctgtaaccagacgctctctaagtag

SEQ ID NO: 141733 - DNA, 936 bp, synthetic construct
  misc_feature 1..936: note = Description of Artificial Sequence: Synthetic coding sequence
  source 1..936: mol_type = other DNA
atgatatcagtacccgcgttgcttgggtatttgcaggaggtttgtagagctcgcctgcctgactcagaacttatgcgtcgaaaatatcattccgtacggcaagaggatctacagcggggtaggctctctcgacccgaggctgtggctgaggtgaaaagcttcctcattcagctggaggcattcctgagtcgcctctgctgtacctgcgaagccgcttacagggttctccactgggaaaatccagtcgtgagcagtcagttctacggggcattgcttgggacagtgtgtatgttgtacctcctccctctctgttgggtgctaaccctcctgaactccactctcttcttagggaacgtggagttcttcagagtggtgtcagagtaccgcgcaagtctgcagcagcggatgaatcccaagcaagaagaacacgcgtttgagtcgcctccaccccctgacgtgggaggtaaggacggtctcatggattccaccccggccctgactccaacagagagtctgtcaagtcaggacctgactcctggatctgtggaggaagctgaggaggctgaacccgatgaagagttcaaagatgcaattgaagaagacgatgagggcgctccatgtcccgcagaagacgagcttgccctgcaagataacggttttctttccaaaaatgaggtcctgcgttccaaagtgagtagacttaccgagagattgcgtaagagatatccgaccaacaatttcggtaactgcaccggttgttctgcaactttttccgtattgaagaaacgcagatcgtgctctaactgtgggaacagcttttgcagtcggtgctgcagttttaaggtgcccaagtcatctatgggtgctacagctccggaggcacagagagagactgtgttcgtgtgcgcaagttgtaaccagaccctgtccaaatag

SEQ ID NO: 141734 - DNA, 861 bp, synthetic construct
  misc_feature 1..861: note = Description of Artificial Sequence: Synthetic coding sequence
  source 1..861: mol_type = other DNA
atgcaaacaagcgaaagggagggaagcgggcctgaactgagccccagtgtcatgcctgaggcccccttggagagcccaccttttcctacaaaaagtccagcttttgacctgttcaatctcgtactgtcttacaaaagactcgagatctatctggagcctttaaaggatgctggtgatggcgtacgctatcttttacggttttatggtgctctactcggaaccgtgtgcatgttatatttgttaccactatgttgggtgcttacgctcctgaattccaccttgtttctagggaacgttgagttttttcgcgtggtgagcgaatacagagcatctttacagcagcgaatgaacccaaaacaggaggaacatgcgtttgagtccccaccaccccctgacgtgggcggaaaggatggcctgatggactcaactccggcactgacaccaaccgaagaccttacgccgggtagcgtagaggaagccgaggaagcagaaccagatgaagagttcaaggatgctattgaagaggacgatgagggagccccctgccctgccgaggatgagctcgccctccaagacaacggattcttaagcaagaacgaagtactgcggtcaaaggtctctcgcctgactgagcgcctgaggaaacgctatccaaccaacaacttcgggaactgtaccgggtgtagcgctacgttctcagttctgaagaagcgcagatcctgttccaattgcggcaacagcttttgttcacggtgctgtagttttaaggtgcctaagtcctccatgggtgccactgctccggaagcacagcgggaaactgttttcgtgtgcgcgagctgcaaccaaacactgagcaagtag

SEQ ID NO: 141735 - DNA, 1236 bp, synthetic construct
  misc_feature 1..1236: note = Description of Artificial Sequence: Synthetic coding sequence
  source 1..1236: mol_type = other DNA
atgcagacaagcgagcgggaaggaagtgggcccgagctgtcgccttcagtgatgcctgaggcaccattggagagtcctccgttcccaactaaatctcccgccttcgacctgtttaatctagtgctgtcctataagcgtctcgaaatttatctggagccgctcaaagatgctggcgacggggtcagatacttgctgcgctggcagatgcctctgtgctcactcctgacttgccttggccttaacgtgctgttccttactctcaatgaaggtgcttggtacagcgtgggcgccctgatgatttctgtgcccgctctgttgggctatcttcaggaggtctgccgcgcaaggctgcccgattctgagctcatgcggagaaaatatcacagtgtgcggcaggaggacctgcaaagggggaggctctcacgacctgaggccgttgcagaagtcaaatcttttttgattcaactggaggccttcctgagcaggttgtgttgtacctgcgaggcggcttaccgggttctgcattgggaaaatccggtcgtgtcttcccagttctatggtgcactcctcgggactgtctgtatgctgtatctcctgcccctttgctgggtactgaccctccttaacagcactctgttcctgggcaatgtagagtttttccgggttgtgtcagaatatagggccagcttgcagcagcggatgaatcccaagcaagaggagcacgcctttgagagcccaccacccccggatgtaggcgggaaggacgggctgatggattctacacccgcgctgacacctactgaagatcttacacccggaagcgtagaagaagccgaagaagccgagccagacgaggaattcaaggacgctattgaagagactcatttagtcgtgctggaagacgatgagggcgctccttgtccggccgaagacgagttggccttacaagacaatggcttcctgagcaagaacgaagtgttgcgaagcaaggtgtctcgactgacagagcggttacggaagagataccctaccaataatttcggaaattgcaccggatgctcagcgacttttagtgtccttaaaaagcggcggagctgcagcaactgcggcaattccttctgttccaggtgttgcagtttcaaggtgccaaagtcatccatgggggcaacagcccctgaagcacaacgcgagacagtatttgtatgtgcttcctgtaatcaaacactttccaaatag

SEQ ID NO: 141736 - DNA, 1185 bp, synthetic construct
  misc_feature 1..1185: note = Description of Artificial Sequence: Synthetic coding sequence
  source 1..1185: mol_type = other DNA
cttgaaagcccaccattccccacaaagtctcccgcatttgatcttttcaatttagtgctctcttacaaaagactggagatatacctggagcctttgaaggacgccggggacggggttagatacctgctgcgctggcagatgccactctgcagcttacttacatgcttgggactgaatgtactttttcttaccctgaatgagggggcctggtatagtgtcggcgccctgatgataagcgtccctgcactgctgggatacctccaggaagtttgccgcgccaggctgcctgattcagaactgatgcgccggaagtaccattcagttcgacaagaagatctgcaaagaggccgcttatcgagacccgaggcggtcgctgaggtaaagagctttctgatccagttggaagccttcctgagcagactgtgttgcacgtgtgaagcagcctacagagtgctgcattgggaaaaccccgtggttagcagccagttctatggcgcgctgcttggcacggtttgcatgctgtatctgcttccgctgtgctgggtcctgactttacttaattcaactctattcctcggcaacgtggagtttttcagggtggtgtcagagtacagggcaagccttcagcagcggatgaatccaaagcaggaagagcacgcctttgaatcgcctcctccccccgatgtcggaggtaaggacggtctcatggacagtacgccggctctgacacccacagagagcttgtctagtcaggatttaacccctggcagcgtggaagaggcggaagaggcggaaccggacgaagaattcaaggatgccattgaggagacccacctggtcgtgctggaagatgacgagggtgcaccatgtcccgctgaggacgagcttgctctgcaagataacgggtttcttagtaagaatgaggttctgaggtcaaaggtctcccggctgaccgagaggctgaggaaacgttatccaaccaacaactttggtaactgtactggctgttcagccacattctccgtgttgaaaaagagaaggagctgctctaactgcggcaactctttttgcagtcgatgctgcagtttcaaggtgccgaagtcatctatgggcgctactgcacctgaggcacagagggaaactgtgttcgtctgtgccagttgcaatcagaccttatccaaatag

SEQ ID NO: 141737 - DNA, 1047 bp, synthetic construct
  misc_feature 1..1047: note = Description of Artificial Sequence: Synthetic coding sequence
  source 1..1047: mol_type = other DNA
atgcagaccagcgaacgagagggctccggccccgagctctctccaagcgttatgcctgaggccccccttgaaagtcctccctttcccactaaaagccctgccttcgatctgtttaatcttgtgctaagttacaaaagactcgagatatacctggagcccttaaaagatgcaggggatggggtgagatacctgcttcgctggcaaatgcccctgtgttctttgcttacttgcctgggcttgaacgtcctgttcttgactttgaatgagggagcatggtattcagtgggtgccctcatgattagcgtgcccgcgctcttgggctatttgcaggaggtatgtagggctaggctgcctgatagtgagctgatgcgccgcaaataccatagcgtacgccaggaagatctgcagcgcggtaggcttagtcggcccgaagctgtggccgaggttaagagtttccttattcagttagaggcgtttttgtctcgcctgtgctgcacctgcgaggcggcttacagagtgctgcattgggagaacccggtggtttcctcacagttttatggggcccttctgggaaccgtttgcatgctgtatctactgcccctctgctgggtactgacattactgaacagtaccctgttccttggaaacgtggagttttttcgagtcgttagcgagtacagggccagcctccaacagcgcatgaacccaaagcaggaagaacacgcctttgaaagcccacctccacccgatgtcgggggtaaagacggactgatggatagtaccccagcactgactcctactgaggacctcactccgggctcagtagaagaggcagaggaggccgaacccgatgaggagtttaaagacgctatcgaggaagacgatgagggagctccatgtcctgccgaggatgagctggcactccaggataatggcttcttaagtaagaatgaggtcctccgaagcaaggtgtctcggctgacggaaaggctcagaaagcggtatccgacaaataatttcggtgtgactggagccggaagctcctag

SEQ ID NO: 141738 - DNA, 2664 bp, synthetic construct
  misc_feature 1..2664: note = Description of Artificial Sequence: Synthetic coding sequence
  source 1..2664: mol_type = other DNA
atgatgaatcggttccgcaaatggttgtataagcctaaaagatctgatccccagctgctggcccgcttttattatgccgacgaggagctgaatcaggtggctgccgagcttgattccctggacggcagaaaagatccacaaaggtgcactctgttggtgagccagttccggtcctgccaggacaatgtgctgaacattatcaatcagatcatggacgagtgtattcctcaagaccgggcgcctagagacttctgtgtgaaattccccgaggagatccggcacgataatctggccggccaactctggtttggggcagaatgtttagccgccggtagtataatcatgaacagggagcttgaatcaatggcaatgcgacctctggctaaagagcttacccgaagtctggaagacgtgcggggggccctcagggatcaagccttgagagacttgaacacctacaccgagaagatgagggaagccctcaggcacttcgacgtgctgtttgcagagtttgagcttagttacgtgtcggcaatggttcctgtcaaaagcccgcgggagtactatgtgcagcaggaagtcatcgttcttttctgtgaaactgttgaacgggccctggacttcggataccttacacaggatatgatcgatgactacgaacctgctctgatgttttctattcctcgcctcgctatcgtgtgtggcttagtagtttatgctgacggtcccttaaacctcgatcgaaaagtggaggatatgagcgagctgttcaggccattccacactctacttcgaaaaatacgggacctgctccagacactgacggaagaagaactccatacgctggagcgtaacctgtgtatatcacaggacgttgaattcccaatccgcgctgatgtccagggacccgccgcgctcgctccggcgctgagtgctcctctcccccctgagggaccgctcagtgccaaagccaaagacccggacgcagaactcgcgtgctcaatgcagtacgatgaccaggagcttgagcagctgtcaagaatggtgcaccgggccggcgatgagatgtctagccttctgtcgcctccaattgcctgtcagagcccggcgcaccgccctggggctgaggggtctcccggcggtgaggctagcccaggcagaccacgtctgcgttccgggtctgacgaggaagagcgagtgttctttatggacgacgtggaggggacagcagaagccctcgccaggccagagtcccccgcgggcccttttgggtgggccggcagcacatgggccgacccccaggagaagggccaaggaggtcccggtggagccgcagggatctcgctgcccgcaagtgaaaaggaagaagatctctctaataacaatctggaggccgaaggcacagacggagcatcactcgccgggacaagcagctgctcctgcttggatagtagactgcatctcgatgggtgggaagtgggggccgacgatgccgagacagccgagatgatcgctcacagaactggagggatgaaactaagtgcaacagtaatatttaatcccaagtctcccaccagtcttgactcagctgtggctacgcaggaagccgcctccgagcctgtcgcagagggcatggatggggggcctcacaaacttagtacaggggctaccaattgtctgttgcatagttgcgtgtgctgcgggagttgcggtgactctagggaagatgtggtagaaaggttgagggagaagtgttctccaggcggcgtgatcggggcgagttatgctgcagggctggcaaaagctagtgaccgagccccagaacggcaagaagaagctcctcctccaagcgaggatgctagcaacggccgagagccaaaggcacccaccagcgataagtgcctaccacacaccagcggttctcaggtggatacagcatcaggcttgcagggcgaagcaggcgtcgcagggcaacaagagcctgaagctcgggagttacatgcaggctcccccagcgcacacgaagcaccacaagctctctccggatcttcttcctctacagccggttcctgctcatctgataagatgggcccagaagccgcacctgcagccacccacgcagccccccaggccaccagagagaagattcgaagccggtttcacggtagccatgatttgatccatcggctcttcgtctgtatttccggagttgccgaccaactgcagaccaactacgcttccgatttgaggtctatattgaagacactctttgaggtcatggcgactaaacccgagaccgacgataaagaaaaactcagaaaggtgacccagaccttaaggtccgcagcccttgaagactgcgctctgtgtcaagaaacattgagcagttctgaactggccgctaagacgcgcgacggggacttcgaggatcccccagagtgggttccggacgaggcatgcggcttttgtacagcatgtaaagctccttttactgtgattcggaggaaacaccattgccgctcgtgtggcaaaatattctgcagccgatgctccagccatagcgcacctcttcctcggtatggccaggtgaagcccgtacgagtttgcacacactgctacatgtttcatgtcacccctttctacagtgacaaggctggcttgtag

SEQ ID NO: 141739 - DNA, 2574 bp, synthetic construct
  misc_feature 1..2574: note = Description of Artificial Sequence: Synthetic coding sequence
  source 1..2574: mol_type = other DNA
atgatgaaccgctttcgaaaatggctatacaaacctaagagatctgatccacagttgctcgcacggttctactatgctgatgaggaactcaatcaggttgcagccgaactcgactctcttgatgggcgaaaggatccacagagatgtacgctcttggtcagccaattccgaagttgtcaggataatgtactaaatatcatcaaccagataatggatgagtgcattccacaagatcgagcccctcgagatttctgcgtgaaatttcccgaggaaatccgccacgataacctcgctggacagttatggttcggcgccgaatgtctggccgctggaagcatcattatgaaccgagagctggagagcatggccatgcggcctctggccaaggagctcacacgctcactagaggatgtgcgcggagcgttgagagatcaggcactgagggatcttaatacatacaccgaaaaaatgcgcgaggctctcaggcatttcgatgttctgtttgcagaattcgagctgagttacgtgagcgcgatggttccagtgaaaagtcctcgcgagtattacgtgcaacaggaagtcatcgtgctcttctgcgaaactgtcgaatcaggactggtggtctacgccgacggaccgctgaacttggataggaaagtcgaagatatgagcgaactgttccggccttttcacacattgctgagaaagattcgggatctcctgcagactctgactgaggaggaacttcacaccctggaacgcaatctgtgtatctcacaagacgtggagtttccaatccgagctgatgttcagggtccggctgcactggcccctgctctttcagctcctttgccccctgaagggccactgagtgctaaggcaaaggacccagatgcggaactggcttgtagtatgcagtacgatgaccaggaactggagcaactcagtagaatggtccaccgcgcaggggacgagatgtcaagcctgcttagtcctcctatcgcatgtcagtctccagcccaccgacccggggccgaggggtcccctggcggcgaggctagccccggccggcctagattgagaagtggtagtgacgaagaggagcgcgtgttctttatggatgacgtggagggcaccgcagaagcactcgctaggcctgagtctccggctggaccttttgggtgggcgggctccacctgggcggacccccaggagaaaggccagggggggccaggcggtgctgccggcatctcgcttcctgctagtgagaaagaagaagatttgagcaataacaaccttgaggccgagggaaccgacggcgcatcactggccggcaccagcagctgttcttgcttggattcacggctgcatcttgatgggtgggaggtaggggcagatgacgcagaaacagcggaaatgatcgcgcaccggacgggaggtatgaagttgagcgcaactgtgattttcaacccgaagagccctacatctcttgacagcgcggtggctactcaagaagctgcctccgagccagtggctgaaggcatggatggtggccctcacaaactgtcaaccggggcgactaactgcctcctgcacagttgcgtgtgttgtggaagctgtggtgatagtcgagaggatgtcgttgagaggctgcgagagaaatgcagcccagggggcgttataggagctagttatgccgccggattggctaaggccagcgacagggctccagaacggcaggaggaggcacctcccccatctgaagacgcaagcaatggtcgcgaaccaaaagccccaactagcgataaatgtctgccgcacacctccggcagtcaagtagacactgccagtggattacaaggtgaggctggcgtggcaggtcagcaggagcctgaggcacgcgagctgcatgccggctcccctagcgctcatgaggctcctcaagcactgtccggaagttcgagctccactgcaggatcctgtagctcagataaaatgggtcccgaggccgcccccgctgcaacccatgccgccccccaggccactagagagaaaataaggagcagatttcacggatctcacgacctgattcaccgactcttcgtctgcatttccggcgtcgcagaccagctgcagaccaattatgcttctgatttacggagcattcttaagacactgtttgaggtgatggcgacgaagccagaaacagacgataaagagaagctgaggaaggttacccagaccttacgctcagccgccctcgaggattgtgccctgtgccaagaaaccctcagttcttcggaacttgccgccaaaacccgcgacggcgattttgaagatcctcctgaatgggtgccagatgaagcctgtgggttttgcaccgcatgtaaagcacctttcacagtgatcaggcggaaacaccattgcaggagttgtgggaaaattttctgtagcaggtgcagtagccactcagctcctttgcctcgttacggtcaggtcaaacccgtgagggtttgcactcactgctatatgttccacgtgacacccttctacagcgacaaagctggcttgtag

SEQ ID NO: 141740 - DNA, 2454 bp, synthetic construct
  misc_feature 1..2454: note = Description of Artificial Sequence: Synthetic coding sequence
  source 1..2454: mol_type = other DNA
atggatgaatgcataccccaagaccgcgcgcccagggacttctgcgtgaaatttcctgaggaaattaggcatgacaatttggcgggtcagctgtggttcggcgccgaatgcctggctgctggctcaatcatcatgaatagggaactggagtccatggctatgagaccacttgccaaagagctcacccgttcactggaggacgttaggggggcactacgcgatcaggccctcagggatctgaatacctatactgagaaaatgcgggaggcgcttcgacattttgacgtgcttttcgccgaattcgagttgtcctacgtttccgctatggtcccggtgaagtctccgcgagagtattatgtccagcaggaagtgattgtactattctgcgaaaccgtggaacgggcccttgactttggttatctcacgcaagatatgatagatgattacgaaccggcactaatgttcagtatccctcgcctggcaatcgtgtgcggcctcgtcgtgtacgccgatgggccgctgaatctggaccggaaagtcgaagacatgtcagagctctttcgaccatttcatacattactccgaaagattcgcgatcttctgcagaccctcacagaggaggagctgcacacactcgagagaaatctgtgtatcagtcaggacgtagagttcccaatccgagccgacgtgcaaggaccagccgcccttgcccccgctctgtccgccccgctgccccccgaggggcccttgtctgccaaagcaaaagaccctgatgcggaactcgcgtgctccatgcagtacgacgaccaggagctggaacaactcagcagaatggtgcaccgcgccggagacgagatgagcagcctgctgtctcccccaatagcgtgtcagagccccgcccaccgccctggagccgaggggtcaccgggtggagaggccagcccaggtcggccgaggctgcgctccggctccgatgaggaagagcgggttttctttatggatgatgtggagggcacagcggaagcactggcacggccagaaagtcctgccggccctttcggatgggccggttcaacctgggccgacccacaggaaaagggtcaaggcggccctggcggcgccgccggaataagcctgcccgcaagtgaaaaggaggaggatctgagcaataataatctcgaggcagagggaactgacggggcatctctcgctggtacctcgtcatgtagctgtctcgattcacgtctgcacctggacggctgggaggtaggagctgacgatgcggaaacggccgagatgattgcacaccgaacgggcggcatgaagttgagcgccacagtgatctttaatcccaaatcacctacatccctggatagtgcagtcgcaacccaggaggctgcttccgagcccgtggctgagggcatggacggtgggccacacaagctctcgaccggtgcaacgaattgtctgctgcacagctgtgtgtgttgcggctcgtgcggagattccagagaagacgttgtcgaaaggctgcgcgaaaaatgctcgcccggtggagttattggtgcatcatacgctgctggacttgcgaaagcctccgatcgcgccccagaaagacaagaggaagcgcctccccctagcgaggatgcaagcaatggccgggagcccaaggctcctacctccgataaatgcctaccacacacctctggcagccaggtcgatactgcttccggattacagggcgaggcgggggtcgctggccagcaagaaccagaggccagggaactgcacgctggcagcccaagcgcacacgaggcacctcaggctctgtcaggctcaagttcttccacagccgggagctgcagcagcgacaaaatgggacctgaggctgccccagcagccacccacgctgcaccacaagccacaagagaaaagatcagaagtcgattccacggttcccacgaccttatccatcggttgttcgtctgcatcagcggggtcgccgaccagctgcagaccaattatgcttccgatctcaggtcaatattaaaaacattattcgaagtgatggcaaccaagcctgaaacagatgacaaggagaagctgcgtaaggtgactcagactttgcggtcagccgccctcgaggattgtgccttgtgccaggagaccctgtcgagcagcgagttagccgccaagacacgggatggggattttgaagatcctcccgagtgggtacctgacgaagcttgcggattttgcacagcatgcaaggcgcccttcactgtcatccgccggaagcaccattgtagatcttgtggaaagatcttctgcagcaggtgttcatcacattccgcccccctgccaagatatggacaggttaagccagtccgcgtttgcacacattgctatatgtttcatgtcacacccttctattcggataaggcaggcctctag

SEQ ID NO: 141741 - DNA, 1212 bp, synthetic construct
  misc_feature 1..1212: note = Description of Artificial Sequence: Synthetic coding sequence
  source 1..1212: mol_type = other DNA
atggagcctgcgggtccatgcggattttgcccggccggagaggttcagccggcacgctacacctgtcctcgatgcaacgctccctattgttctctgagatgctacaggacccacggaacatgtgcagaaaacttctatcgggatcaagttctgggggagttgagaggttgcagcgctcccccatcgcgcctagcgtcagccttacgtcgcctaagacagcagcgagagacggaagatgaacctggggaggctggcttatcctccggacccgcccctggcgggttgtccggtctgtgggagcggctggcccctggagagaaggcggcgtttgagcggctgctgagtagaggagaggccggaaggctacttcctccctggcgaccatggtggtggaacagaggggccggccctcagttgttggaagaactggataatgcccccgggagtgatgccgcggaactcgagctagcccccgccagaacgcctcctgacagcgtgaaggatgcttcagcagcggagcctgctgccgcagagcgggtcctgggtgacgtgcccggagcatgtactccagtggtgcctacgcgaatccccgcaatcgtgagtttatcccgggggcccgtgagtcccttagtgagattccagcttcccaacgtgctgttcgcttatgctcatactttggctttataccacggcggcgacgatgcccttctcagcgatttctgtgctaccctcctgggggtgtccggagctctgggcgctcagcaggtatttgctagtgccgaggaggcgttgcaagctgccgcccacgtccttgaggccggggaacatcctccaggccctctgggaacgcggggagccatgcacgaggtggcaagaatcctgctgggcgaaggcccaactaatcaaaaaggatacactctggctgccctgggagacctggcccagacactagggcgtgcccgcaagcaagcggtcgctagggaggaacgcgatcatctgtaccgagcgagaaagaagtgccagtttctcctggcctggacaaatgagaatgaagccgctttaactcctctggccctggattgtgccagagcccaccaagcacacgctgtcgtggcggaggaggtggccgctctcaccggggagctggagcgtctttggggaggccctgtgcctcctgcccccaggactctgatagaggaactaccttcctag

SEQ ID NO: 141742 - DNA, 1683 bp, synthetic construct
  misc_feature 1..1683: note = Description of Artificial Sequence: Synthetic coding sequence
  source 1..1683: mol_type = other DNA
atggctggaccccagccgctagcattacagctggagcagttattgaatcccaggcctagcgaagccgaccccgaggcagacccggaggaagccaccgccgcccgagtcattgaccgatttgacgaaggggaggatggtgagggtgatttccttgtggtgggcagcatacggaaacttgcctctgcctcactactggacactgacaagcggtactgtgggaagactacctctagaaaagcgtggaatgaggatcactgggaacaaacgcttcccggtagcagcgacgaagagataagcgacgaggaagggtctggtgacgaagatagtgaagggctgggattggaggagtatgatgaggatgacctgggtgccgctgaggagcaggaatgtggagatcatagggaatcaaagaagagcagaagccactcagcgaaaactccgggcttttccgtacagtccataagtgattttgagaaattcaccaagggaatggatgatctgggatcaagtgaggaggaggaggatgaagaaagcggcatggaggaaggagacgacgccgaagactctcagggcgaatccgaggaggatagggcgggagaccgtaactcagaagacgatggagttgtaatgacattctcttcagtcaaggtgagcgaggaagtcgagaagggaagagctgtcaaaaatcaaatcgcgctgtgggaccaattgttggagggacggattaagctgcagaaggccctgttgactaccaaccagctgccacagccggacgtgttcccactctttaaggacaagggcgggccggagttctctagcgcattgaagaattcgcacaaagctttaaaagctctactgagaagcctagtaggacttcaggaagagcttctgtttcagtatccagataccaggtatctggttgacggtacaaaacccaatgctggatctgaagagatttcaagcgaagacgatgaactcgtggaagaaaaaaaacagcagcgccggcgagtgcctgccaagagaaaactagagatggaagattacccaagcttcatggcgaagcgatttgctgactttacagtgtaccgaaaccggactctgcagaagtggcacgataaaaccaaattagcatccggcaaactggggaaaggattcggcgccttcgaacggtctatccttactcagattgaccatattcttatggacaaagaacgcctcctccgccggactcagaccaagaggtccgtgtaccgtgtattaggtaagccggagccagccgcgcagcctgtccccgagagtcttcccggcgagcctgagatcctaccgcaagcccctgctaatgctcacctcaaggatctggatgaggaaattttcgacgatgatgacttttatcatcaactgctgcgagagcttatcgagagaaagacatcttcattagaccctaatgatcaagttgcgatggggcgccagtggctggctattcagaaactgcggtccaaaatccataagaaggtggatcgcaaagcctcaaaaggccggaagctcaggttccacgtactcagtaagctgctttcattcatggcaccgatagaccataccacgatgaatgatgacgcaaggacggagctctatagaagcctgttcgggcagctccaccccccagacgagggccacggagactag

SEQ ID NO: 141743 - DNA, 4134 bp, synthetic construct
  misc_feature 1..4134: note = Description of Artificial Sequence: Synthetic coding sequence
  source 1..4134: mol_type = other DNA
atggatacctcctccgtcggggggctagagcttacagaccagactcccgtgcttctgggaagcacggcaatggccacaagcctgacgaatgtcggcaattctttcagcggtccagccaacccgttagtctcgcgctctaataagttccaaaatagctcagtagaggacgatgacgacgttgtgttcatagagccagtgcagccaccgcccccgtcagtgcccgtggttgcagatcagcggaccataaccttcacctcttccaagaatgaagaactccagggtaacgacagtaaaattactccatccagcaaggaactggcttcgcagaaaggctccgttagcgaaaccatcgtgatcgacgatgaggaagacatggaaaccaatcagggacaggaaaagaactcgagcaactttattgagcgtcgaccccctgagacaaagaaccgaacgaacgacgtggacttctccacgtctagcttctcacgctcaaaggtgaatgccgggatgggcaactctggcattactaccgaaccagactctgaaattcagatcgcgaacgttacaactctggagacaggggtctctagtgttaacgacggccagctggaaaataccgatggcagagatatgaacctgatgataacccatgtgacctccctccagaacactaacctcggcgacgtctcaaacggcctacagtcatcaaatttcggtgtgaatattcagacatacaccccctctttaacatctcagaccaaaactggggtcgggccttttaatccaggaaggatgaacgttgccggcgacgtatttcaaaatggagaatcagccacacatcacaaccccgactcctggatatcccagtcagccagcttcccaaggaatcagaagcaacctggcgtggattccctgtccccagtagctagtctgcccaaacaaatttttcaaccgtccgtgcagcaacagccaacaaaaccagtgaaagtaacctgtgccaattgtaagaaacccttgcaaaaaggacagacagcgtaccaaagaaagggaagcgcccatttgttctgttccaccacctgcctgtcctccttcagccacaagcctgcgcctaagaaattgtgtgtaatgtgcaaaaaggatatcacaacgatgaaaggcacgatcgtggctcaggtagactccagtgaatccttccaagagttctgttcaactagctgcctgagcctgtacgaggacaaacagaatcctacaaagggagccttgaataagtcaagatgcactatctgcggcaagttaaccgagatccggcacgaagttagtttcaaaaatatgacccataagctatgttctgaccattgcttcaaccggtacaggatggcaaatggcctaatcatgaactgttgtgaacagtgtggcgaatatctgccaagcaagggagccggaaataatgtgctggtgattgatggccaacagaagagattttgctgtcagagttgcgtgtccgagtacaagcaggtcggctcgcatccctcctttcttaaggaagtgcgcgatcacatgcaggactcctttttgatgcagccagagaagtacggtaagctcactacatgcacgggatgtagaactcagtgcagatttttcgatatgacccagtgcatcggtccaaatggctatatggaaccgtactgctctactgcctgtatgaactcccataagacaaaatacgccaaatcccagtctctaggcatcatatgtcacttctgcaagcgaaactccctcccccagtaccaggccacaatgcctgatggcaagctgtataacttctgtaatagctcgtgtgtggccaaattccaagcactgagcatgcagtcaagtcctaatggccagtttgtggctcctagtgatatacagttgaaatgcaactattgtaagaactccttctgctcaaaacctgagatcttagaatgggagaataaggtgcaccagttctgcagcaaaacatgctccgacgactataagaagttgcattgtattgtcacatactgtgaatactgtcaggaggagaagactctccatgagacggtgaactttagtggcgttaagaggcctttctgctctgaggggtgtaagttgctgtacaagcaagactttgcccgccgactaggactcagatgcgtcacctgcaactattgcagccagttatgcaaaaaaggtgctaccaaggagctggacggagtcgtgcgtgacttctgttctgaggactgctgcaaaaaattccaggactggtattacaaggcagcacggtgcgactgttgtaagtctcaaggaacgctgaaggagagagttcagtggcggggggagatgaaacacttttgcgatcagcactgcttgttaagattctactgtcagcaaaatgaacctaacatgactacccagaaaggtcctgagaatctgcattatgatcaaggatgccaaacttcgcgcaccaagatgaccggtagcgcccccccaccttcaccaactccgaacaaagagatgaagaataaggccgtgctgtgtaaaccccttacaatgacaaaagcaacctattgtaaacctcacatgcagacgaaatcctgccagacggatgacacctggcgtacagagtacgttcccgtgcccatcccagtgcccgtatacatccctgtgcctatgcatatgtactctcagaatattcccgtgcctaccaccgtccccgtgcccgtgcccgtgcccgtctttctcccagcccccctggactcctccgaaaagataccagctgcaattgaagaactgaaatcgaaagtctcatcagacgccctggacacagaactactgacgatgacagatatgatgagtgaagacgaggggaaaaccgaaacaacgaacataaacagtgttattatagaaactgacatcattggatccgatctactaaaaaattccgatcctgagacccagagctcaatgccagatgttccctatgagccagatctcgatattgagattgacttccctagggcggctgaggagctggacatggagaatgagttcctcctcccccccgtgttcggtgaggagtacgaggaacagccaaggcctcgcagcaaaaagaagggggcgaagaggaaagcagtctccggatatcagtcacacgacgattcctcggataactccgaatgctccttcccgttcaaatacacctatggggttaatgcctggaaacattgggttaaaaccaggcagctggatgaagacttgcttgtgctggacgagctcaagtcctctaagagcgtgaagctcaaggaagatttgctgagccacaccacggcagagcttaactacggcctggctcatttcgtcaatgagattcggcgccctaacggtgagaattatgcccccgactcaatctactacctttgcctgggcattcaagaatacttatgcgggagcaaccgaaaggacaatattttcatcgaccccggttaccagaccttcgagcaagaattaaataaaatcctgaggtcctggcaaccctccatcctccctgatggcagtattttttctcgcgttgaagaggactatctctggagaattaagcagcttggctcccattcgcctgtcgccctcctcaacaccctgttctattttaatacaaagtattttgggctgaaaacggtcgagcagcatttaagactgtcttttggcactgtgttcagacactggaaaaagaatccattaaccatggagaataaagcttgcctaagatatcaagtttcatctctgtgtgggactgacaatgaagacaaaatcaccaccgggaaacgcaaacatgaggacgacgaacccgtgtttgagcagatagaaaatactgccaatccatcgagatgccccgtcaagatgttcgaatgctacctgtcgaagtcgcctcagaaccttaaccagcggatggatgtgttttacttacaaccggaatgctcttcgtcaactgattcccccgtctggtacacttcaactagcctggaccgcaacaccctcgaaaacatgctcgtcagagtactgctagttaaggacatctatgacaaggataattacgaactggacgaggataccgactag

SEQ ID NO: 141744 - DNA, 4128 bp, synthetic construct
  misc_feature 1..4128: note = Description of Artificial Sequence: Synthetic coding sequence
  source 1..4128: mol_type = other DNA
atggacacctctagcgtgggaggcctggagcttactgaccagactcctgtgcttctgggtagcacagccatggccaccagcctcaccaatgtaggcaactcctttagcgggccagccaaccctttagtttccagatcaaataaattccagaattcttcggttgaagatgatgacgacgtggtgttcatcgagccagtgcaaccacctccgccgagtgtgccggtcgttgccgatcagcgcactataacttttaccagtagtaaaaacgaagagttgcaagggaatgatagtaagatcactccatcttccaaagaacttgctagtcagaagggctctgtctccgaaactatcgtaatcgatgatgaggaggatatggagacaaaccagggccaggaaaaaaactccagtaattttatcgaacgacgtccccccgaaaccaagaaccgaacaaatgacgtggatttctccacgtcttccttttccagaagtaaggtgaatgcaggtatggggaactcaggtatcacaacagagcctgacagcgagatccaaattgctaatgtcacaactctggagacaggtgtctcatccgtgaacgatggtcagttggaaaacactgacggccgcgatatgaacctcatgatcacgcacgtaaccagcctacaaaacacaaaccttggtgacgtgagcaacgggctgcaatcctccaattttggggtgaatatccagacttatactccaagcctgacctcccaaacaaagaccggcgttggtccattcaacccagggcggatgaatgtggccggcgacgtatttcagaatggtgaaagcgccacccatcacaaccctgactcttggatctcccaaagcgcttccttcccaaggaatcagaaacaacctggggtcgatagtcttagccctgtggcctcactcccaaaacaaatctttcaaccttctgtccaacaacaacccacaaagcccgtgaaggtcacttgtgctaactgcaaaaagccattgcaaaagggtcagacagcctatcagcgaaagggcagcgcccatctcttttgcagtaccacatgcttgtccagcttcagccataaacctgcgcctaaaaagctatgtgtcatgtgcaaaaaagacatcactactatgaagggcaccattgtcgctcaggtggactcttctgagtcctttcaagagttttgttccaccagctgtctctccttgtacgaggataaacagaaccccaccaagggcgctctcaataagtcccggtgtacaatttgcggcaaactcacagagatcagacacgaagtgagcttcaagaatatgactcacaaactctgctcagatcactgcttcaataggtacagaatggctaatgggctgatcatgaattgctgcgaacaatgcggcgagtatttgccatctaagggcgctggaaataatgtgctggtgattgacgggcagcagaagaggttttgctgccaaagttgtgtgagtgagtacaagcaggtcggctcacatccaagttttttgaaggaagtgagggatcacatgcaggatagcttcctcatgcagccagaaaagtacgggaaacttacaacatgcacgggctgccggacacagtgtaggttctttgatatgactcagtgcatcgggcccaacggctatatggaaccgtactgctctaccgcttgtatgaactcccacaagaccaaatacgctaagtctcagagcttagggatcatctgccacttttgcaaaaggaacagcttgccacagtaccaggcaacaatgccagacggtaagctgtataacttctgtaacagttcatgtgttgcgaaatttcaggccctctccatgcagtcctcaccaaacgggcagttcgtggccccctctgacattcagcttaaatgcaactattgcaagaacagcttctgctcaaaaccagaaatcctcgagtgggaggcctccctgcatcagttttgcagcaaaacctgtagcgatgactacaaaaaactgcattgtatcgtgacttattgcgagtactgtcaggaggaaaagacgctgcatgagaccgtgaactttagtggagtgaaacggcctttctgcagcgaagggtgcaaactgctgtacaaacaagacttcgcccggagacttggcctgcgctgtgtaacctgtaattattgtagtcagctgtgtaaaaagggagccaccaaagagctagatggagtcgtacgagatttctgttctgaggattgttgtaagaagtttcaggactggtattacaaagcctgcgattgctgcaagtctcaggggaccctcaaggagcgggttcagtggcgcggcgaaatgaaacacttctgtgaccagcactgcctgctgcgtttttattgccagcagaacgagcccaatatgactacgcaaaaaggcccggaaaatctgcattacgatcagggctgtcagactagccggacaaagatgaccggctcagcaccacccccaagccctactcccaataaggaaatgaagaataaagccgtgctttgtaaaccactgaccatgaccaaggccacatactgcaaaccacacatgcaaactaagtcttgtcaaactgacgacacttggaggacggaatacgtgcctgtgcccatccctgtgcctgtgtacatacctgttccgatgcacatgtacagccagaatattcctgtgccaaccaccgtgcccgtcccagtgccagttccagttttcctccctgcacccttggattcctcagaaaagatccctgctgcaatcgaggaactcaagagcaaagtgtcaagcgatgctttggacaccgagcttctgacgatgacagacatgatgtctgaagatgaggggaaaactgagaccacaaatattaattcggtgattatagagacggatattattggctcagatctactgaagaatagtgaccctgagacacagtctagcatgccagatgtcccgtacgaacccgacctggatatcgaaattgatttcccccgcgccgccgaagagctggacatggaaaatgagttcctgctgcctccagtgttcggggaagaatatgaggagcagccaagacccaggtccaaaaaaaaaggtgctaaacggaaagcagtcagtggttaccagtcccacgacgacagctcagacaattccgaatgctcttttccttttaaatatacttatggggtgaacgcctggaagcactgggttaagacgagacagctggacgaagatttattggtgctggatgagctcaagagtagtaagtcagttaagctgaaggaggacctcctttcccataccacggcggaattgaattatgggctcgcccacttcgttaacgaaatacgaaggcctaacggagaaaattatgctccggactctatctactatctttgtttgggtattcaggagtatctttgcggatctaatcggaaagataacattttcatcgatcctgggtaccagactttcgagcaggagctgaacaaaattttgcggagctggcaaccgagcatcctgccagacggatccatcttttcaagagtcgaagaagactacttgtggaggatcaagcagctgggatcccactcccctgtggctctgctgaatacactgttctattttaataccaaatactttgggctaaagacagtggaacagcacttgcgtcttagcttcggaacagtctttcggcactggaaaaaaaatcctttgaccatggaaaacaaggcttgtctccgctatcaagtatcatcactctgcgggacggacaatgaggacaagatcactactggcaaaaggaagcacgaggacgatgagcccgtgtttgaacagatcgaaaacacggctaacccatcaaggtgtccagtgaagatgttcgaatgctacttatccaagtcccctcagaacctgaaccagaggatggacgtcttttaccttcagcccgagtgctcttcaagcaccgattcaccagtgtggtatacttctacatcactcgatcgtaacacgttggaaaacatgctagtgagagtcctgcttgtgaaagacatctatgataaggataactacgaactggacgaagacacagattag

SEQ ID NO: 141745 - DNA, 4128 bp, synthetic construct
  misc_feature 1..4128: note = Description of Artificial Sequence: Synthetic coding sequence
  source 1..4128: mol_type = other DNA
atggacacgtcatccgtcggaggtcttgagctcacggaccagaccccagtccttctggggagcactgcaatggccaccagtctcaccaacgtcggtaactcgttttcaggcccagctaatccgctggtgtccaggtctaataagttccagaattccagcgtggaggacgatgatgatgtagtgttcatagaacccgtgcagccaccccctccatcagtgccagtggtggccgaccagcgtaccattactttcacgtcttccaagaacgaggagcttcagggtaatgacagcaaaataacgcccagctctaaggagttagccagtcagaaaggctcggtgtcagagaccatagtgatcgatgatgaggaggacatggagacgaaccaggggcaggaaaagaattcgtccaacttcatagagcgccgtccccccgagacaaagaacagaacgaacgacgtagacttcagtacatcgtccttttcccgttctaaggtgaatgcaggcatggggaactctggcatcaccacggagcctgattctgaaattcagatcgcgaacgtgaccaccctggagactggtgtttcctctgttaatgacggtcagctcgaaaatacagacggcagagatatgaatctcatgattacgcatgtgacctctctccaaaatacaaatctgggcgatgtgagtaatgggctgcagtcttccaatttcggggttaatattcagacttacacgccaagcttgacttctcaaacgaagacaggagtcgggccattcaatcccggccggatgaatgttgcaggagatgtgttccagaatggcgaatctgctacccaccataaccccgattcctggatcagccagtccgctagctttccaagaaatcagaagcagccgggggtcgactcactcagtcctgtcgcatcactgcctaaacagatattccagcccagtgtgcagcagcagcccaccaaaccggtgaaggtgacgtgtgctaactgcaagaagccactacaaaaagggcagactgcctaccagcggaaaggtagcgcacatctgttttgctctacaacctgcctttcttcatttagtcataagccagctcccaagaagctctgcgtgatgtgcaaaaaggatataaccaccatgaagggcactatcgtagcccaggtggattccagcgaaagctttcaagagttctgcagcacgtcatgcctaagtttatatgaggataagcagaatcccactaaaggcgcccttaataaaagtcggtgcacaatctgtggaaaactgaccgaaattagacacgaggtttccttcaagaacatgacacataagctttgcagtgatcactgtttcaatcgataccgaatggcaaacgggctcatcatgaactgttgcgagcagtgtggggagtacctgccttccaagggggccggcaacaatgttcttgttatcgacggtcaacaaaaacggttttgttgccaaagttgtgtgtccgagtataagcaggtcggcagccaccccagctttctaaaggaagtgcgagatcacatgcaggactcgttcttaatgcagcccgaaaagtacggaaagcttaccacatgcaccggctgtcggacacagtgtcgattttttgatatgacccaatgcatcggtccaaatggatatatggagccctactgctctacagcgtgtatgaacagccacaaaacaaaatatgccaaatcccagagtctcggaattatatgccacttttgtaagagaaactccctgcctcaatatcaagccacaatgcctgacgggaagctttataacttttgtaacagcagttgcgttgccaaattccaagctctgagtatgcaatcttctccgaacggtcagttcgttgcgcctagcgatatacagctcaaatgcaactattgtaaaaactctttctgttcaaaacccgagattctggaatgggaggctagcttacaccagttctgttccaagacatgttccgatgactataaaaagctgcattgtatcgtaacatactgcgaatactgccaggaagagaaaactcttcatgagactgtcaacttcagtggcgtaaaacggccattttgtagcgaaggttgtaaactgctgtataaacaggacttcgcaagacgactcggcctgagatgcgtaacctgcaattactgctcccagctgtgcaagaaaggtgctacaaaagagttggacggcgtggtgcgtgacttttgcagcgaagattgctgcaaaaaatttcaggattggtactataaagcatgcgattgttgcaaaagccagggcacactgaaagaacgcgtccagtggcggggagagatgaaacacttttgcgaccaacattgcctgctgagattttactgccagcagaatgaaccgaatatgactacccagaaggggccggaaaatctacattacgatcagggctgtcagacctcacgtacaaagatgactggctctgccccccccccctctcccacccccaacaaagaaatgaagaacaaagccgtactgtgcaagcctctgactatgactaaggcaacttactgcaagccacacatgcagactaagtcttgccagaccgacgatacctggcgtacagagtatgtccctgttccaatcccggtgcccgtgtacattcccgtgcccatgcacatgtacagtcagaacatcccagttcccactacagtgcctgtgccagtccccgtccccgtatttctccccgctcccttggacagttctgagaaaattcccgcagcgatagaggaactgaaatccaaggtgagtagcgatgccttggatactgaattattgaccatgactgacatgatgtctgaagacgaagggaaaacggagaccaccaacatcaactctgtgatcatcgaaactgacattattggttctgatctactgaaaaatagtgaccctgagacacagagttctatgccagacgtaccttacgaacccgatctcgacattgaaattgatttcccaagagccgccgaggaactggacatggagaatgaatttctcctgccgccggtgttcggagaagaatatgaggagcaacctaggcccagatcaaagaaaaaaggagcgaagcgaaaggcggtgtctggctaccagtcacatgatgactcctccgataatagtgagtgcagttttccctttaaatacacatacggcgttaacgcttggaagcactgggttaaaaccaggcagctcgacgaagacttgttggtgctcgatgagctgaaatcctctaagtctgttaagcttaaggaggatttgctttcacacacaactgctgagctgaactacggcctggcacacttcgtaaacgagatacggaggccaaatggtgagaattacgcccctgactccatctattatctctgtttgggtattcaggaatatctgtgtggctcaaacaggaaggataacatctttatagaccccgggtaccaaacattcgagcaggagctgaacaaaatcttacgctcctggcagccttctattctgcctgatggctcaattttcagcagagttgaagaagattatctgtggcgtattaaacagctggggagtcattcacctgtcgcccttctcaataccttattttactttaatacgaagtactttggcctgaaaaccgtggagcagcatctgagactgtcattcgggacagtgtttcggcactggaagaagaacccactcaccatggaaaacaaggcctgtctgagataccaggtatcctccttgtgtggaaccgataatgaggacaagattaccactgggaagagaaaacatgaagatgacgagccggtttttgagcagatcgagaataccgcaaatccttctagatgtcccgtgaaaatgtttgagtgctatctttctaagagccctcagaacctgaatcaaagaatggatgttttctacctgcaaccagaatgctccagctctactgatagccctgtctggtatacttctaccagcctcgaccgcaatactctggagaacatgttggtgcgagtactcctggtgaaagacatctacgataaagacaattatgagttggacgaggataccgactag

SEQ ID NO: 141746 - DNA, 1134 bp, synthetic construct
  misc_feature 1..1134: note = Description of Artificial Sequence: Synthetic coding sequence
  source 1..1134: mol_type = other DNA
atgcaggattcctttctcatgcagcctgagaaatatggaaaactcacaacatgtaccgggtgccggactcagtgtcgcttttttgatatgacccagtgcatcgggcccaatggctacatggaaccatactgttcaaccgcatgtatgaactctcacaaaaccaaatacgccaaaagtcagagcttaggcataatctgccacttttgcaagcggaattcgctaccacaataccaggccacaatgcctgacggaaagctgtataatttctgcaatagttcatgcgttgctaagttccaggccctttccatgcagtcttcacctaatggtcagttcgttgccccttcggatattcagctcaaatgtaattactgtaagaattccttctgcagcaaaccagagatcttagaatgggaaaacaaggtgcatcagttttgttcaaaaacctgcagcgacgactataaaaagctgcactgtattgtaacatattgtgaatactgtcaagaggagaagaccctacatgagacggttaacttcagcggagtgaagcgccccttctgctcagaaggctgtaagcttctttataagcaggactttgcccgtcgtctcggcctccggtgcgtcacttgcaactactgtagtcaactgtgtaagaagggagctacaaaagagttagacggagttgtgcgcgatttttgttccgaagactgctgtaaaaaattccaagactggtactacaaagccgcccgatgcgactgctgcaaatcccaagggactcttaaggaacgagtgcagtggcgcggagaaatgaagcacttctgtgaccaacattgtttgctacggttctattgccagcagaacgagcctaacatgacaacccaaaaaggcccagaaaatctccactatgatcagggctgtcagacctctcgaaccaagatgactggcagcgctcctccaccttcaccaactccaaacaaggaaatgaagaacaaggccgtgctgtgtaaaccactgaccatgaccaaggccacatactgtaagccacatatgcaaaccaaatcgtgccaaaccgacattacctggcgtatccaacatctgatcctgaatcactacgatcagagcctcatcaaggcttag

SEQ ID NO: 141747 - DNA, 4134 bp, synthetic construct
  misc_feature 1..4134: note = Description of Artificial Sequence: Synthetic coding sequence
  source 1..4134: mol_type = other DNA
atggatacttcatctgtgggcggcttagagctcacggaccagacccccgtgctgctggggtccactgccatggctacttcgctaacaaacgtgggtaactccttcagtggccctgccaatcccttggtgagcaggagcaataaatttcagaacagttcggttgaagatgatgatgacgtggtgttcatcgaacccgttcagccacccccaccttccgtgcctgtggtggcggatcagcgaactataaccttcacgagttccaagaacgaggagctgcagggaaacgacagcaaaattacaccaagctccaaagagctcgcctcacaaaagggctcggtctcagagaccatcgtgattgatgacgaggaggacatggaaacgaaccaggggcaagagaaaaattcaagcaattttatcgaacggcgccccccggaaaccaagaacagaactaatgacgtagatttctccacttccagctttagcagatccaaggtcaacgccgggatggggaactccggtataacaactgagccagattctgagattcagattgcgaacgtgactaccctggagactggggtatctagtgtcaatgacggccagttagaaaacactgacgggcgagacatgaatttaatgattacccacgtcacttcactacaaaatactaacttgggcgacgtttccaatggcctgcagtccagtaatttcggcgtgaacattcagacttatactccctctcttacaagccagacaaaaactggcgtggggcccttcaaccctgggcggatgaatgtggctggtgacgtcttccagaatggcgaaagcgctacgcatcacaacccggactcttggatttcacagtctgcctcatttccacgcaatcagaaacagccaggcgtagactccttgtcccccgtggcctctctcccaaaacagatatttcagccttcggttcagcaacagccaactaaacccgtgaaggtcacttgtgcaaactgtaagaaaccgcttcagaaaggacagactgcctatcagaggaaaggtagtgcacatctattctgctctaccacatgtctttcaagtttttcacacaagccagcccctaagaagttgtgtgtgatgtgcaaaaaagatatcaccacaatgaaaggtaccatagtggcacaggttgattcttctgaaagtttccaggagttctgctctacatcttgcctatctttatatgaggataagcagaatccaacaaagggcgccctgaacaaaagcaggtgcacaatctgcggtaaacttactgagatcagacacgaggtgtctttcaagaacatgacacataagctttgttccgatcactgttttaaccgctatcgaatggccaacggattaataatgaactgctgtgaacaatgtggggaatacctgccgtcaaaaggggcgggaaataatgtcctggtgatcgacgggcagcagaaaaggttctgttgccagagctgcgtgagcgaatacaagcaggtgggatcccacccatcattccttaaggaagtgagagaccatatgcaagactcatttctcatgcagcccgaaaagtatggaaaactcactacttgtactggatgtcgaacacagtgtcgcttcttcgatatgactcaatgtataggtccaaacggctatatggagccatattgctccaccgcctgtatgaactcccacaagacaaagtatgccaagagtcagtcactagggattatttgtcacttttgcaagcggaattccctgccacagtatcaggcaaccatgcctgacgggaagctctacaatttctgcaactcttcctgtgtggcaaaattccaggccctgagcatgcagtcctcacctaacggacagttcgtggcaccttctgatatacagctcaagtgtaactactgtaagaacagcttttgcagcaagcctgagatactagagtgggagaataaggttcatcagttttgtagcaagacctgctccgacgattataaaaagctgcactgtatcgtcacctattgtgagtattgccaagaggagaagacactgcacgagaccgtgaacttctccggcgtaaaacgtcctttctgtagtgagggatgtaaactgctgtacaagcaggacttcgctcgaagactggggctgcgatgcgtaacctgtaattactgctctcagctgtgcaagaaaggagcaaccaaggagctcgacggtgtggtgagggacttctgcagtgaagactgctgtaaaaaatttcaggactggtattataaggctgcacggtgtgactgctgtaaaagtcagggcacactaaaagagcgggttcagtggagaggtgagatgaagcatttttgcgaccagcactgcctcttacgcttctattgccaacagaacgagccgaatatgactactcaaaagggcccagaaaatctgcattacgaccagggatgtcagacctcccgaaccaaaatgaccgggagtgcccctcctcccagccctacccctaacaaggagatgaaaaacaaagctgttctgtgcaagcccctgacaatgaccaaagccacctactgtaagccacacatgcagacaaagagctgccagaccgatgatacttggcgcacagaatatgtgcctgtccccatcccagtcccagtgtacatacctgtccctatgcatatgtatagccagaacattcctgtccctaccacggtgcccgtgccggttccggtaccggtatttttgcccgccccgctcgacagctccgagaagattcctgccgccatagaagagctcaaatcaaaagtttcttccgatgccctggatactgagctcttgacaatgacagacatgatgtccgaggacgagggcaaaaccgagacgactaacattaacagtgtaattatcgagactgatatcatcggaagtgatttactgaagaactctgatcctgaaacacagtcatcgatgcccgacgtgccctacgaaccagatctagacatcgagatcgactttccccgcgccgccgaagagcttgatatggagaatgaattcttattgccacctgtgtttggggaagagtatgaggaacagcccaggccaagaagtaagaagaagggtgccaaacgcaaggccgtgtctggttaccagagtcacgacgatagtagcgacaatagtgagtgtagcttcccttttaagtacacatatggagtcaacgcatggaagcattgggtgaaaactcgccagctagatgaggatcttctggtcctcgacgaactcaagtcaagtaaatctgtaaaactgaaggaagaccttttgagtcacaccactgcggagttaaactacggcctggcccattttgtgaatgagatccggagaccaaacggagaaaattacgcccccgactccatatactatctgtgtctgggtatccaggagtatctgtgcggaagcaaccggaaggacaacatcttcatagacccggggtaccaaacgtttgagcaggagttaaacaaaatactccgatcctggcagccatcgatcttaccagacgggtccatcttttcacgagtagaggaagactacctgtggcgaatcaagcagttaggcagtcacagcccagtggctctgctgaacactttgttctattttaacactaaatattttgggctcaagacagtcgaacagcacctccgcctgagcttcggcacagtgttcaggcactggaagaagaaccccctgaccatggagaacaaggcttgccttagataccaggtgtcttctctatgtgggacggacaatgaggacaaaatcacgactgggaagagaaagcacgaagacgacgagccagtcttcgagcagattgaaaatactgctaatcccagtcgttgtcccgtgaagatgttcgagtgttacttatctaaatctccccagaacctcaatcagcggatggatgtgttttacctccagcctgagtgtagctcctcaacagatagtcccgtgtggtacacaagcacctccctcgatagaaataccctcgagaacatgctcgtccgagtcctcctcgtgaaagacatatacgataaagacaactacgagctcgacgaagataccgattag

SEQ ID NO: 141748 - DNA, 4113 bp, synthetic construct
  misc_feature 1..4113: note = Description of Artificial Sequence: Synthetic coding sequence
  source 1..4113: mol_type = other DNA
atggatccgagtgatttcccctcacccttcgaccccctcacattacctgaaaaacctctggcaggggatctacctgtggatatggaatttggagaggacctcctagaaagccagacggccccaacgcgcgggtgggccccaccaggtccaagtccctcatcaggagctttagacctacttgatactcctgcaggactagagaaagatcccggggttttggatggagctaccgaactcctcgggctgggcggtctactgtacaaagctccaagtccacctgaggtcgatcacggtccagaaggaacacttgcttgggatgcaggggatcagacattggaacccgggccaggtggacagacgcctgaggtggtacccccggaccctggagccggagctaattcttgctcaccggaggggctactggaaccgcttgcccctgactctcctatcacactgcagtctccccacatcgaggaagaagaaactacctccatcgccactgcaagaaggggttcccctgggcaggaggaggaactcccccagggtcagcctcaatccccaaacgcccccccatctccttctgtcggagaaaccctcggcgatggcattaattctagtcagactaagcctggcggatccagcccccccgcccacccaagtcttcctggggacggtttgacggcgaaggcatctgagaaacctccagagcgcaagcggtcagaacgggtccgcagagctgagcccccaaaacccgaggtagtcgactccacggagtccatacccgtgtcagatgaagactcagatgccatggtcgatgaccctaatgacgaggacttcgttccatttagacccaggaggtctccccggatgtcattgcgatcgtccgtatcacaacgcgctggcaggtctgcagtggggacaaaaatgacctgcgcgcactgtagaacccctctgcagaagggacaaacagcttatcaacgaaaggggcttcctcaacttttctgtagcagctcttgcttgacgacattcagcaagaaaccctctggaaaaaaaacgtgcacattctgtaagaaggagatctggaacactaaggacagcgtggtggctcagaccggttctgggggctcctttcacgaattttgtacttcagtgtgcctctccttgtatgaagcgcaacaacaacgacctatcccccagagcggagaccccgcggatgccacccgctgctcaatttgtcaaaagactggggaagtcctgcacgaggtatcaaacgggtcagtggtgcaccgcctatgttccgactcatgctttagtaaatttcgggctaataagggccttaaaacgaattgttgtgaccagtgtggcgcctatatctataccaagactggctccccaggcccagagctgctgtttcatgaaggtcaacagaaacgcttttgcaatactacatgccttggagcgtataagaaaaaaaacacacgggtatatccttgcgtctggtgtaaaaccctttgtaaaaacttcgaaatgctttctcatgtagatcgcaacggcaaaacaagcctcttctgctctctgtgctgtacaaccagctataaagtgaagcaggcggggctgaccggtcctccgaggccttgtagcttctgccggaggagtctgtccgatccctgctactacaacaaggtggatcggacagtgtaccagttttgcagcccctcttgctggactaaattccagagaaccagccctgagggggggattcacctgtcatgtcattattgccactcactcttcagcggaaaacctgaggtcctcgactggcaagaccaggtgtttcaattttgctgtcgggactgctgcgaagatttcaaaaggctgaggggggtggtgtctcaatgcgagcactgcagacaggagaagctgcttcacgaaaaattgaggttctctggcgtcgagaaaagcttttgcagcgaaggttgtgtgctgctctacaagcaggactttacgaagaaactgggcctgtgttgcatcacttgtacttattgctctcagacgtgccaacggggagtcacagaacaactcgacgggagtacctgggacttctgcagcgaagactgcaagtctaaatacctgctgtggtactgtaaggcggcccgttgtcatgcttgtaagagacagggcaaactcttagagacaattcactggcgcgggcagattcgccacttttgtaaccagcagtgcttactgcgcttttacagccagcaaaaccaaccaaacctggatactcaaagcggtcctgaatccctgctaaacagccaatcgccggagagcaagccacagacaccgtctcagaccaaagttgagaacagtaatacagtgagaacccctgaggaaaacggaaacctaggcaagatccccgtaaaaacccgatcagcccctacagcccctacacctccgcctccccctcccccagccaccccaaggaagaacaaagccgccatgtgtaaaccacttatgcaaaacagaggcgtgtcctgtaaggtggagatgaaatctaagggtagccaaacagaggaatggaaaccccaagtgatagtcctgcctataccagtacctatcttcgtgcctgtcccgatgcacctgtactgtcaaaaagttcccgttcctttctcaatgcctattccagtgccggttcccatgttccttccgacgacgttggagtctacagataagatcgtggagacaattgaggaactgaaggtgaaaattcctagtaacccgctggaggccgacattctggctatggccgagatgattgcggaggctgaagaactcgataaggcaagttccgacttgtgcgatctcgtgtctaatcagtccgccgaaggcctcctcgaagactgtgatctcttcgggccagcccgagacgacgtcctggccatggcagtgaaaatggctaacgtcttagatgagcccgggcaagatctggaagcggacttcccgaagaatcccctggacataaatccatccgttgatttcctgtttgattgcggcctcgtgggcccagaagatgtgagcaccgaacaggatctgcctcgcaccatgcgcaaagggcaaaaaagactcgtcctaagcgagagttgctctagagacagtatgtcctcccagccctcttgtactggattgaattacagctacggcgtgaacgcttggaagtgctgggtgcagagcaagtatgcaaatggcgagactagcaaaggagatgaactgcggtttggccccaagccaatgaggattaaggaggacatcctagcatgctcagctgctgagctcaactacggcctcgcgcagttcgtgagagaaatcactaggcctaacggcgaacgatatgagcccgactccatttattacttatgcctcggtatacaacagtacctactggagaataatagaatggttaatatcttcacagacctatattaccttacattcgtgcaggagctcaacaaatcactatcaacgtggcagccgactctcctgcctaacaacacggtgttctctagagtggaagaggagcacctgtgggaatgcaaacagcttggtgtctactcaccttttgtcctgctaaacaccctgatgtttttcaataccaagtttttcgggcttcaaaccgcagaggagcacatgcagttatctttcacaaatgtcgtgagacagagcaggaaatgtaccacccccaggggcacaaccaaagttgtgtcaatccgatactatgcaccggtgcggcagcgaaaaggtcgggataccggtccaggaaaacgcaagcgcgaagatgaggcccccattttggaacagagagaaaatagaatgaaccccctgagatgtcccgttaaattttacgaattctacttgagcaagtgtccggagtcgctccgcactcggaatgacgtattctacttacaaccagagagatcttgtatcgcggagagtccattgtggtatagcgtgatcccaatggacagaagtatgcttgagtccatgcttaatagaatcttggcagtcagggagatttatgaagagttgggtaggcccggggaagaagacctggattag

SEQ ID NO: 141749 - DNA, 4113 bp, synthetic construct
  misc_feature 1..4113: note = Description of Artificial Sequence: Synthetic coding sequence
  source 1..4113: mol_type = other DNA
atggacccaagcgactttccttctccattcgaccctctgactttgcctgagaagcctctcgctggcgatttacccgtggacatggagttcggggaagacctgctagaaagtcagacagcgccgaccaggggatgggctcctcccggcccgagtccctctagtggtgccctggacctactcgatacccccgctgggctcgagaaggaccctggggtgctagacggcgctactgaactgctgggtctcggcggattgctgtacaaagccccttccccacctgaggtagaccacggtcccgaaggcactttggcctgggatgccggcgaccagacactggagcccggtcccggcggccagactccagaggtggtgccgccagatcctggagccggcgcaaactcgtgttctcccgaaggactgcttgagcccctggcccctgattcacccatcaccctccagtctcctcacattgaggaggaggagacgacctcaattgccaccgccaggaggggtagccctggacaggaagaagagcttcctcagggccagccacagtcccccaacgctccgccatctccttctgttggtgagactctgggggacggcattaatagttcccagaccaagcctgggggatccagtccaccagctcaccctagcctgccaggcgacgggttaacagcaaaggcgtctgagaagcccccagaaaggaaaaggtccgagcgcgtgaggcgcgccgagcctcccaaacctgaagtggtggattccaccgagtccattccagtcagcgatgaggattcagatgctatggtggatgatcctaacgatgaggatttcgtgcctttccggcccaggcgcagtccccgaatgagcctgaggagcagcgtgtcacagcgagctggtagatcagccgtgggcaccaagatgacatgcgctcattgccgcacacctttgcagaaaggccaaacagcctaccagaggaaaggcttaccacaactcttttgttcaagtagttgtcttactacgtttagtaaaaagcccagcggaaagaaaacctgtactttttgtaagaaggagatttggaacacaaaagacagcgttgttgctcagaccgggtctggaggtagcttccatgaattttgtacttccgtctgcctgtcactttacgaggcgcagcaacaaagaccaatacctcagtccggagatccagccgacgcaacaagatgctccatctgtcaaaaaaccggagaggtgctccatgaagtgagtaatggttccgttgtgcacaggctctgttctgactcctgtttctctaagtttagggcaaataagggcttgaagactaattgttgcgaccagtgcggtgcctacatctatacaaagactggttcacctggtcctgagctgctctttcacgagggccaacagaagagattttgcaacacgacttgtttgggggcttataagaagaaaaacacgcgcgtgtacccatgtgtctggtgcaagactctctgtaaaaactttgaaatgctctcacatgtggatcgaaacggaaaaacaagcttattttgctccctctgttgtacaacaagttataaggtcaaacaggcaggccttaccgggcccccccgcccctgcagtttttgccgaaggtccttgtctgacccttgttattataataaggttgacagaaccgtgtaccaattctgttcccccagctgttggacaaaattccagagaacatcccccgagggaggcatccacctgtcatgccactactgccattctctattttctgggaagccagaggtcctcgattggcaagatcaggtttttcagttctgttgtcgcgactgctgtgaagatttcaagaggttaaggggtgtggtgtcacagtgtgaacattgtcgccaagaaaaattgttgcacgagaagctgcggttttccggggtggagaaaagcttttgtagcgaggggtgcgtcctgctctacaagcaggactttacgaagaaactgggcctttgttgcatcacctgcacgtactgctctcagacctgtcagcggggtgtaacggagcagctggatggaagcacgtgggacttctgctcagaggattgtaagtcaaaatacctcctatggtattgtaaagctgccagatgccacgcatgcaagaggcagggcaagctactagagactattcattggaggggacaaatccgccatttttgtaaccagcagtgcctactgcggttctattcacagcagaatcagcctaatctggatacccagagcggacctgagagccttctcaatagtcagagccctgagtccaagccacagaccccttcccagaccaaggtggagaactccaatacagttcggacacctgaagagaacggcaatctagggaaaatccctgtaaaaacccgcagtgcgccaaccgctcctacccctcctccccccccccctccggcaacacctagaaaaaataaagcggctatgtgtaaacccctcatgcagaataggggggtgtcctgcaaggtggaaatgaagtcgaagggatcacaaacagaagagtggaaaccccaagttatcgtgctgccaattccagtgcccatcttcgtgcccgtccctatgcacctgtactgccagaaggtaccagtacccttctcaatgccaatccccgtgccagtgccaatgttcctgccaactactctggaatccactgataagatcgtggagaccattgaggagctgaaggtgaagattcctagtaatccactcgaggccgatattcttgctatggctgagatgatagccgaagcggaggaactggataaagctagttccgatctgtgtgatctggtgtccaaccagagcgccgagggcctgctggaagattgcgacctgtttggaccagccagagacgacgtgctcgccatggctgttaaaatggccaacgtgttggacgagcccgggcaagacctcgaagccgactttcctaaaaatccgttggacattaacccatctgtggatttcctgttcgattgcggcctcgtgggtcccgaggacgtgagcactgaacaggatctgccccgcacgatgcggaagggacaaaaacgattggtgctgtccgagtcatgctctagagactcgatgagctcacaaccgagctgtaccggcctcaactactcatatggtgtgaacgcatggaagtgctgggttcaaagtaaatacgcaaacggcgagacttctaaaggggacgagctgcggttcggacccaaacccatgcgaatcaaggaggatatactggcctgcagcgccgccgaattaaattatggcctggctcagtttgtgcgagagattactcgtcctaatggtgaaagatatgaaccagacagtatatattatctgtgccttggtattcaacaatatctgctggaaaacaatagaatggtcaatattttcactgacctttattatctgacgtttgtgcaggagctgaataagtctctgtcaacatggcagcccaccctcctacctaacaacacggtcttttcgcgggtggaggaagagcatctctgggaatgtaagcagctgggggtttactctcctttcgttctgttgaataccctgatgttcttcaacaccaaattctttggtcttcaaaccgctgaggagcacatgcagctgagttttaccaacgttgtcagacagtctagaaaatgtactactccccgagggaccaccaaagtagtgagtattaggtactacgctcccgtcagacagaggaaggggcgagacacaggcccaggtaaaagaaagagagaagacgaggctcctatcctggaacagcgagagaatcggatgaatcctctgcgctgcccagtgaaattttacgagttttacctgagtaaatgccctgagtctttgaggacaaggaatgatgtattttatttgcagcccgagaggtcttgtatagccgaatcacctctttggtactccgtcatccccatggaccgctcgatgctcgagtccatgctaaaccggatcctggctgtcagggaaatctatgaagagctcgggaggccaggagaagaggacctcgattag

SEQ ID NO: 141750 - DNA, 1050 bp, synthetic construct
  misc_feature 1..1050: note = Description of Artificial Sequence: Synthetic coding sequence
  source 1..1050: mol_type = other DNA
atggacccgtcggattttccctccccattcgatccgctgacactgccagaaaagcctctggcaggagaccttcctgtagacatggagtttggcgaagacttgcttgagtctcagacggccccgacacggggatgggctcctccaggcccatctccatcatccggtgcactcgaccttttggataccccggctggtcttgaaaaggaccccggggtccttgatggagccactgagctgctcgggctggggggtctgttgtacaaggcaccctccccccccgaagtggatcatggccccgaaggcacgctggcttgggacgccggagatcagacactggagcctggtccaggcggccaaacacctgaagttgtaccccccgatcccggtgccggtgcgaattcctgttccccggagggcctgttagaaccacttgcaccagattcgcctattacattgcaaagccctcatattgaggaggaagagaccacgtcaatcgcaacagccaggcggggatcccctgggcaggaggaggagctgccccagggacagccccagagtccaaacgccccccccagccccagtgttggcgaaaccctcggagatggaatcaactcctcccagactaagccagggggtagctctcctccagcccaccctagcctgccgggagacgggctcacagccaaagccagcgagaaacctcctgagcgggtacaaaagcgttcagagagagttagacgcgcagagccccccaagcccgaagtcgtcgatagcacagagagtcgccgctccggcaccccacgtacccgactctggcgaagactcgtccttgaggcgccgagcatgagctctgctcacccgtctgtctcaccgtgtatgcgcccttctagctcagcgagatcaccaagcctcgggatcccacctacccttctcgccgctgcatacgccagacgcctagaacgatcctgcaccagaagcgccatggctgcctggtatactggttccgccgcgatcctggcctcacctaactcaggacccacacgagattag

SEQ ID NO: 141751 - DNA, 1488 bp, synthetic construct
  misc_feature 1..1488: note = Description of Artificial Sequence: Synthetic coding sequence
  source 1..1488: mol_type = other DNA
atggacccctctgactttcctagccccttcgaccccctgacgcttcccgagaaacccctggccggggacctgcctgtggatatggagtttggcgaagacttgctggagagccagacagcacccacacgaggctgggcgccacctggaccctcgccttccagtggcgccttggatctgttggatacacctgcaggtttggaaaaagacccaggagttttagatggagccactgagctgctcggactcggcggcctgctgtacaaggctccttcgcctcctgaggtggatcatggccccgaaggtacactggcatgggatgccggcgaccaaactttagagcctgggcccggcggacagactcctgaggtcgtaccgccagaccccggagctggagctaattcctgctcacctgaagggctgctggaaccattggccccagacagtccaataaccctgcaatctcctcatatagaggaggaggagaccacttctattgccaccgcaagacgcggatcccctgggcaagaggaagaactgccccagggccagccccagtcccctaatgcccctccgagcccatcagtgggtgagaccttgggggatgggatcaacagtagccaaaccaagcccggcggatccagcccccccgcccacccttcgctgcccggggatggactcactgctaaggccagtgagaaaccccctgagcgaaaaagatcagaaagagttcgccgagctgaacctccaaaacctgaggtcgtggattccactgagtctatacccgtgtctgacgaggactccgatgccatggttgatgaccctaacgacgaggacttcgtgccatttcgcccccggagaagcccccgcatgagcctgaggagttccgtgagccagcgcgcaggacgctcagcagttggaacaaaaatgacctgcgcccattgcaggacacctctgcagaaagggcaaaccgcttaccagagaaaggggctacctcagttattttgctcttcaagctgtttgaccacattttctaagaagcctagtggaaaaaaaacatgcacgttttgtaaaaaggaaatctggaacactaaggattcagtcgtagcccaaacaggatcgggtgggagttttcatgagttctgtacttctgtgtgtctgagtctgtacgaggcccagcagcagcgccccataccccagtccggggaccccgccgacgctacgcgatgctccatatgccagaagacgggtgaagttctgcacgaagtcagcaacggatcagttgtgcaccggctgtgcagcgactcttgtttctccaagttccgggccaacaagggcctaaaaacgaattgctgtgaccagtgcggtgcttacatctacactaaaactggttcaccagggcccgaactcctatttcatgagggacagcagaagcgcttttgcaacaccacatgccttggtgcttacaaaaaggtggggccccgggaatag

SEQ ID NO: 141752 - DNA, 1494 bp, synthetic construct
  misc_feature 1..1494: note = Description of Artificial Sequence: Synthetic coding sequence
  source 1..1494: mol_type = other DNA
atggacccgagtgattttccatccccgtttgatcctcttacactccccgaaaagcctctcgctggtgacctgccggtggacatggaatttggcgaggatcttctcgaatctcagaccgcaccaaccagaggctgggccccccctggtccttccccatcaagtggagctctcgatctgctggacacgccggccgggctggagaaagaccctggagtcctagatggcgctaccgagctgctcggactcggcggactactgtacaaagcaccaagtcctccagaagtggatcatggtccagaaggcacactcgcgtgggacgcgggggatcagacactggaaccaggacctggaggccagactcctgaggtggtacctccagatcctggtgcaggagcaaattcctgctctccggaaggcctgctagagccactggctcctgattcaccgatcacactgcagagcccccacattgaggaagaggagacgacatccatcgccaccgcaagacggggctcaccaggacaggaagaagaacttccacagggccaaccacagtcccccaatgcgccacccagcccatcagtcggtgagactctcggagacggcattaactcttcacagaccaagcctggagggagcagcccccccgcccatcctagcctgccaggcgatggtctgactgctaaagctagtgaaaagccacctgagcgcgtccagaagcgttcggaacgagtgcgccgggccgaaccgcctaaacccgaggtcgtggactccaccgaaagtattccagtttctgatgaagatagcgacgccatggtcgacgatcccaatgacgaagatttcgttccctttcggccccgcaggagcccccgtatgtccctccgctcttccgtgtcccagcgtgctggacggagtgcagtcgggacaaaaatgacctgcgcccactgccgcacaccattacagaaaggtcagaccgcgtaccagcgcaagggacttccacagctgttctgctcctcctcttgtttgaccacattctcgaaaaagccctccggcaaaaagacctgcacattttgcaaaaaggagatctggaacactaaagactctgttgtcgcacagacaggatcaggtggctcctttcacgagttctgcacaagcgtgtgcctcagcttgtacgaggcccaacagcagcgacctatcccccaatcaggagaccctgccgacgcaacccggtgctctatttgccagaaaaccggggaggttctacacgaggtgagcaacggctcggttgtccaccggctctgtagcgatagctgtttttccaaattccgggctaacaagggcctcaagaccaattgctgtgatcagtgcggtgcctatatctacacaaaaaccgggtctcctggacccgagttgctgttccatgaaggccagcaaaagcggttctgcaataccacctgtcttggtgcatacaagaaagtaggtccacgagaatag

SEQ ID NO: 141753 - DNA, 3843 bp, synthetic construct
  misc_feature 1..3843: note = Description of Artificial Sequence: Synthetic coding sequence
  source 1..3843: mol_type = other DNA
atggatcctagtgactttccctccccgttcgatcctctgaccttgcccgaaaaaccattggccggcgacttgcctgtggacatggagttcggagaagatttgctggagagtcagacggcacccacccgcgggtgggccccccctggtccatcacccagttccggcgctctggacctgctggatacccccgctgggctagagaaagacccgggtgtgctagacggcgccaccgagctgctggggctgggaggattgctgtacaaggctccatccccaccagaggtggatcatgggccagagggaactctggcctgggacgccggggaccaaacgttagaacctgggcctgggggccagaccccagaggtggtaccccccgacccgggcgccggtgcaaactcatgcagccctgagggtctgctggaacccttggcacctgattccccaatcaccctgcagtctccccatatcgaagaagaggagactaccagcattgcgacagcacgaagggggtccccaggccaggaggaggaactaccacagggccaacctcagtctccaaatgccccaccctcacccagcgtgggtgaaaccttaggcgatggaatcaacagttcccaaactaagcctggcggatcttccccccctgcccatccgtccctgccgggcgatggacttaccgcaaaagcaagcgagaaaccccctgagagggtccagaagagaagtgaacgcgtcaggagagcagagccacctaagccagaggttgtggatagcacagaatcaattcctgtgtctgacgaggactcagacgctatggttgatgatccgaacgacgaggacttcgtgcctttccgtcccaggaggagccctcgtatgagcctccgctcttccgtgagccagcgggctgggaggagcgcagtgggaaccaagatgacatgcgcacactgtagaaccccgttgcagaagggccaaacagcctatcaaaggaaagggctgccccaactcttctgttcttctagctgccttactacatttagtaagaagccctccggaaagaaaacctgcacgttctgtaagaaggagatctggaacaccaaagactctgtcgtggcccagacggggtccggcggctcattccatgagttctgcacatccgtatgcctgtccctctacgaggcgcagcagcagagacccataccccagagcggggaccctgctgacgccacccgctgcagcatttgccagaagaccggggaagttctacacgaggtgagtaatggatcagtcgtgcacagactttgcagtgactcttgcttttcaaaatttcgcgccaataagggcttaaagactaactgttgtgaccagtgtggagcgtacatttacaccaagacggggtctccaggtcccgaactgttattccacgagggccagcagaagcgtttttgtaacactacctgcctgggggcatacaagaagaaaaacactcgggtgtatccttgcgtctggtgcaaaacactgtgcaagaacttcgagatgctgagccacgtggatcgtaacgggaaaacctccctgttctgttccctgtgttgcaccacaagctacaaggtgaagcaagccggcctgaccggtccaccccgcccatgtagtttctgtcgacgcagcctttctgatccttgctattataacaaggtcgatcggaccgtctaccagttttgcagcccaagctgctggacaaagtttcagcggacttcccctgagggcggcatccacttgtcttgtcactactgtcacagcctcttctcaggcaaacccgaggtattggactggcaggaccaggtctttcagttctgctgcagggactgctgcgaggactttaaacgtctcaggggagtggttagtcagtgcgagcactgccggcaggaaaagctgttacatgagaagcttagatttagtggagtcgaaaagtcgttttgttcggagggttgcgtgctactgtataaacaggattttacaaaaaagttgggcctctgttgcatcacttgcacctattgttctcagacctgtcagcggggcgttacagaacagcttgatggttctacgtgggacttttgtagcgaggattgtaagagcaaatacttactatggtactgcaaagcggccaggtgccatgcttgtaaaagacagggcaaacttctggagacgattcattggcggggccagatcagacacttctgcaatcagcagtgcctactcagattttattcccagcagaaccagcctaatctggatacacaatctggccccgagtctttactaaattcccagtccccggagagcaagccgcagaccccatcacagacgaaggtagaaaactccaacacagtgcgaacccccgaggagaatgggaatttgggcaaaattcccgtgaaaactcggtccgctcccaccgctcccacccccccaccaccccccccgcccgcaacccctagaaagaataaggccgccatgtgcaagccactgatgcagaacaggggcgtatcttgcaaagtggagatgaagtcgaagggttctcagaccgaagaatggaagccacaggtcattgtgttgcccattcctgtaccaatcttcgttcctgttcccatgcatctgtactgccagaaagtacccgttccattttccatgccaatccctgtccccgtacccatgttccttcctactacactggagtccacagacaagatagtggagacaatcgaagagctgaaggtgaaaattccctctaatcccctagaggcagacattctagcaatggctgagatgattgctgaggccgaggaactagataaagccagcagcgatttgtgcgacctcgtgtccaaccagtccgcagagggactgcttgaagactgtgacctcttcggccctgcacgagacgatgtgctggccatggctgtcaagatggccaatgtcctggatgaaccaggccaagacctggaggcagacttcccaaagaatcccctcgatattaatcccagcgtagacttcctgttcgattgtggcctggtggggcctgaagacgtgagcactgagcaggatttaccccggacgatgaggaagggacagaaacggcttgtgttatccgagagttgttccagggatagcatgagttcccagcccagctgtacaggcctgaactactcatatggtgtgaatgcttggaagtgctgggtgcagagcaagtatgccaacggcgaaaccagtaaagcaaagccgatgcggattaaggaggatatcctagcctgctctgccgcagagttgaactatggactcgcacagtttgtgagggagatcacgcgcccaaacggggagcgatacgagcccgacagcatatactatttgtgcctcggtatccagcaatacttactcgagaacaataggatggtaaatatcttcacagacctgtactacctgacatttgtgcaggagctgaataagtcattgtctacctggcagcctaccttgctacccaataacactgggcctggaaagcggaaacgcgaagacgaggccccgatcctcgaacagagggagaaccgaatgaatcctttgcgttgccctgtcaaattctacgagttttacctctccaaatgtccggaaagcctgagaaccagaaacgatgttttctatttgcaacctgagcggtcttgtatcgcggaatcccccctgtggtattcagtgataccaatggatcgctccatgttggagagtatgttgaaccggattttggctgtaagagaaatttacgaggagcttggtcggcccggggaagaggacctggattag

SEQ ID NO: 141754 - DNA, 4119 bp, synthetic construct
  misc_feature 1..4119: note = Description of Artificial Sequence: Synthetic coding sequence
  source 1..4119: mol_type = other DNA
atggaccccagcgatttcccatccccttttgatcccttaacgttgccagaaaaacccttggcgggggatctgccagtcgatatggagttcggtgaggatctccttgagtctcagactgcccccacccgtggctgggcgcccccagggccatccccaagtagcggtgctttggaccttctggatacacctgctggtctggagaaagacccgggcgtcctagacggcgccaccgagcttctgggcctgggcgggttgctatataaggccccttccccccctgaagtggatcatggtccagagggcacactggcttgggacgcaggcgatcaaaccctggagccaggtcctggaggacagactccggaggtagttcccccggatccgggcgctggcgccaactcgtgctcaccagagggactcctggaacccttagcgccagacagtcctatcacactccagtccccacacattgaggaagaggagactactagcattgctacagcgcgccgcggctcccctggtcaggaagaggaactgccccagggccaacctcagtcaccaaacgccccgcctagcccctctgttggcgaaacacttggcgacggcatcaattcatcacagacgaagcctggcggctcttcgccacctgcacatccaagcctaccaggcgacggcctgacggccaaggcctccgaaaagcccccagaacgtgtccagaaacgctcagagcgggtgagacgggcagagccacctaaaccagaggtggtcgattccaccgagtcaatccccgttagcgacgaagacagtgacgctatggtggacgatcctaatgacgaggactttgtcccctttcggccaaggagatccccacggatgtctctgaggagcagcgtctcccaacgagccggaagatcagctgtcggcaccaaaatgacctgcgctcactgccggaccccattgcaaaagggacagacagcttaccagcgaaaaggccttccacagcttttctgctccagtagctgtctgaccactttttccaaaaaaccatctggaaagaagacttgtactttctgtaagaaggagatttggaacaccaaggacagtgttgtggcccagaccggcagtgggggcagctttcacgagttctgtacatctgtttgtctgtccttgtatgaggcgcagcagcaacgtcccatcccacaatcgggagacccagcagatgctacccggtgtagcatctgccaaaagacgggcgaggtgctgcacgaagtcagtaacggatcagtggtccaccgactgtgctccgactcctgcttttcgaagttcagggctaacaagggtctgaagactaactgctgtgatcaatgtggtgcatatatatacactaaaactggctcccccggtccagagctcctgtttcacgaagggcagcagaaacgattctgcaacacaacctgccttggggcttacaaaaaaaagaacacgagggtttacccctgcgtatggtgcaaaaccctgtgcaaaaactttgaaatgcttagccacgtcgacaggaatggcaagacctccctgttctgcagcctgtgttgcacgacctcctataaggtgaagcaggccggcctgactggaccccccaggccatgttcattctgtcgcagaagcctctcagatccatgctattataacaaggttgaccggactgtttatcagttttgttcgcctagttgttggacgaagtttcaacgtactagtcccgagggaggaatccacctgtcgtgccattactgtcattcattgttttccggcaaacctgaggtgctggactggcaagatcaggttttccaattttgttgcagagactgctgtgaagatttcaaacgcctgcggggagtagtcagtcagtgcgagcattgccgccaggagaaactgcttcacgaaaagttgcgatttagtggtgtcgagaagagcttctgctctgaaggatgtgtgttactctacaaacaggatttcacgaaaaagctgggcttgtgttgcatcacctgtacctattgtagccagacatgccagagaggtgtcaccgaacagctggatgggtctacctgggacttctgtagcgaagattgtaaatcgaaatacctgctgtggtactgtaaggctgccagatgccacgcttgcaagaggcaggggaaactactcgagacaatccactggcgggggcagatccggcatttctgtaatcaacagtgtttgctgagattctactcccaacagaatcaacccaatctggacacccagtctggtcccgagtctctactaaattcacagtctccagaatccaagccccaaaccccgagtcagacaaaggtcgagaactcgaacactgtgagaacccccgaagagaatggcaatctgggaaagatacctgtgaagaccagatctgcaccaaccgcccccacacctccaccgccaccacctcccgctacaccccggaagaacaaagccgctatgtgcaaacctctcatgcaaaatcgaggcgtatcctgcaaggtcgagatgaaaagcaaggggtctcaaaccgaagagtggaagcctcaggttatagttctcccaatccccgtaccgattttcgtgcccgtgcctatgcatttgtattgccagaaagtgccagtgcccttctcgatgcccatccctgtccccgttcctatgttcttgccaactactctagaaagtacagacaagatcgtagagacaatcgaagaactcaaagttaagatccctagcaatccattggaggctgacattttggcaatggccgagatgatcgccgaagcggaggagctggacaaggcctcatccgacttgtgtgatctggtgtctaaccagtccgccgaagggctcctggaggactgcgacctgttcgggccagcacgtgatgatgtgttagccatggcagtgaaaatggcaaacgtcttggatgagccgggccaggatctggaggctgactttcctaagaatccactggatatcaacccttctgtggatttcctcttcgattgtggccttgtaggtcctgaagacgtaagtaccgagcaggatttgcctcgcacgatgaggaagggacagaagcgattggtacttagtgagtcatgctctagggatagcatgtcctcccaaccctcgtgtaccggactgaactattcctacggagttaatgcctggaaatgctgggtccaatccaaatacgccaatggagagaccagcaagggagatgagcttagatttggcccaaagcccatgcgaatcaaagaagatatcctggcatgcagcgcggcggaactgaattacggacttgctcagttcgttagagaaattaccaggccgaatggtgagaggtatgaacccgattcgatttattatctctgtttagggatccagcagtacctgctagaaaataatagaatggtcaacattttcactgacctgtactatctaacatttgtgcaggaactaaacaagtcgttgtctacctggcaacccaccctgctccccaacaataccgtgttctctcgggtggaggaagagcacctgtgggaatgtaagcaactgggtgtttatagccctttcgtgctcctaaacacccttatgttcttcaatacaaagttcttcggccttcaaactgccgaagagcatatgcagctgtcattcactaacgtagtccgtcaaagtaggaaatgtaccaccccacgagggaccactaaggtggtgtccatacgctactacgctcctgtgcgccagcgcaaaggccgggataccggcccaggaaagagaaagagagaagacgaggcgccaatccttgagcagcgggagaatagaatgaacccgctgagatgtcccgtgaaattttatgagttctatctctctaagtgccccgaaagcctccgcacaaggaacgatgtgttctatctgcagccagaaagatcttgcatcgcagagagtccactgtggtatagtgtgattcccatggacagatcaatgctggaatccatgctgaatcgtatcttggctgttcgagagatctatgaagagttggggaggcccggtgaggaagatctggactag

SEQ ID NO: 141755 - DNA, 4077 bp, synthetic construct
  misc_feature 1..4077: note = Description of Artificial Sequence: Synthetic coding sequence
  source 1..4077: mol_type = other DNA
atggaccccagcgacttcccttctccgtttgatcccctgactcttccggagaaacctctggctggcgatctgcctgtagatatggaattcggtgaagatttgttggagtcccagacagctccaactcgcgggtgggctccaccaggcccgtctccaagttccggcgccctcgacctgctggacacacctgctggactcgaaaaagacccaggcgtactggacggagccacagaactcttaggattaggaggcctgctgtacaaagcccctagcccgccagaggttgaccacggtcctgagggcactttggcctgggatgccggcgaccagaccctggagccagggcccggcgggcagacccccgaggtcgtacctcctgaccctggcgctggagctaactcctgttcccccgagggcctgctggagccactggctcctgatagcccgataacacttcaatccccacacatcgaggaggaggaaactacctcgattgcaacagccagaaggggcagtcccgggcaggaggaagaactgccacaggggcagcctcaatctcccaatgcaccaccttctccttcagtgggcgagacgcttggggatggaattaactcatctcagactaaaccaggaggctcttctccacccgctcatccgagcctccccggggatggcttaaccgccaaggccagcgagaaaccacctgaacggaaaaggagtgaaagagtgcgacgggccgagccccccaaacccgaagtagtggactctactgagagcattcctgtgtcggatgaagatagtgatgcgatggtggatgatccgaacgacgaggacttcgttcctttccgcccacgcaggtcaccgaggatgtcccttcgctcttctgtgtcacagcgcgccggcagaagtgcagtcggcacaaagatgacctgcgcacactgtaggactcccttgcagaagggacagacagcctaccaacggaaggggcttccacagctcttctgttcttcctcttgtctgaccactttttccaagaaaccctctggaaaaaagacctgtacgttttgtaaaaaggagatctggaacacaaaagactccgttgtggctcaaaccggcagcggtggaagttttcatgaattctgcaccagcgtgtgcctgtccctgtatgaggcacaacagcaaagaccaattccacagtcaggcgatcctgcagatgccacacgttgttctatctgccaaaaaacaggggaggtgctccatgaggtaagcaatggctcggtggttcatcgtctgtgcagcgacagttgctttagcaagtttcgggctaacaaggggctcaagaccaactgttgtgatcagtgcggcgcatatatttacactaagacaggatctcccggccctgagctgttgttccacgagggacagcagaaaagattctgcaacaccacctgtctgggggcatataaaaagaaaaacacccgggtctacccctgcgtatggtgcaaaactctctgcaagaattttgaaatgttgagccatgtcgaccggaacggaaaaacaagtcttttctgctcactgtgttgcaccactagctataaagtcaagcaggccgggctcacagggcctccacggccatgtagcttctgcaggcgctccctctccgacccctgctactataataaggtggatcggaccgtgtaccaattctgttccccatcttgttggaccaagtttcagaggacttctcccgaaggagggatccacttatcatgtcactactgccactctctcttttccggaaaaccagaagtcctggactggcaggaccaggttttccagttctgctgcagagactgttgcgaggatttcaagcggctgcggggagtcgtcagtcagtgcgaacattgccgtcaggaaaagttactgcatgagaaacttcgcttctccggcgtcgaaaagtcattctgcagcgagggttgcgtgctgctctacaaacaggacttcacaaaaaagctgggactctgctgtatcacctgtacctattgtagtcagacatgtcaacggggcgtgaccgagcaactggatggcagtacatgggacttttgttccgaggactgcaaatccaagtatctgctctggtattgcaaggcagctagatgtcatgcctgtaagcgccaggggaaattactggaaaccattcactggcgcgggcagatccggcatttctgcaaccaacaatgcctgctgcgcttttacagtcaacagaatcagcctaacctggacacgcagagcggccctgaaagtcttctaaatagtcagtcccctgaatcaaagccccagaccccttcccaaactaaagtcgagaactctaatactatccccgtcaaaaccaggtctgcacctacggcccccaccccacccccaccaccccctcccgcaactcctcgcaagaataaggccgccatgtgcaaacccttaatgcagaatcgcggtgtttcctgcaaggtggagatgaaaagtaagggtagccaaacagaggaatggaagcctcaggtgattgtcctgcctatcccggtgccaatcttcgtccccgtgccaatgcacctgtactgccagaaggtgcccgtgcccttttcgatgcctattcctgtccccgtgcctatgttcctgccaaccacgttagagagtactgacaaaatcgtggagaccattgaagagctcaaggtgaagattccatctaatccccttgaggcggatatactggccatggctgagatgatagccgaagcggaggagctggacaaggcctcctctgacttatgcgacctggtttccaatcagagcgctgaaggactgctcgaggactgtgatttgttcgggcccgccagggacgatgtgcttgccatggcagtgaagatggcaaatgtgctcgatgaacctggacaggatctggaagctgattttccgaaaaatccccttgatataaacccatctgtcgacttcctcttcgattgtggactggtgggacctgaagatgttagcaccgaacaggacctgcctcgcaccatgcgtaagggccagaaacgtctcgtgctctcggaatcgtgctcacgcgactcaatgtccagccaaccgtcatgcaccggactcaattactcttacggggtaaacgcttggaaatgctgggtgcagtcaaagtacgccaacggcgaaacatcgaagggtgacgaattacgatttggccctaagcccatgcggatcaaagaggacattcttgcttgctcagccgccgagctcaactatggcctggcccagttcgtgcgggaaattacccggcctaacggagaacggtacgagcctgacagcatctactacctttgtctggggatccagcaatatctgcttgagaataacagaatggtgaatatttttaccgatctgtattatctgacctttgttcaggagctaaataaatcactgtctacctggcagccaactttgctcccaaacaacaccgtgttctcaagagtagaggaagagcatttgtgggagtgtaaacaactaggagtgtacagtcctttcgtgctcctgaacaccctgatgttttttaatacaaaattttttggcctgcagaccgctgaggagcacatgcagttgagctttaccaatgtcgttaggcagtcacgaaagtgcactactcccaggggaacaacaaaagtcgtttcaatcaggtattacgccccagtgcgccagcgcaagggaagagataccggtccaggtaagagaaagagagaagatgaggccccaatactggaacagagagaaaaccggatgaaccccctgaggtgtcccgtcaaattctatgaattctacctcagtaagtgtccggaatcactaagaacacgaaatgatgtcttttacctgcagcccgagaggagttgtatcgcagaaagccctctctggtacagcgtgatccccatggaccgttcaatgctggagtcgatgctgaacagaatacttgctgtgagggaaatatacgaggagcttggccgtccaggcgaggaggatttggactag

SEQ ID NO: 141756 - DNA, 2112 bp, synthetic construct
  misc_feature 1..2112: note = Description of Artificial Sequence: Synthetic coding sequence
  source 1..2112: mol_type = other DNA
atggaattcgttagtggctaccgggacgagttcctggacttcacagccctcctgtttggttggtttcgaaaattcgtcgcagaacggggagctgtgggtactagcttggaaggtcgatgcaggcaactggaagctcaaatcagacgactcccacaggatcctgccctgtgggtcctccatgtgctgcccaaccactctgttggcatttccttgggccaaggcgccgaacctggtcctggacctgggctaggcaccgcatggcttctcggcgacaatccccccctgcacttgagggatctgagtccgtatatcagctttgtgtccctggaggatggagaggaaggggaggaggaggaagaggaggatgaggaagaagagaagcgcgaggatgggggagccggaagcacagaaaaagtcgagccagaagaagatcgggagctcgcccccacgtctcgggagtccccacaggaaaccaaccctcctggagaatctgaggaggccgctcgagaagctggaggtgggaaggatggctgtcgggaagatcgagtagagaacgaaactaggcctcagaagaggaaaggccagcgcagtgaggccgctccgctgcatgtgtcctgtctacttctggttacggacgaacatgggacaatcctggggatcgacctgctagttgatggcgctcaaggtactgcttcatgggggagtggaacgaaggatctggcaccctgggcctacgccctgctgtgccattctatggcatgccccatgggctccggagatcccaggaaacctcgtcagctgaccgtcggggacgcccgtttgcaccgggaactggagagcctggtaccccgcttgggtgtcaagctggccaagacccccatgagaacgtggggacccaggcctgggtttactttcgcttcgctgcgtgccaggacatgtcatgtatgccatcggcactcttttgaggcaaaactgacaccctgtccccagtgtagcgcagtgctgtactgcggggaagcatgtctgagagcagactggcaaaggtgtcccgatgacgtgagccataggttctggtgcccgcggcttgccgcctttatggaacgggcgggggagctggctacactcccttttacgtatacagctgaggtaacatctgaaactttcaacaaggaggcattcctggcttcccgcgggctgacccgcggatactggactcagctcagcatgttgatccctggccctgggttcagccgccaccccaggggaaatacgcccagcctttccctactcaggggcggcgatccctaccagttgctgcagggggacgggacagctctgatgccaccggtcccccctcacccgcccagaggggtgtttgttcctgagctaaacatccagaacaaacagagcctaaaaattcacgtcgtagaggcaggtaaggagttcgacctcgtcatggttttctgggagttgctggtgctgctgccacacgtggcgctcgaactgcagttcgtgggggatggtctgccccctgaatcagatgaacagcatttcacgcttcagcgggactctctggaagtttctgttagacctgggagcggaatctccgctcgcccgtcatcaggcaccaaggaaaaaggcggtaggcgggatctccagattaaggtctccgcaaggccttatcatctttttcaaggtccgaagcctgacctggtcattggttttaattcaggctttgcactgaaagacacttggttgcggtccttgcctcgcctgcagtctcttcgcgtgcccgccttctttactgagtcttctgaatactcttgcgttatggatggacagaccatggctgtggccacaggaggcggtacaagccctccccaacccaacccatttcgaagcccgttccgtctacgcgccgctgacaactgcatgagttggtactgcaacgccttcatctttcatctggtgtataagccggcacagggcagcggagcaaggcctgctccgggtccccctcctccctccccgactccctctgccccgcctgctcctaccagacgtcgcaggggtgaaaagaagcctggccgcggcgcaaggaggagaaaatag

SEQ ID NO: 141757 - DNA, 2229 bp, synthetic construct
  misc_feature 1..2229: note = Description of Artificial Sequence: Synthetic coding sequence
  source 1..2229: mol_type = other DNA
atggagttcgtatccggatatagagacgagtttcttgatttcactgctctgctcttcggatggttccggaagttcgtggcagagagaggagccgtcgggacaagcctggaaggacggtgcaggcagctcgaggcacagattcgccgattgccccaggacccagccctgtgggtcttgcacgtgctacccaaccattcggtgggaatttcactgggccagggtgcagaaccaggtcccggacctggactgggcacagcctggcttctgggcgacaatccaccccttcaccttcgggacctgtcgccctacatctccttcgtgtctttagaagatggggaggaaggagaggaagaagaagaggaagatgaggaggaggagaaacgagaggacggaggtgccgggtctaccgagaaagtagagccagaagaggatagagagttggcccccacttcgcgggaatcaccacaagagacaaacccccccggggagtcagaagaagcggcgagagaggccggcggaggcaaggacgggtgccgggaggacagggtagaaaacgaaaccagaccacaaaaacgcaaagggcagcggagcgaagctgcccccttgcacgtatcctgcctgctcctggtgaccgatgagcacgggaccattctcggaattgatctgctggtcgacggcgctcagggtactgcaagttggggcagcgggacaaaggatctggctccatgggcatatgccctgctgtgccattctatggcttgtcctatgggatccggcgacccccgcaagccgaggcagttaactgtgggcgatgcccgcctccaccgggagttggagtctctcgtgcctcgacttggcgtaaagctcgcgaaaacccccatgaggacatggggaccaaggcctggattcacgttcgcctccttacgggcccggacctgccatgtgtgtcaccgccactcctttgaagccaagctcacgccatgcccccagtgctccgccgttctatactgcggagaagcctgcctcagggcagattggcagcgttgccctgacgacgtatcacaccgcttctggtgtcctagactggctgctttcatggaacgggctggcgagcttgctacactcccgtttacatataccgccgaggtcaccagcgagacttttaacaaggaggccttcctggcctctcgcggactcactcgtggttattggacacaactttctatgttaatccccggccctggttttagcagacacccaaggggaaacactccgtccttgtccctgcttcgcgggggagatccctaccagcttctgcagggcgacggtactgccctcatgcctccagtacccccacatccgccccgtggggtctttggttcatggcaggactattatacttggcgaggtctgtctctggatagccctatcgcggtgctgttaacctatcccctcacggtgtactacgtgattactcatctggtccctcaaagcttccctgaactgaacatacagaacaaacagagtttaaagatccacgtagtggaagcaggcaaagaatttgatctggtgatggtgttttgggaactgttggtgttgctcccccatgtcgccctggagctgcagtttgtcggcgatggcctaccaccagaaagcgatgaacagcatttcaccctgcaaagagattctctcgaagtaagcgtgcgaccagggtccgggataagtgccaggccctccagtgggactaaggaaaaaggcggaaggcgtgatttgcaaatcaaagtctcagcacgcccctaccacctatttcaagggcccaagccagatcttgtgatcgggttcaattctgggtttgcccttaaagatacatggctgagaagcctgccccgcctgcagtcactgcgggtgcccgcattttttaccgagagcagcgagtacagctgtgttatggacggtcagaccatggccgtggccactggcggcggcaccagtccaccacagcccaatccttttcgatccccctttaggctgagggccgccgacaattgtatgagttggtattgcaacgccttcatctttcatctcgtgtacaaacctgcccaagggtccggcgctcgtcctgctccagggcctccccccccgtccccgacgccatccgctccccctgcccccacacgtagaagacggggagagaagaagccaggccgcggggcgcgaaggcgtaaatag

SEQ ID NO: 141758 - DNA, 684 bp, synthetic construct
  misc_feature 1..684: note = Description of Artificial Sequence: Synthetic coding sequence
  source 1..684: mol_type = other DNA
atgacagatttcaagctcgggatcgtgagactgggaagggtggctggaaagacaaaatacacgttaatagatgagcaggacatacctctcgtggagtcatacagcttcgaagctcgcatggaggtagatgctgacggaaatggagccaaaatattcgcctacgcttttgacaagaatagagggcggggcagcggcaggcttctccacgagctgctgtgggagaggcacaggggtggcgtggccccgggttttcaggtagttcacctgaacgccgtaacagtggataacaggctcgacaatctgcagttggtgccttgggggtggaggcccaaagccgaggagacaagctcaaagcagagggaacagagtctctactggcttgccatccagcagcttcccaccgatccaattgaggagcagtttccagtgctgaacgtaacccgctattacaacgcaaacggggacgtggtggaggaagaagagaatagttgcacgtactatgagtgccattaccctccctgtaccgtgattgaaaaacagctgagagagttcaatatctgtggccgttgccaggtggcacgttactgcggctcccaatgccaacaaaaggattggcccgcccataagaaacactgtcgggaaaggaagagacccttccagcatgaactggagcccgagaggtag

SEQ ID NO: 141759 - DNA, 2127 bp, synthetic construct
  misc_feature 1..2127: note = Description of Artificial Sequence: Synthetic coding sequence
  source 1..2127: mol_type = other DNA
atgtccgagagaggaatcaaatgggcctgtgagtactgcacatacgaaaactggccatcggcaatcaaatgtactatgtgtagggcacaaaggccatcggggacaattatcaccgaggaccccttcaaatccggatctagcgacgtcggaagggattgggatccgtcaagcaccgaaggagggagtagtccattgatttgtcctgacagcagtgctcgcccccgtgtaaaatcatcctatagcatggaaaatgccaataaatggtcatgtcatatgtgcacatacctgaattggcccagagccatcaggtgtacccagtgcctatcccagagacggacccggagtccaactgagtcacctcagtcttctgggtctgggtctcggccggttgcctttagtgtcgacccatgcgaggaatacaatgataggaacaaacttaataccaggactcagcactggacttgtagtgtctgcacttacgaaaattgggctaaggcaaagagatgcgtggtgtgcgaccatcctcgaccgaacaatatcgaggcgatcgagctggcagagaccgaggaggcctcatccattatcaacgaacaggaccgtgcccgctggagagggtcatgcagctccggtaactcccagcgccgcagtcctccggcgactaagagagattccgaagtgaagatggatttccagagaatcgaactggccggtgcagtcggttcaaaagaagaacttgaggtggacttcaaaaagctcaagcagataaagaataggatgaaaaaaaccgattggctattcctcaatgcttgcgtgggggtagtcgagggcgatcttgcagcaatagaggcttacaaatcttcaggaggcgatattgcccggcagctgactgccgatgaagtcaggctgctgaaccgtccatccgccttcgatgtagggtacacactggttcacctggcgattagattccaacgccaggacatgctggctatcctgctcacagaagtgtcgcagcaggccgccaagtgtattcccgcaatggtatgtccagagctgaccgaacagattaggagggagattgcagccagtttgcaccagcggaaaggcgattttgcctgttacttcttaacggatctggtgactttcacactcccagcagacatcgaagacctacccccgactgtgcaggaaaagctgttcgatgaggtgctggaccgggacgtccagaaggagcttgaagaagaaagtcccatcatcaattggtcattagagctcgctacacggctggattctcgtctctacgctctgtggaaccggactgcaggcgactgcctgctcgactcagtgttgcaggcaacttgggggatatatgacaaggacagcgttttgagaaaggctctccacgattctctgcacgattgctcccactggttttacacaagatggaaggactgggagtcctggtactcacagtcctttggactccatttcagcctcagggaagagcagtggcaggaagactgggcatttattctcagcctggccagccagcccggggccagcctagagcagactcatatctttgttcttgcccatatcctccggcggcccataatcgtgtatggtgtgaagtattataagagctttcgtggcgaaaccctgggctatacccgctttcaaggtgtgtaccttccactgctgtgggagcagtcattctgttggaagtcgccaattgcactaggttataccagagggcatttctccgcgttggtggcgatggagaacgacgggtatggcaacagaggcgctggggcaaatctcaatactgacgatgacgttacaattaccttccttcccctcgtagattcagaacgaaaactcctgcacgtgcatttcctgagcgcgcaagagctgggtaacgaggaacagcaggaaaagttgttgagagagtggctcgactgctgcgtcaccgaagggggtgtccttgtggctatgcaaaagagttcacggcgacggaatcaccctctggtgacccagatggtggaaaaatggcttgacaggtaccgtcaaatccggccttgcactagtctgagcgacggagaggaggacgaggacgatgaggacgaatag

SEQ ID NO: 141760 - DNA, 2400 bp, synthetic construct
  misc_feature 1..2400: note = Description of Artificial Sequence: Synthetic coding sequence
  source 1..2400: mol_type = other DNA
atggagatccccaagctgctgcccgcaagaggaaccctgcagggcggcggcgggggcggaataccagcaggcggggggcgagtgcatcggggtccagacagtcctgcagggcaggtcccaacacgtaggctgctcttgccgagaggtccccaggacggcggccctgggcggagacgggaagaggcatctactgcctccagaggccctgggccaagcttatttgcccctcgaccccatcagccgtcgggagggggcgacgactttttcctggtgttactggaccctgtaggcggcgatgttgaaacagccggtagcggacaggcagccggccctgtgttacgggaagaggctaaggcgggccctgggcttcaaggcgacgaatccggcgccaacccagccgggtgctctgcacagggaccgcactgtcttagcgcagtgccgacccctgccccaatatccgcccctggccccgccgccgcgttcgctgggaccgtcacaatccataaccaggacctcttgctgcggtttgagaacggcgtcctcactcttgccacaccaccgccccacgcttgggaacctggcgccgcaccagcccagcaacctcgatgtctgatcgcccctcaggccggttttcctcaggccgcccaccctggtgactgtcccgaactgaggagcgatctcctgttggcagagcccgctgagcctgccccggccccagcccctcaggaagaggcagaggggcttgcggccgctttggggccgcgaggactgttgggcagcggtccaggcgtggttctgtatctgtgtcccgaagccctgtgtggtcagacgtttgccaagaaacaccaacttaagatgcacctgcttacgcactccagcagtcaaggacagagaccgttcaagtgccccttaggtggttgtggatggactttcactaccagttataagttaaagcggcatctgcaatctcatgacaaactcaggccattcggctgtccggcagagggatgcggaaaatcgttcactaccgtgtataaccttaaagcccatatgaaaggccacgagcaggagaattcatttaagtgcgaagtatgcgaggagagtttccctacacaagccaaactgggggcccaccagcggagtcacttcgaaccagagcgcccataccaatgcgccttctccggatgcaagaagaccttcataactgtgtccgctttattctcccataacagagctcacttccgggagcaggaacttttctcttgtagttttccgggctgcagtaagcaatacgataaggcgtgccgcctcaaaatccatctgcggagccatactggtgagcgaccttttctgtgcgatttcgacgggtgcggatggaacttcacatcaatgagcaagctgctgagacataaacgtaagcacgatgacgatagaagattcatgtgtccagtagaaggttgtgggaaatcttttactagagcagaacatctgaaaggacattctattactcatctcggcacaaaaccgttcgtatgcccggtggcgggttgttgcgctagattttccgctaggagtagcttgtacatccactcaaaaaagcacttgcaggacgttgacacttggaagagccgttgtcccatcagctcttgcaacaagcttttcacctcaaagcattctatgaagacacatatggtaaagcggcataaggtaggccaggatttactggcccagctagaagcggccaactcattgacaccctccagtgaacttacctcccagcgacaaaacgatttgtcagacgcagagattgtgtccctcttctccgacgtgcctgattcaacatccgctgcactgcttgacaccgccttggtgaacagtgggatcctgacaatcgacgtggcctctgtgtcttccaccctggctggccatctgcccgctaacaataataacagtgtgggccaggctgtggacccaccctcccttatggcaacatccgaccctccgcagagcctcgatacaagcctcttctttggaacagccgccaccggcttccaacagagcagtctgaacatggatgaagtgagcagtgtaagcgtgggccccctgggctcgctggatagtctcgcgatgaagaattcctctccagagccacaggctctcacgccgagtagcaaattaactgttgataccgacaccttgacaccaagctctaccctctgcgagaattctgtgagcgagctcctgacacccgcaaaagctgagtggagcgtgcatcccaactcggactttttcgggcaggagggggagacacagtttggtttcccaaacgctgccggaaatcacggcagccaaaaggagcgcaatttaatcacagtgacgggctcctccttcctggtatag

SEQ ID NO: 141761 - DNA, 2412 bp, synthetic construct
  misc_feature 1..2412: note = Description of Artificial Sequence: Synthetic coding sequence
  source 1..2412: mol_type = other DNA
atggaaattccaaaactgttgcctgcacggggcacacttcaaggaggcggcggaggcggaataccagctggcggcgggagggtccaccgcgggccagactcaccagccggtcaggtccctactaggaggttgctgctgttacgcggtccacaggacggaggacccggaagacggcgcgaagaagcaagtacagccagcagaggccccggccctagccttctcgcgccccggactgaccagccgtccggtgggggggggggcggtggagatgattttttccttgtgctgttggatccagttggcggagacgtagaaacggcaggatcaggtcaggctgctggacccgtgcttcgcgaggaggcggaggaggggcctggccttcaagggggggagagcggggctaatcccgcaggacccactgccctgggcccccgatgtctgagcgcggtacccacccccgccccaattagtgcacccggaccagctgccgcctttgctggtacggtgaccattcacaaccaggacctgctcttgcgctttgaaaatggggttctaacccttgccacccccccaccgcacgcctgggaaccaggagcagcccccgctcagcagcccggatgcctgattgctccacaagcaggttttcctcacgctgcccatccaggcgactgtccagagctgccccctgacctgcttttggctgagcccgcagaaccagcgcccgcccctgctccagaagaagaagctgaaggccctgccgcggccctgggaccaagagggccactcgggagcgggccaggggttgtcctgtacctctgtcccgaagctcaatgtggacagacattcgctaagaagcatcaactgaaggtacatctcctgacccactcatcttctcaagggcagaggccatttaaatgtcccctgggcggttgtggatggacttttaccacatcttacaaactgaagagacacctgcaaagtcatgataagctgaggccttttggatgcccggcggaaggctgtggtaagtcgtttactaccgtgtacaatctcaaggctcacatgaaggggcatgaacaggagaacagctttaaatgcgaagtgtgtgaagagagcttcccaactcaggccaagctcagcgctcaccagagatcccactttgaaccggagcggccttaccaatgtgctttcagcggctgcaaaaagacttttatcacagtctccgccctcttttcccacaacagagcacatttccgcgaacaggaactgtttagttgcagcttcccggggtgttctaaacagtacgataaggcttgcaggcttaagatacatcttagatcacatactggagagaggccattcctttgtgactttgacggctgcggatggaactttaccagtatgtcaaaattactgcggcacaagcgcaagcacgatgacgatagacgtttcatgtgccccgtggaagggtgtggtaagtcctttactcgggccgaacacctgaagggacacagcattacgcacctgggaacaaagccgtttgtgtgccccgtggcaggctgttgcgcaagatttagcgccagaagtagcctgtatattcactcaaaaaagcacctacaggatgttgacacctggaaatcgcgctgtcctatcagttcatgtaataaattgttcacctcaaagcactcgatgaagacacacatggtgaagaggcacaaggtcggccaggaccttcttgcacagctggaggccgccaactctctgaccccttccagtgagctgacctcccagcgccaaaacgacctgagcgacgccgaaattgtctcgctattctcagacgttccggattcaaccagcgcagcactcctggataccgcactggtgaatagtggtattctgacaatagatgtagccagtgtctcctctactctggctgggcaccttcccgcgaacaataataattctgtggggcaggccgttgatccgccgtccctcatggccacgtccgatccaccacaatcgttagacacttccctgttctttggaactgcggccaccggctttcagcagtccagcttgaacatggacgaggtaagcagcgtgagtgtggggccgctggggtctctggactccctggccatgaaaaattcatcccccgaaccacaggctttgacaccttcctctaagttgacagtcgataccgacgccttgactcccagttccacgttgtgcgaaaactccgtgtccgagttgttaacacctacaaaggccgagtggaatgtccacccagacagcgacttctttggccaggagggcgaaacccagttcggctttcctaacgctgcaggcaatcatggaagtcagaaagaaaccgacctcattaccgtgactgggagctcgttcctggtgtag

SEQ ID NO: 141762 - DNA, 2622 bp, synthetic construct
  misc_feature 1..2622: note = Description of Artificial Sequence: Synthetic coding sequence
  source 1..2622: mol_type = other DNA
atggcttccagacgcaaaagtacgactccatgtatggttctggccagcgagcaggacccagatctcgagctgattagcgacctagatgaagggccacctgtgctcaccccggttgaaaatacaagagcagagagtatatcctctgacgaggaggtccatgaaagcgtagatagtgacaatcagcaaaacaagaaagtggaaggcgggtatgagtgcaaatactgtacctttcaaacaccagatcttaacatgtttacatttcacgtcgactctgaacacccaaacgttgtattaaactcctcgtacgtgtgcgtcgagtgcaactttctcacaaaaagatacgacgcgctgtctgagcacaatctaaagtatcatcccggagaggagaattttaagctcaccatggtgaagcgtaacaatcagacaatctttgagcagactataaacgacctcacctttgacggaagttttgtgaaggaggaaaacgccgagcaggccgaaagtaccgaggtgagctcaagcggcatttccattagtaaaacccctattatgaagatgatgaaaaataaagtggagaacaaaagaatcgcggttcaccacaactctgttgaggatgtcccggaggaaaaggagaacgagatcaagcccgacagagaagaaatcgtagagaacccctcaagttctgccagcgaaagcaacacgtcaacatccatagtgaaccgcattcacccttcgacagccagcaccgtcgtaactcccgccgctgtgttgcctggcctggcacaggtcattaccgcggtgtctgcgcagcagaactctaacctgattccgaaagtgcttattcccgtaaatagcatccctacttataacgcggctcttgacaacaatcctctgctactgaatacctacaataagttcccatatccaacaatgtctgaaatcaccgtgctgtccgcccaagctaagtatactgaagagcaaataaaaatctggtttagcgcccagaggttaaaacatggagtgagttggacaccagaggaggttgaagaggctagacgaaagcagttcaacggcactgtacatacagtgccacaaacaatcactgttatacctacccatataagtaccggaagcaacggcctaccttcaatactccagacatgccaaattgtggggcagcctgggctagtgttgacacaggtagctgggacaaatacactcccagtcaccgccccaattgcattaacagttgcgggggtgccaagccagaataacattcaaaagtcacaggtaccagccgcgcagccgactgctgagacaaagcctgctaccgctgctgtgcccaccagccagagtgtaaagcatgagactgcccttgtcaacccggacagttttgggatcagagcgaaaaaaaccaaggagcaactggctgagttgaaggtgtcatacctgaagaatcagtttccacacgatagtgaaattatcagactcatgaaaattactggactcactaagggggagatcaaaaagtggtttagtgacacccggtataatcagcgcaacagcaaatctaaccagtgtctgcatctcaacaacgactcttcaaccaccattattattgattcctcagacgagacaaccgaaagtcctaccgtgggtactgctcaacccaaacagtcttggaatccattcccagactttaccccgcagaagttcaaagagaaaactgctgaacagctgcgcgtgctgcaagctagcttcctgaacagcagcgttctaaccgatgaggagctgaaccgactgcgtgcacaaaccaaactaacccgcagggagatcgacgcttggtttaccgaaaagaaaaagtctaaagctctgaaagaagagaagatggagattgacgaaagtaacgccggctcatccaaagaggaagccggagaaacatcacctgccgatgagtctggcgcgccgaaatccggctccaccggtaagatctgcaaaaagacccctgaacaactgcacatgctgaagtcagcattcgtgaggacacagtggccttcccccgaagagtatgacaaacttgccaaggagtccggtctggccaggacagacatcgtttcctggtttggcgatacaagatatgcatggaagaacgggaatttgaagtggtattactattaccagagtgctaactcctccagcatgaacggcctgagttccctgcggaagagaggccgcgggagacccaaaggacgcggccggggccgccctcgaggccgcccgcggggcagtaaacggatcaacaactgggaccgaggaccaagtttgataaagtttaagacaggtacagccatcctgaaggattattaccttaagcataagttccttaacgagcaggacctggatgagctagtgaacaagtcacatatgggctacgagcaggtcagggaatggtttgcagaaaggcagcgacgctcagagctcggcatcgaactctttgaggagaatgaagaagaagatgaggtgatcgacgaccaggaggaagacgaggaagaaaccgatgactctgatacatgggaacctccgcgccacgtgaaacgcaaattatcgaagagcgatgattag

SEQ ID NO: 141763 - DNA, 2622 bp, synthetic construct
  misc_feature 1..2622: note = Description of Artificial Sequence: Synthetic coding sequence
  source 1..2622: mol_type = other DNA
atggcttcacgcaggaaatctactactccgtgtatggtattagcgagtgagcaggaccctgacctcgagctaatttctgatctcgatgaaggacctccagtcctgacccccgtagaaaatacgcgagccgagtcaataagtagcgatgaagaggtgcatgagtccgtggatagcgataaccagcaaaataagaaagtcgaggggggttacgaatgcaaatactgcacatttcagacaccagaccttaacatgtttacttttcatgtcgattccgagcaccccaatgtggtacttaattcaagctatgtatgtgtggagtgcaactttcttactaaacggtatgacgcgctcagcgagcataacttgaagtatcacccgggcgaagaaaattttaaacttactatggttaagcgaaataatcagacaatttttgagcagaccattaacgacctgacttttgacgggtcattcgtgaaggaggaaaacgccgagcaggctgagagcaccgaagtttcaagctccggtatttctatctctaagacccctattatgaagatgatgaagaacaaagtcgaaaataagaggatcgcagtccaccacaactccgttgaagatgtcccagaagaaaaagagaacgagattaaaccagaccgagaagaaattgtggaaaatcctagttccagtgcctcagaatcaaacacgtccacctctattgtgaaccgcatacatcccagtacagcttctacggtggttacccccgcagcagttttacctggtttagcgcaggtaattacagccgtgtccgctcagcagaatagcaatctgattccaaaggtgttgattccagtgaattctatccccacctataatgcagccctggacaataatcctcttctactaaacacctacaataagttcccgtaccccaccatgagcgaaatcacggtcttgtctgcccaggccaaatatacagaggagcagatcaagatatggttcagtgcgcaacggctgaagcatggggtgtcctggactccagaggaagtggaggaggccagacggaaacagttcaacgggacagtccataccgtgccccagactatcactgtgatccccacccacatctccacgggctccaatggcctaccatctatccttcagacatgtcagatagttgggcagccagggctggtgctgacccaggtcgctggtacaaacacactgcccgtcactgcacctattgccctcacggtggccggcgttccaagccagaataatatccagaaaagccaggtgcccgccgcacaacctactgccgaaacgaagcctgccacggcagctgtaccgactagtcaaagtgtgaaacacgagactgcacttgttaatcccgactcatttggcatccgtgcgaagaagaccaaggaacagctagctgaactcaaagtatcttacttaaagaatcagttcccacatgatagcgaaatcatccgcctgatgaaaatcacgggcctgaccaaaggggaaattaaaaaatggtttagtgatacacgttataaccaaaggaactccaaatccaatcagtgcttacacctgaataacgattccagcaccaccataataattgattcaagcgacgagacaaccgaatcccccactgttggcactgcccagcccaagcagagttggaaccccttcccagacttcacaccccagaaattcaaggaaaagacagccgagcagctgcgagtcctgcaggcgagctttcttaactcaagtgtgctgaccgatgaggagttgaaccggctgagagctcagaccaaactgacaaggcgagagattgacgcctggtttaccgagaagaagaagtccaaggccctgaaggaagagaagatggaaattgacgagtctaatgcggggagctctaaggaggaggccggagaaacaagccccgccgatgagtcgggagcccccaagtccggttctaccgggaagatttgcaagaagactcccgagcagctgcacatgttgaagtccgcatttgtgaggactcagtggcctagccccgaagagtacgacaagctggcaaaagagagcgggttggctaggaccgatatcgtgtcctggtttggcgataccagatatgcctggaaaaacggcaaccttaaatggtattattattatcagtctgcgaactcatcaagcatgaacggtctaagctctctgaggaagcggggccggggcagaccaaagggccgtggtaggggtcggcctcgggggcgccccagaggctccaagcggattaacaattgggatagaggccctagcctgatcaagttcaaaaccggtaccgctattttaaaagattactacctgaagcacaagtttttgaacgagcaagatctggacgagttggttaacaaaagtcacatggggtacgagcaagtgcgggagtggttcgctgaaagacagcggcgatcagaacttggtatcgaactgttcgaggaaaatgaggaggaggacgaagttatagatgaccaggaagaggacgaagaggagaccgatgatagcgacacatgggagcctccacgacatgtgaagcgaaagcttagcaaatccgatgactag

SEQ ID NO: 141764 - DNA, 2622 bp, synthetic construct
  misc_feature 1..2622: note = Description of Artificial Sequence: Synthetic coding sequence
  source 1..2622: mol_type = other DNA
atggctagtcggcgaaagtccaccactccctgcatggtccttgcctcagagcaagaccccgatttggaactgattagcgatctggacgagggcccacccgtcctaacgcctgtggagaataccagggcggaatccatcagcagtgacgaagaagtccacgaaagtgttgattccgacaaccagcagaacaaaaaggtggaaggcggttacgaatgcaaatattgcacgtttcagacaccagaccttaatatgttcactttccacgtagatagtgaacaccccaatgtggtgctgaacagctcgtacgtctgtgtcgaatgtaactttctgaccaagcgctatgatgccttaagcgaacacaatctgaagtatcatcctggcgaggagaattttaaactgaccatggtgaaacgcaataatcaaactatcttcgagcagaccataaatgatctgacttttgacgggtcgttcgttaaagaggaaaatgcagaacaggcagaatccacggaagtgtcttcaagcggaatttctatatcaaagacccccattatgaaaatgatgaagaataaagtagagaacaagcggatcgccgtgcaccacaattccgttgaagatgttcctgaagaaaaagagaacgagataaaaccagatagggaggaaatcgtagaaaatcctagttcctccgcctcggaatctaatactagtacatcgatcgtgaatcgtattcacccctctacggcttccactgtggtgacccctgcggcagtgctccccggattggcacaggttattaccgcagtctctgcccagcagaactcaaacctgattcctaaagtgctgattccagttaattctattcctacttacaatgccgcgctcgacaacaaccccctactgttgaacacatacaacaagtttccctaccccacaatgtcagagattactgtgctgagcgcacaggcaaaatataccgaggagcagataaagatttggttttctgcgcaacgtttgaagcacggcgtctcctggacgccggaagaagttgaagaagcacgcaggaaacagttcaatggtactgtgcacaccgtcccccagaccatcacagtgattcctacacacattagcacaggcagcaacggactcccctcaattctacagacttgccagatcgtgggtcagcctggcctcgtattaacacaggttgccggtacaaacacactgcccgtgaccgctccaatcgctttgacagtcgccggtgttcccagtcagaacaatatccaaaagtctcaagttccagccgctcaacctaccgccgagaccaagccggccactgccgcagttccaacgagtcagtccgtgaagcatgagacagcactggtgaatcctgatagttttggcatacgggctaagaaaacaaaggaacagttggccgagctaaaagtgtcctatcttaagaaccagttcccccatgacagtgagatcattaggttgatgaaaatcacaggtctcaccaaaggggagattaagaaatggttctccgacacccggtacaaccagcggaatagtaagtcaaatcaatgcctacatctcaataacgactccagtaccactattataattgactcatcagacgaaacaaccgaaagccctactgtggggacagcccagccaaaacagtcgtggaatccgttccccgacttcaccccacagaagtttaaggaaaagaccgcagagcagctgagagtgttgcaggcctcttttctgaacagttccgtgctgactgacgaagaactgaatcgactgcgggcacagaccaagttaactcgtcgcgagattgatgcgtggtttacagagaagaagaagtccaaagccttaaaagaggagaaaatggaaattgacgaaagcaatgcgggttcctcaaaagaggaggcaggagaaacctcccccgccgacgaatcaggcgcccccaaaagcggctctactggcaaaatctgcaaaaagaccccagaacagctgcacatgctgaaatcagcttttgtccggactcaatggccttcccccgaggagtacgataaactcgcaaaagagagcggtttggctaggacagatattgtctcatggttcggcgatactcgttatgcttggaaaaacggcaatctaaagtggtactactactatcagagcgctaactcctctagcatgaatggactctctagcctgaggaaaagaggccggggcaggcccaagggacgcggtaggggcagaccacgaggtcgtccccggggttccaaacgcattaacaactgggataggggccctagcctgatcaaattcaaaactggaaccgctatactgaaagactattaccttaaacacaaattcctgaatgagcaggacctggacgagttagtgaacaaatctcatatggggtacgaacaagtgcgagaatggtttgctgagcgccagaggaggtcagaacttggaatcgagctctttgaagagaacgaagaagaagatgaggtaatagatgaccaggaagaggacgaggaagaaacggatgattcggacacctgggagcctcccagacacgttaagcggaagctgtctaagagcgacgattag

SEQ ID NO: 141765 - DNA, 1497 bp, synthetic construct
  misc_feature 1..1497: note = Description of Artificial Sequence: Synthetic coding sequence
  source 1..1497: mol_type = other DNA
atggcaagcaaaagaaaatctacgacaccttgcatgattcccgttaaaacagtggtgctgcaggacgcttctatggaggcccaacctgccgagacgctaccggaaggcccccagcaggatctccctcctgaagccagtgctgccagctctgaggcagcacaaaacccctcttccaccgatgggtccacattggcaaatggccaccgttccacgttggacggctatctgtactcttgcaaatactgcgacttcagatcacatgacatgactcagttcgtgggacacatgaattccgaacacactgacttcaacaaagacccaacattcgtctgtagtggatgtagtttcttggccaagacgcccgaaggtctatctttacacaatgcaacctgtcacagcggggaagccagtttcgtatggaatgtggcaaagccggacaaccacgtagtggtagagcagtcgatcccggaatccacatccacccccgacttggcaggagagccaagtgccgagggtgctgacgggcaggccgaaattatcataacgaaaactcctatcatgaaaattatgaaaggcaaggccgaagcaaaaaagatccacacactgaaagaaaatgtcccctcacaacctgtgggagaagccttgcccaagctgtctacaggcgagatggaagtgagggagggagatcactcattcatcaacggggccgttcccgtgtcccaggcttccgcaagctccgcgaaaaatcctcacgccgccaatggaccactgataggaacggttccggtgttgccggctggaatcgcccagttcctttctcttcagcagcagcccccggtacacgctcagcaccacgtacatcagccattacctaccgcaaaggctctacccaaagtgatgatccctctgagttccataccaacatataatgctgccatggactccaatagtttcctgaagaactccttccacaaatttccctaccctactaaagctgagctttgctatcttactgtggtcaccaagtacccagaggagcagctgaagatctggtttactgcccagcggctaaagcagggtatcagctggagccccgaagaaattgaggacgctagaaaaaagatgttcaatacagtgatacagagcgtgccccaacctacgatcactgtgctgaacacacccttggtagcctcggcagggaatgtgcaacacttgatccaggcggccctgcccggacacgtggtgggtcagccagaagggaccggtggagggctcctcgtgacacagcctctgatggcgaacggcttacaggccactagtagcccactccctctgacagttaccagtgtgcccaagcaaccaggagtggcccctattaataccgtgtgcagcaacaccaccagcgctgtgaaagttgtcaatgctgcccagagccttctcacggcctgtccatctattacttctcaagcctttcttgatgcctctatctacaaatag

SEQ ID NO: 141766 - DNA, 291 bp, synthetic construct
  misc_feature 1..291: note = Description of Artificial Sequence: Synthetic coding sequence
  source 1..291: mol_type = other DNA
atggcttccaagaggaagagtactactccgtgcatgattccagtcaagaccgtggtgctgcaggatgcgagcatggaggcacaacctgctgagaccctgcctgaaggcccccagcaagacctgcctccagaggcttctgccgcgagcagcgaagcggcgcagaacccatctagcacagacgggtcgacactcgcaaacggccaccgctcaaccctagacggctatctctactcctgcaagtactgcgatttcagatcacacgacatgactcagttcgttggacacatgtag

SEQ ID NO: 141767 - DNA, 2244 bp, synthetic construct
  misc_feature 1..2244: note = Description of Artificial Sequence: Synthetic coding sequence
  source 1..2244: mol_type = other DNA
atggaggtgcgggagggagaccattccttcatcaacggggcggtcccagtgtcgcaggcctcagcatcctcagccaagaacccccacgctgcaaatggccctttgatcggaacagtgcctgtcctgccagctggcatcgctcaatttttatcactccaacaacagccgcctgtgcatgcccagcaccacgtgcatcaacctctccccaccgctaaagccttacctaaggtgatgattccgctgtccagtatacctacttacaacgccgcgatggattctaatagctttctcaaaaattcttttcacaagttcccatatcccacaaaggctgagctctgctacctgaccgttgtgaccaagtacccagaggaacagctaaagatttggttcactgctcagagactaaagcagggtatcagttggagcccagaggagatcgaagatgccaggaagaagatgttcaatacagtgatccagtcggttccacagccgacaatcactgtgctcaatacacctttggtagcatccgccggcaacgtgcagcacctcatccaggccgccctccctgggcatgtggtgggtcagcccgagggtaccggcggcggcctcttggtgacacaaccacttatggcaaacggcctccaggccacctcaagcccactgcctctcacagtgacaagtgttcccaagcagcctggggtcgctcccattaataccgtctgtagtaatacaaccagcgctgtgaaggtggtgaacgcggctcaatccctgctgacggcctgcccgtctattactagtcaagcttttctcgacgcttcaatttacaagaataagaaatcacacgaacagctgtctgcgctcaagggcagcttctgcagaaaccagttccctggtcaatcagaagtagagcacctgactaaggttacgggcctgtctacccgggaagtgcggaaatggtttagcgacagacgctaccactgcagaaacctgaagggaagtagggccatgattcccggtgaccatagctccatcatcattgactccgtaccggaagtgtcctttagcccatcaagtaaagtccccgaggtcacctgcatacccactactgccactttagcgacccacccctccgctaaacgccagtcctggcaccagactcccgattttacccctaccaaatacaaagagcgagcccctgaacagctgcgagcgctcgaatcctctttcgcgcaaaatcctctgcccctggatgaggagctcgacaggcttcgcagcgaaactaaaatgactagacgagagattgattcatggttcagcgagaggagaaaaaaggtgaacgccgaagagaccaaaaaggccgaggaaaacgcctcccaggaggaagaagaagccgctgaggacgaggggggtgaagaggacttggcctccgaactcagggtgagcggggagaacggtagccttgaaatgccctcatcacatattcttgccgagcgaaaagtgagccccataaagatcaacctgaagaacctcagagtgacagaggctaacggtcggaatgagatcccaggactaggcgcgtgtgaccctgaggacgacgagtccaacaagctggccgagcagctacctggtaaggtgtcatgtaagaaaactgctcagcagaggcaccttctccgacaattatttgtccagacccagtggccctccaatcaggactatgatagtatcatggcccaaaccgggctgccacgcccagaagtggtacgctggttcggggattccagatacgcactaaaaaacggccagctgaaatggtatgaagactataagagaggcaactttccccccggactccttgtgattgctcctggcaacagggagttgctgcaggattattacatgacgcataagatgctgtatgaagaagacctgcagaacctatgtgataaaacgcaaatgtcatcacagcaggtaaagcaatggttcgctgaaaaaatgggcgaagagacacgcgccgtggcagataccggtagtgaggaccagggtccgggcacaggagagttgactgccgtccacaagggcatgggcgatacttactcagaggtctctgagaattcggaatcatgggaaccccgtgtgcctgaagccagtagcgagcccttcgacacatccagccctcaggcaggtcgacagctcggcagctggtcactgtcatctcaaccactcccatctctgctaactctctag

SEQ ID NO: 141768 - DNA, 2871 bp, synthetic construct
  misc_feature 1..2871: note = Description of Artificial Sequence: Synthetic coding sequence
  source 1..2871: mol_type = other DNA
atggccagtaagcgcaagagtactaccccatgcatgatccccgtcaaaaccgttgttctacaagatgccagcatggaggctcaacctgcagaaacactgcccgagggaccacagcaggatctcccacccgaggcaagcgcagcgagtagcgaggccgcccagaatccaagcagtactgacggaagcacactggctaatggccaccgcagtaccctggacggttatctttattcttgcaaatactgcgattttcggtctcacgatatgacacaatttgtaggtcacatgaatagtgaacacaccgatttcaataaggatcctactttcgtatgttcgggctgcagctttcttgcaaagacaccggaaggactgtcattgcataatgcaacatgccactcaggcgaggctagtttcgtctggaatgtcgctaagccggataatcatgtagtggtcgaacaatccatccctgagagcacctcaacaccggacctggccggggagccttcggctgaaggggccgacggccaggctgagattattatcacaaagacaccaatcatgaagatcatgaagggcaaagccgaggcaaaaaaaattcatacactcaaagaaaatgtgccatcccaaccggtcggggaggcattgcctaagcttagcaccggagaaatggaggttagagagggagaccattccttcattaacggcgctgtgcctgtgtcccaggcatctgcttcaagtgccaagaacccacacgctgctaatggccctctcattgggaccgtgcccgtcctgcccgccggcattgcccagtttctgtctcttcagcagcagccacccgtgcacgctcagcaccatgtgcaccagcccctgccaacagcgaaggctctgcccaaagtgatgattccgctgtctagcattcctacctataatgcagcaatggactctaacagttttctgaagaactcttttcacaagttcccataccccaccaaggccgaattgtgctatctgactgtcgtcactaagtatccagaggagcagttgaaaatatggttcacggcccagcggctgaagcagggcatcagttggtcccccgaagagattgaagacgcgaggaagaagatgttcaatactgtgatccaaagcgtcccacagccaaccatcaccgtgctcaatacaccactcgtcgccagcgccggaaacgtgcagcacctgatacaagccgccttgccaggtcacgttgttggccaacccgaaggtacaggtgggggtctgcttgtgacccagcccttgatggcaaacggcttgcaggccacgtcctcacccttacccctcactgtaacgtctgtcccaaaacagccaggagtggctccgattaacacggtgtgctcgaacacaacctcagccgtcaaggtggttaacgctgctcagagcttactcaccgcttgccctagcattacatcgcaggcctttctcgatgcttccatttataagaacaaaaaatctcacgaacagctgagcgctctgaagggcagtttttgtcggaatcagtttcccggacagtccgaggttgaacatctgactaaggttacaggcctatctacccgagaggtgcggaagtggttctccgaccgccgctaccattgcagaaacttgaaagggtccagggctatgattcctggcgaccattcatcgatcatcattgattcggtccccgaagtttcgttttcgccctcttccaaagtccccgaggtgacatgtatcccaacaaccgccactctagctactcatccatccgccaaaagacagtcctggcaccaaacaccagatttcacgccaactaaatacaaagagcgcgctccagaacagcttcgcgccttggaatccagttttgctcagaaccctctgcccctagacgaagagctcgacagactgcgatccgagaccaagatgacccgccgggagattgactcttggttttctgagcgaagaaagaaggttaacgccgaagaaacaaagaaagccgaggagaacgcctcacaggaagaggaagaggccgcagaagacgagggaggggaagaagatctggcctccgaactgcgcgtaagcggtgagaatggaagcctggagatgccctcctcccacatacttgcagaacggaaggtatctccgattaagattaacctgaaaaacctccgtgtaacagaggccaacggtcgtaacgaaatacccggccttggtgcatgtgaccccgaggacgatgagtccaacaagcttgctgagcagctcccaggtaaagtgtcttgcaaaaaaaccgctcaacagaggcatttgctccgacagttgtttgtgcagacgcagtggccctccaaccaggattatgattctatcatggctcaaactgggctgcctcgccccgaagtggttagatggtttggggactccaggtatgcattgaaaaacgggcagctgaagtggtatgaggactataagcgcggcaactttcctcctggcttactggtgatagctccaggaaatcgcgagcttctccaggattactacatgacacacaagatgttatatgaggaagacttacaaaacctttgtgataagacgcagatgtccagtcagcaagttaagcagtggtttgcagaaaagatgggagaagagactcgggctgtggccgatactgggtctgaggaccaaggcccaggtacaggagagttgactgcagtgcacaagggcatgggcgatacctactccgaggtgtccgaaaacagcgaatcctgggaacctcgagtgcctgaagcatcaagcgaacctttcgatacctcatcccctcaagctggccggcaactggaaacggattag

SEQ ID NO: 141769 - DNA, 141 bp, synthetic construct
  misc_feature 1..141: note = Description of Artificial Sequence: Synthetic coding sequence
  source 1..141: mol_type = other DNA
atggcgtctaagagaaagagtacaacaccctgtatgatacctgttaaaacggtggtgctgcaggacgcgagcatggaggcccagcccgcagagaccttgcccgagggcccacagcaagatctgcccccagaagcctcatag

SEQ ID NO: 141770 - DNA, 1497 bp, synthetic construct
  misc_feature 1..1497: note = Description of Artificial Sequence: Synthetic coding sequence
  source 1..1497: mol_type = other DNA
atggccagcaagaggaaaagcacaaccccttgcatgataccagtgaaaaccgtggtgctccaggacgcaagcatggaagcacagcccgcggagactctgcccgagggtccccagcaggatctaccgccggaggcaagtgcagcttctagtgaagccgcccagaatccaagctctacggacggaagtactctcgctaatggacaccggtctactttggatgggtatctgtatagttgcaagtattgtgattttagaagtcatgatatgactcagttcgtggggcacatgaatagcgaacatactgactttaacaaggatcccacttttgtgtgctcaggttgttcatttcttgctaagacacccgagggacttagcctgcacaatgcaacttgccacagcggggaggcgtcatttgtctggaacgtcgcaaagcctgacaaccacgtcgtggttgaacagtctatccccgaatcaaccagtacacctgatttggcaggagagcccagcgccgagggggctgatgggcaggccgagataatcatcaccaagacgccaatcatgaaaataatgaagggaaaagccgaagccaagaagatacatacactgaaggagaacgtaccatctcagccagtgggagaggcccttccgaagctgtccaccggagagatggaagtaagagaaggcgatcactccttcattaatggtgcggtgcccgtatctcaagcctcggcatccagtgccaagaatcctcacgccgcaaacggcccccttatcggcacagtgcctgttctgccggcgggaattgcacagtttctcagcttacagcagcagccccccgtccatgctcagcaccacgtacaccagcccctgcccactgcaaaggcactgcccaaggtaatgattccgctgagctcgataccaacttacaacgccgcgatggattccaattcgttcttgaagaactcttttcacaaattcccataccccactaaagcagaactgtgctatctgaccgtggtgacaaagtaccctgaggagcaactgaagatctggtttactgctcaaagactgaagcagggcatctcctggagccctgaagagattgaagatgctagaaagaagatgttcaataccgtaatccagagcgttcctcagccgacaataactgtgctcaacacacccctcgtggcatccgcaggtaacgtccagcacttgatccaagccgcactccccgggcacgtcgtgggccaaccagaggggactgggggcgggctgctggtaacccaaccacttatggccaatggcttgcaagcaacctcatcccctctgcctctgacagtaacatctgtgccaaagcagcccggggtggcgccaatcaacactgtatgtagtaatacaacttccgcagtgaaggtggttaacgccgcgcagtctttattgacggcatgcccttctatcacttctcaggcgtttttagacgctagcatctacaaatag

SEQ ID NO: 141771 - DNA, 147 bp, synthetic construct
  misc_feature 1..147: note = Description of Artificial Sequence: Synthetic coding sequence
  source 1..147: mol_type = other DNA
atggcctccaagagaaaatcaaccaccccttgtatgattcccgttaagacagtggtgttgcaggatgccagtatggaggcacagccagcagagacccttcccgagggcccacagcaggacttgcccccagaggcatccgcggcctag

SEQ ID NO: 141772 - DNA, 273 bp, synthetic construct
  misc_feature 1..273: note = Description of Artificial Sequence: Synthetic coding sequence
  source 1..273: mol_type = other DNA
atggctagcaaaagaaaatcaactacaccatgcatgattcctgtgaaaaccgtggtcctgcaggacgcctcaatggaagcccaaccagcagagacgctgccagaaggcccacagcaagacttgccacctgaggccagtgcagccagtagcgaagctgctcagaatccttccagcaccgatgggtctactttggccaatggacatcgttcaaccttggacggatacctctatagctgtaagtactgcgatttccggagccacgatatgacgtag

SEQ ID NO: 141773 - DNA, 357 bp, synthetic construct
  misc_feature 1..357: note = Description of Artificial Sequence: Synthetic coding sequence
  source 1..357: mol_type = other DNA
atggcctctaaacgaaagagcacaacaccatgcatgatccccgttaagacggtcgtgctgcaagacgccagcatggaagctcagccagccgaaaccctgcctgagggtccgcagcaagacctgccaccagaggcgtcagcagcctcttccgaggccgctcagaatcctagcagcactgacggtagcactctggccaatgggcaccgtagcaccctggacggctatctctactcctgcaaatactgcgactttaggtcccacgacatgacccaatttgtggggcatatgaacagcgagcacaccgatttcaacaaggatcctacgtttgtgtgctccggttgctccttccttgcatag

SEQ ID NO: 141774 - DNA, 2871 bp, synthetic construct
  misc_feature 1..2871: note = Description of Artificial Sequence: Synthetic coding sequence
  source 1..2871: mol_type = other DNA
atggccagtaagagaaaatctacaaccccctgtatgattccggtaaagacagttgtgctgcaggatgcatccatggaagctcaaccggccgagacactcccagaggggccacaacaggatctgcccccagaggccagtgcagcaagctccgaggcagcgcagaatccctctagcaccgatggctctacccttgcaaatgggcatcgctcgaccttagatggctacttgtactcttgcaaatactgtgacttccggtcacacgacatgactcaattcgtgggacatatgaacagcgaacatacagatttcaataaggaccccacctttgtgtgcagcggttgttccttcctagccaagacgcctgagggactgtccctacacaatgctacatgtcactccggcgaagcaagctttgtttggaatgtggcaaaacctgataaccacgtggtagtggaacagagcattccggagtccacctccacacccgatttagccggcgagccttccgccgaaggtgccgacggccaggccgagattattatcactaagacgccaattatgaaaatcatgaaggggaaagctgaggctaaaaaaatccacacacttaaggaaaacgtaccgtcacaaccggtgggagaggccttgccaaagctgtcaactggcgaaatggaggttcgcgagggagatcactcgttcattaatggggccgttcctgttagccaagcttcagcctctagcgccaagaatccccacgctgctaatggaccccttatcggtactgtgccagtgttacctgccggaatcgctcaattcctctcactgcaacagcagccacctgttcacgcacagcaccacgttcatcagccactcccgaccgcaaaagctctgccaaaagtgatgattcctctatctagcatcccgacgtacaatgcagctatggattctaactcattccttaagaactccttccacaagttcccttatccgacaaaggccgagttatgctacctgaccgtcgttaccaagtacccagaggagcagctgaaaatctggttcaccgctcagcgactcaagcagggaattagctggagtcctgaagagattgaggatgcccgcaaaaagatgtttaatacggtgatccaatccgtgccacagccaaccatcactgttctgaacacccctctagtcgcctcagccggaaacgtgcagcacctgattcaggcagcacttcctggccacgtggtaggtcagcctgaggggaccggcggtggccttttagtgacccagcctctgatggccaatgggctgcaagcaaccagcagcccactgccgcttactgtcacctctgtgccaaagcaaccaggtgtggccccaataaacactgtgtgcagcaatacaacctctgccgtcaaggttgtgaacgccgcccagtcactcctgactgcctgcccttctataaccagccaggcttttctggacgccagcatctataaaaacaagaaatcccacgagcagctttctgcacttaaaggttccttttgccggaaccaattcccagggcagtccgaagtagaacatttgaccaaagtgacgggactgtctacacgggaagtcaggaagtggttctctgacagacgctaccactgccgcaatcttaaaggctctcgcgctatgattcccggggaccatagcagtatcataattgactctgtccccgaggttagctttagccccagttcaaaggttcctgaggtgacttgcatcccgaccacagcaaccctggcaactcacccctccgcgaagaggcagtcttggcatcagacccccgatttcacacctacaaaatataaggaacgtgcaccagagcaactgcgcgctctagaaagctcattcgcccagaaccccttgccactggacgaagagctggatcgcctccgctcagagactaagatgacccgccgcgagatcgactcatggttcagtgaacgccgcaaaaaagtgaatgccgaggaaacaaaaaaagccgaggagaatgccagccaggaggaagaggaggcagcagaagatgaaggtggggaggaagacctggcatcagaactgcgtgtttccggtgaaaatggctccctggagatgccatccagtcacattcttgctgagaggaaagtctcgcctatcaagataaatctcaagaacttaagagtaaccgaggctaatggccgcaacgaaatccctggactgggagcatgtgatcctgaggatgacgagtctaacaagctggccgaacagctgcctggtaaagtgtcatgtaaaaagaccgcccagcagcgccatctgttaaggcagctgtttgttcagacacagtggccttctaatcaggactacgactcaattatggctcagaccggactccccagaccagaggtggtgagatggtttggggacagccggtacgctttgaaaaatgggcagctaaaatggtatgaagactacaaacgcggcaacttcccgccaggcctgctggtgattgcccctggcaatagggagctgctgcaagactattacatgacacacaaaatgctatatgaggaagatttgcagaacctgtgcgataagactcagatgtcgagccagcaagtaaaacaatggtttgctgagaagatgggcgaggagacccgcgcagtcgcagatacaggaagtgaagaccagggtcccgggactggcgagttgaccgcggtacacaagggcatgggtgacacttactccgaggtgtcagagaattctgagtcctgggagccaagggtgccagaagcctccagcgagccgttcgatacctccagcccacaggccgggcgacagttggagacagactag

SEQ ID NO: 141775 - DNA, 2910 bp, synthetic construct
  misc_feature 1..2910: note = Description of Artificial Sequence: Synthetic coding sequence
  source 1..2910: mol_type = other DNA
atggcctctaagcgcaaatcaaccacaccgtgcatgattcccgtaaaaaccgtggtcctgcaggacgcctcgatggaggcacagcccgcagaaactcttccagaagggccacaacaagacctgccccccgaggctagcgccgcgtcctccgaggcagcccagaatccttccagtaccgatggtagcacacttgcaaatggacaccgctcaaccctcgatgggtacctgtatagctgcaagtactgcgacttccgcagccacgacatgacacagtttgtgggacatatgaacagcgaacatacggattttaacaaagaccctacctttgtatgtagcgggtgttctttcctggcgaaaacaccagagggcctttcacttcacaatgccacctgccacagcggggaggcaagcttcgtgtggaacgtggccaaaccggacaatcacgtcgtcgtggagcagtccatacctgagagcacatcgacacctgatctcgcaggcgaaccgagcgctgaaggagcagacggccaggctgagataattattacaaagacacccattatgaaaatcatgaagggaaaggcagaggccaaaaagattcataccctgaaggagaacgtgcccagccagccagtgggagaggccctgcccaagttatcaaccggtgagatggaggtgagggagggcgatcattcctttattaatggcgcggtgccagttagccaggcctcagcatcctctgctaaaaacccacacgctgcaaacggacccctcatcggcaccgtgcctgttttacctgccgggattgcacagttcctgtccttgcaacaacagcctcctgtgcatgcgcagcaccatgtgcaccagcctcttcccaccgcaaaggccttgccaaaagtgatgattcctctgagttcaatcccaacttacaatgcagcaatggacagcaactcctttcttaaaaactcgtttcataagttcccgtacccaacgaaagctgaactgtgctaccttactgttgttaccaagtaccctgaggagcagctaaaaatctggttcacagcccaaaggctcaaacagggaatctcatggtcccccgaggaaattgaggacgcacggaagaagatgtttaacacagtcatacagagcgtaccacagcctaccatcaccgtgttgaacacgcctcttgtcgccagcgccggtaatgtgcagcacctgattcaggcggctctgcccggccacgttgtgggccagccagaggggaccggtggcggcctgttagtcacccagcctctgatggcaaatggactccaggctacatccagccctctgcctttgacggttacctccgtcccaaagcagcctggcgtggccccaatcaacactgtgtgctccaatactactagcgccgtaaaggtggtcaacgctgcacagtccctgctgaccgcatgtcccagtattacatcccaggcttttctggatgctagtatttacaaaaataaaaagtctcatgagcagctaagcgctttgaaggggtctttctgccgcaatcagttcccaggccagtccgaggtggagcacctgactaaagttactggtctaagtacccgtgaagtgcgaaagtggttttcagataggaggtaccattgcagaaacctgaagggctcccgggcaatgatccctggcgatcattctagcataatcatcgattccgtgcccgaagtgtcgttctcgccgtcctccaaggtcccggaggtcacctgtatacccacaacagccacactggcgacacatccatccgccaaaagacaatcatggcatcagacccctgattttacacctacaaagtacaaggaacgagcacccgagcagctgagagcactcgagagctccttcgcccagaatccgttgccgctagatgaagagttggacaggctcaggagcgaaacgaagatgacccgaagagaaatagactcttggttcagtgaaaggaggaaaaaggtgaacgccgaggagaccaaaaaggctgaagagaatgcctctcaggaagaggaagaagctgctgaggacgaaggcggagaggaagatctggctagcgaattgagggtgtcgggggagaatgggagtcttgagatgccttctagccatattctggctgagcgtaaagtgtccccaatcaagatcaacctcaagaatctgagggtgaccgaggctaatggcaggaacgagatccccggacttggggcatgcgaccctgaagacgacgagtctaataagcttgccgaacagctgcccggcaaagtctcttgcaaaaagacagctcagcagcgccacctgctgaggcagctgtttgtgcaaacccagtggccaagtaatcaggactatgacagcatcatggcacagaccggcctgccgaggcccgaggtcgttcggtggttcggagattcaaggtatgctctcaagaatggtcagctcaagtggtacgaggattacaaaagggggaactttcctcccgggctgctcgtaattgcccctggaaacagggaactcctgcaggactactatatgactcataagatgctttacgaggaggacctgcagaacctctgtgataagacacagatgtccagccaacagaagcaaaccgaatttgacctgataaatgtgaaagactggcccgtgtgggagactgcttgccatgtagaggagcccaaccctacactgtgctgtcatatgcccttcccctgcccagcggccggtcatctcggcgagctgcccgagtcatcccaaacagcacagtcacttccgctgcccagtgcttgtcccccgccaagcaaacagcaggcccgttgggggtcacatcaattttttctgccacaatgccggacattcccacttccatccaatggttag

SEQ ID NO: 141776 - DNA, 948 bp, synthetic construct
  misc_feature 1..948: note = Description of Artificial Sequence: Synthetic coding sequence
  source 1..948: mol_type = other DNA
atggccagcaagcgaaagtctacgactccctgcatgattccagttaaaacggttgttctgcaggacgctagtatggaagcacagcccgctgagacgcttcccgagggccctcagcaggatctgccccctgaagcttcagccgcctcatctgaagccgctcagaaccccagctcaactgacggatccacgcttgccaatggtcaccgcagcacgctcgacggctacctgtattcttgcaagtactgcgacttcagatcccacgacatgacacagtttgtcgggcacatgaactccgagcatacagacttcaacaaggaccctaccttcgtttgtagcggctgttcgtttctggctaaaacccccgagggactatctctgcacaacgccacgtgccactcaggtgaggccagctttgtgtggaatgtggccaaaccggataaccacgtcgtggtggagcagtcaatccccgagtctacttctactcccgatctcgcaggggaaccgagcgccgagggcgccgatgggcaagctgagattatcatcacaaagacccccatcatgaaaatcatgaaaggcaaggcagaggccaagaagatccacacattgaaagaaaatgtcccttcacagccggtgggggaagccttgcccaagcttagtaccggcgaaatggagaaacaaacagagtttgacctcattaacgtgaaagattggccggtgtgggaaactgcctgtcacgtcgaggagcccaacccgacgctgtgttgccatatgccgtttccttgccccgcagctgggcatctcggtgaactgcctgagtccagtcagacagcccagagtctcccattacccagtgcctgccctcctccgagcaaacaacaggctcggtggggaagccatcagttcttcctgcctcagtgtcgcacgttccctctgcctagcaacggttag

SEQ ID NO: 141777 - DNA, 501 bp, synthetic construct
  misc_feature 1..501: note = Description of Artificial Sequence: Synthetic coding sequence
  source 1..501: mol_type = other DNA
atggctagcaagcgcaagtctactacaccgtgcatgatcccagtgaaaacagttgttttgcaagatgctagcatggaagctcagccagccgagacactgcccgaggggccacagcaagatcttcctcccgaagcatccgccgcctcttccgaagcagcccagaacccgagtagcacggacggttccactttggccaatgggcacaggtccactcttgacgggtatctgtactcctgcaaatattgcgattttagaagtcatgatatgacacagttcgtgggacatatgaatagcgagcacactgactttaacaaagaccccacgtttgtttgttccgggtgttccttcctcgcgaagactcctgagggccttagtctacacaacgcaacatgccactcgggggaggcctcctttgtctggaatgtggcgaagccagacaatcacgttgttgttgaacagtctatacctgagtcaacaagtacgccagacctcgcaggctag

SEQ ID NO: 141778 - DNA, 2871 bp, synthetic construct
  misc_feature 1..2871: note = Description of Artificial Sequence: Synthetic coding sequence
  source 1..2871: mol_type = other DNA
atggcaagcaagagaaagtctaccaccccatgtatgattcccgtaaaaaccgttgttctgcaggatgcctctatggaggcccagcccgctgagaccctgccagaaggcccgcagcaggatctgccgccagaggcatcagctgctagctccgaagccgctcaaaatccaagcagcaccgatggctctaccctcgcaaatggtcaccggagtacccttgatggctacttgtactcctgtaaatactgcgacttcaggagtcacgatatgacacaatttgtaggtcacatgaactcagagcacaccgatttcaataaagacccaacatttgtttgctccgggtgttcctttctcgccaaaacccccgaagggcttagcctgcacaacgccacttgccattcaggagaagcttccttcgtgtggaacgtcgccaaacctgacaatcatgtggtggtagaacagagtatcccagaatctacttctaccccagatctggccggcgagccctccgctgagggcgctgacggtcaggcagaaattataattactaaaacgccaatcatgaagattatgaagggcaaagccgaggcaaaaaaaatccatactctgaaggaaaacgtaccttcacagccagttggagaggctctgccaaaattaagcacaggggaaatggaagtacgggagggagaccactcatttataaacggtgctgtgccagtgtctcaagcgtccgccagcagcgccaaaaacccacatgcagccaacggtccactgatcggtaccgtaccagtgctgcccgcaggcatcgctcaatttctgtcattgcagcagcaaccacctgtgcacgctcagcatcacgtgcatcaacccctgccaactgctaaagccctgcccaaagtgatgattccactgtcttccatcccaacgtataatgcggccatggactcaaattccttccttaaaaactcttttcataaattcccctacccaacaaaggctgagctgtgctatcttactgtggtgactaaatatcccgaggaacagctgaagatatggttcaccgcacagcgcctaaaacaggggattagctggagcccggaagaaatcgaggatgcgcggaaaaaaatgtttaacacagtcatccagagtgtgccacagcctacgattacagtgctaaacactcctctggtagcctctgccggaaacgtgcagcatcttattcaagcggctctgcccggacacgtcgttgggcagccagaggggaccggaggtggattactggtgacacagcccctgatggctaatgggctccaggccacatctagcccactgcctcttacggtgacaagtgttccaaaacaacccggcgtggctccaattaatactgtgtgctccaataccacttccgccgttaaggttgtgaatgccgcccagtctctcttgacagcctgtccttccatcacaagtcaagctttcttagacgcttctatttacaaaaacaaaaagtcacacgaacagttatcagcactcaagggtagcttttgtagaaatcagtttcccggacaatccgaggtcgagcatttaacaaaagtgactggcctgagtactagggaggtccgaaaatggttcagcgaccggcggtatcattgtcgcaacctgaagggcagtcgggccatgattcctggcgatcacagttctatcattatagattccgttccagaagtctcattctctccatcctccaaagtacccgaggtgacttgcatccccaccacagccaccctggccacccaccctagtgctaagcggcagtcttggcaccaaactcctgactttaccccgacgaaatacaaagagcgcgcacccgagcagcttcgtgccctcgaatcgtcatttgctcagaacccgcttccccttgatgaggagctcgacagacttcggagcgagaccaaaatgactaggcgcgagatagattcatggttttctgagcggcggaaaaaagtgaacgccgaggaaaccaagaaggcggaggaaaatgcctcacaggaggaggaggaagctgctgaagacgaggggggggaggaagacctggcatccgagttacgcgtgtcaggagaaaatgggagtctcgaaatgcccagcagtcatattttggcagaacgcaaggtgtcacccataaaaatcaatttaaagaatttgagagtaactgaggccaacggccgtaatgagattcccggccttggcgcatgtgatccagaagatgatgaatctaacaagctagctgagcagctgcctgggaaggtcagttgtaagaaaactgcacaacagcggcatctactccggcagctcttcgttcagacgcagtggccctccaatcaggactacgattctatcatggcacaaacgggactgccacgccccgaggtggtgagatggttcggcgattctcgttatgccctaaaaaatgggcagctcaagtggtacgaggattacaaacgagggaatttccctccaggacttctagttatcgcacctgggaaccgggagttacttcaagattactatatgactcacaaaatgctctatgaagaagatctccagaatctttgtgataagacccagatgtcaagccagcaggtgaaacagtggttcgcagagaaaatgggggaggagactagagcggtggcggacacaggcagtgaggaccagggtcctgggacaggtgaactaaccgccgtacataaaggaatgggcgacacgtactcagaagtgtccgagaattcagagtcctgggagccccgcgtgccagaagcatcatcagaacccttcgatacgtctagtccgcaagctgggcgccagcttgaaactgattag

SEQ ID NO: 141779 - DNA, 2871 bp, synthetic construct
  misc_feature 1..2871: note = Description of Artificial Sequence: Synthetic coding sequence
  source 1..2871: mol_type = other DNA
atggcctcaaagcgtaaaagcacaactccgtgtatgatccccgtgaaaacagtggtgcttcaggatgctagcatggaagctcagcccgccgaaaccctaccagaaggtccccaacaggatttgccccctgaagcttcagcagcaagctctgaagccgcccagaatccttcaagcaccgatggctccactcttgcaaacggccacagatctactttagacgggtatctgtattcatgtaaatactgcgattttaggtcacatgacatgactcagttcgtgggccatatgaactcagaacacacggactttaacaaagaccccacttttgtttgcagcggctgttcatttttagccaaaacccctgaagggctgagcttacacaatgctacctgccactccggtgaagccagcttcgtgtggaatgtagcaaagcccgacaatcacgttgtggttgaacagagcattccggagagcaccagtacccctgatctcgctggagagcctagcgcagaaggagccgatggacaagctgagatcatcatcactaaaactccgatcatgaaaatcatgaaaggaaaagctgaagccaagaagatacatacgttgaaggaaaacgtccctagtcagccagtgggcgaagctttaccaaagctcagcactggcgagatggaagttcgcgagggcgatcatagctttattaacggagctgtccccgtgagccaggcatccgccagtagcgcaaagaatccacacgctgctaatggcccgcttatcgggacagtgcccgttcttcccgctgggatagcgcaattcctcagcctgcaacagcaaccccccgttcatgctcagcaccatgtccatcaaccattacctacagccaaggcactcccaaaagtcatgatcccgttaagctccattcccacctacaatgcagccatggatagtaattcttttctgaagaatagctttcataaatttccttatcccacaaaggccgaactctgttacctgaccgtcgtgactaaataccctgaggaacaattgaagatttggtttacggcccagcgcctgaagcaaggcattagttggagccctgaggagatcgaagacgcccgtaagaagatgttcaataccgtgattcagtctgtgcctcagccaactataacagtgctgaatacaccattggtggcgtcggcagggaacgtgcagcaccttattcaggcagcccttcctggccacgtagtgggacagcctgagggtacaggtggaggcctcctggttacacagccgttaatggccaacgggcttcaggcgacaagctctcccctgcccctgaccgtgacgagtgtcccaaagcagccaggggttgcgcccattaacacggtttgcagtaacacaacaagcgccgtgaaagtggtgaatgccgcacagagtttgctaaccgcgtgtccttcaattacaagtcaggcattcctagacgctagcatatataaaaataaaaaatcgcatgaacaactctctgccctgaaaggaagcttttgtaggaatcagtttcctggacaaagcgaagtggagcacttgacaaaagtgactggcctgagcaccagagaggtgaggaagtggttttccgaccgcaggtaccactgccggaatctgaaaggctcacgcgctatgatacccggcgaccactcttccataatcatcgacagtgtgcctgaggtttcgttttctccttcctccaaagtgcctgaggtgacctgcattcctactaccgctaccttggcaactcatccaagcgcaaagcggcagtcttggcatcagacgcccgactttactcccaccaagtacaaagaacgcgctccagaacagctgcgtgccttggagtccagcttcgctcaaaatccattgcctctcgatgaagagctcgacaggctgaggtcggaaacaaaaatgacccgccgtgaaattgattcatggttttctgaacgccgaaagaaagtcaacgctgaagagacaaaaaaagctgaggagaacgcctctcaggaagaagaggaggctgccgaggacgagggaggggaggaggacttggcctctgaacttcgtgtctccggcgagaatggctcactggaaatgccgagttcgcacatcttggctgaaagaaaagtgagccctatcaagatcaatttgaaaaatcttagagttaccgaagctaatgggcggaatgaaatcccaggattaggagcttgtgatccggaggacgatgagtctaataagttggccgaacagctgcccgggaaggtgtcttgtaaaaaaaccgctcaacagaggcaccttttaaggcagttattcgtccagacacagtggccctcaaatcaggactacgatagcattatggcacaaacaggcctgcctagacctgaagtggtaagatggtttggtgattctaggtacgctctcaagaatggacaacttaagtggtacgaagattataagagagggaacttcccacctggactgctggtgatcgcacctggaaacagagagctcctgcaggactactacatgacacataaaatgctctacgaggaagacctgcagaacctgtgtgacaagacacagatgtctagccagcaggtgaaacagtggtttgccgagaagatgggcgaggagacacgggctgtcgccgatacaggctcagaggatcaaggacctggaactggcgagttgaccgcggtgcacaagggcatgggagacacttattctgaggtaagtgaaaatagcgagtcttgggaacctagagtccctgaggcaagctccgagccattcgacactagttccccccaagctggtagacagctcgaaacagattag

SEQ ID NO: 141780 - DNA, 501 bp, synthetic construct
  misc_feature 1..501: note = Description of Artificial Sequence: Synthetic coding sequence
  source 1..501: mol_type = other DNA
atggcatccaaacgtaagtccaccactccttgcatgatcccagtaaagacagttgttttacaggacgcctcgatggaagcccagcctgcagagactttgcctgaaggacctcaacaagacttgcctccggaagcctccgccgcttcgtccgaggcggcgcagaatccttcttccacagatggcagcactcttgccaacgggcatagatccacccttgacggatacttatactcttgcaagtattgcgacttcaggagccacgacatgacccagtttgtcggccacatgaactcagaacacaccgactttaataaggatcccaccttcgtgtgtagcgggtgctcattccttgccaaaacacctgagggcctcagtctgcacaacgctacatgccatagcggggaggcttctttcgtatggaacgttgcaaagcctgacaatcatgtggtcgtcgaacagagtattccggaaagcacaagcaccccagacctggcaggctag

SEQ ID NO: 141781 - DNA, 1428 bp, synthetic construct
  misc_feature 1..1428: note = Description of Artificial Sequence: Synthetic coding sequence
  source 1..1428: mol_type = other DNA
atgggaatgtgggccagccttgacgcgctgtgggagatgcccgccgaaaagcgtatcttcggcgctgtcctcctcttctcctggacggtgtatctgtgggagaccttccttgctcagagacagagaagaatatataagacgaccacccacgtcccccctgagttgggccagattatggactccgaaaccttcgaaaagtcgcgcctgtatcaactggataagtccacattctcgttctggtcagggctctattcagagacggagggaacgctgattctcctcttcggcggaatcccatacctgtggcgcttgtcagggaggttctgtggttacgcaggctttggacccgagtatgagatcactcaatccctcgtctttcttctgctggccaccctcttttctgcactgacaggactgccctggagcttgtacaatacgttcgtgatcgaggagaagcatggcttcaatcagcagacgcttggattctttatgaaggatgccatcaagaagtttgtggttacacagtgtattctgctgcccgtttcctccctcctgctctacattatcaaaatcgggggtgattatttttttatctatgcttggctgtttaccctggtcgtttcgctggtgctggttaccatctacgccgattacatcgccccactattcgacaagttcacgcctctgcctgagggcaaactcaaggaggagattgaggtaatggccaagtcaatagacttcccgcttaccaaagtgtatgtagtggaaggctccaagaggagttctcattcaaacgcttacttctatgggttttttaagaataaaagaattgtactctttgacacactgcttgaggagtacagcgtgcttaataaggatatccaggaagactccggtatggaaccccgcaatgaagaagagggtaactctgaggaaattaaggccaaggttaaaaataagaaacaaggctgcaagaatgaggaagtcctggccgtgctcgggcacgagttgggccactggaaactcgggcacaccgtgaaaaacattatcattagtcagatgaactcatttctgtgcttcttcctgttcgctgttctgatcggcagaaaagaactctttgccgcgttcggtttctacgacagccagccgacattgattggtcttctgatcattttccaatttatcttctctccttacaacgaagtgctctccttctgcctgaccgtgctcagtagacgatttgaattccaggcggatgcttttgccaagaaactggggaaggcaaaggacttgtatagtgcacttatcaaactgaataaggataacctggggttccctgtgtcagattggctgttttcaatgtggcattactctcatcctcctctccttgagagactgcaggccttaaaaaccatgaaacagcattag

SEQ ID NO: 141782 - DNA, 1017 bp, synthetic construct
  misc_feature 1..1017: note = Description of Artificial Sequence: Synthetic coding sequence
  source 1..1017: mol_type = other DNA
atgatgcggacctgcgttttgctgtccgcggtgttgtggtgcctcacaggcgttcagtgccctaggtttactctgttcaataaaaagggattcatttacggcaaaacaggccagccagacaagatctatgtagaacttcaccagaacagtccagtgctaatctgcatggactttaagttgtcgaagaaggagattgtcgacccgacatacttatggattggcccaaatgagaaaactctgactggcaacaacaggatcaacattacagagactggccagctaatggtcaaggattttctggagccactcagtggtctttacacctgcaccctgagctataagactgttaaagccgaaacccaggaggaaaagacggtgaaaaagaggtacgatttcatggtctttgcctacagagagccagactacagttatcagatggcagttcggttcaccaccagatcatgtattggccggtataacgatgtgttctttcgtgtcctgaagaagattctggattcattaatcagcgacttaagctgccatgttatagagccctcttacaagtgccattccgttgaaatccctgagcatggcctcatccatgagttgtttattgcattccaggttaatccctttgctcccggctggaaaggcgcttgtaatggttccgttgactgtgaggataccacaaaccataacatcctgcaggcgcgggatagaattgaagacttttttcgcagccaggcctatatattttatcacaactttaacaagaccttgccagccatgcacttcgtggatcattcactccaagtggtgcgtctggattcctgcagacctgggtttggcaagaatgaacgactgcattcgaactgcgccagctgttgcgtagtgtgctctccggccacattcagcccagacgtgaacgtaacctgccagacttgtgttagcgtcttaacatatggcgctaaaagctgtccgcagactagcaataaaaatcagcagtacgaggattag

SEQ ID NO: 141783 - DNA, 951 bp, synthetic construct
  misc_feature 1..951: note = Description of Artificial Sequence: Synthetic coding sequence
  source 1..951: mol_type = other DNA
atgatgcgcacatgtgtgctcctctctgccgtcctctggtgtctgacgggggataagatatatgtggaactgcaccagaattcgcccgtgcttatctgtatggacttcaagttgagtaagaaggagatcgtggacccgacttatctatggatagggcccaacgaaaaaacactgaccgggaataacagaatcaacattactgagaccgggcagttgatggttaaagactttctcgagccactgtctgggctctacacgtgcacactgtcttacaaaacggtaaaggcggagacccaagaggaaaagaccgtcaagaaacggtatgatttcatggttttcgcgtatagggaacctgactatagctaccagatggcagtcaggttcaccacacggtcctgtatcggacgctacaacgacgttttttttcgcgtcctgaagaagattctggacagccttatttcggatctgagctgtcatgtgatcgagccttcatataagtgtcatagcgtggagattccagaacacgggctcatacacgagctattcattgcgttccaggtgaacccttttgctccaggctggaaaggagcctgtaatgggagcgtggactgtgaggacaccacaaatcacaatatccttcaggctcgcgaccggatagaagacttttttcgctctcaggcctatatattctaccacaatttcaataagactctacctgcgatgcacttcgttgatcattcgctgcaggttgtgagactggattcctgtcgccccgggttcgggaagaatgaacggctgcacagcaattgcgcaagctgttgtgtggtatgcagcccggctaccttcagccctgacgttaatgtcacctgccaaacctgtgtgtccgtcctcacctatggcgcaaaatcctgcccacagacatccaataagaaccagcagtacgaagactag

SEQ ID NO: 141784 - DNA, 1917 bp, synthetic construct
  misc_feature 1..1917: note = Description of Artificial Sequence: Synthetic coding sequence
  source 1..1917: mol_type = other DNA
atggccggaggttctgctaccacctgggggtatccagtggcgctgctgttgctggtagctaccctgggcctgggcaggtggctgcaacccgatcctgggttacccgggttaaggcactcctacgattgtggcattaagggcatgcagttgcttgtctttcctagaccagggcagaccttgcgtttcaaggtggtcgatgagtttggtaacaggttcgatgtcaataattgtagcatatgttatcattgggttacttctcggccacaggaaccagccgttttttccgctgattacaggggttgtcacgtgcttgaaaaagacgggcgcttccatttaagagtttttatggaggccgtgctgccaaacggtcgggttgacgttgctcaggatgcaaccttgatctgccccaaacccgacccctcaagaacactggattctcagctcgcacctccggctatgtttagtgtttctactccgcagaccttgagctttcttccaacatccggtcataccagccaagggtcaggccacgcttttccttcgcccctcgatcccggacacagctcagtgcatccaacacccgcgctcccatccccaggcccagggccaaccctcgccaccctggcgcaacctcactggggcactctcgagcattgggacgtaaataaacgagattatattggtactcatctctcacaggaacagtgccaggtggcttccggacacttaccatgcatcgtgagacggacatccaaggaggcctgtcaacaggccgggtgctgttacgacaataccagggaggtcccttgctattacggaaacactgccacagtccagtgcttcagggacggctactttgtgctcgttgtgtcccaggagatggctctgacgcaccggatcactctggccaatatccatctggcttacgcccctacatcttgttcgcctacacagcacactgaggcattcgtcgttttctattttccgttgacccactgcggtacaactatgcaggttgctggggaccagctcatttacgagaactggcttgtgtcggggattcacattcaaaagggacctcaagggagcataacaagagactcaacattccagttgcatgttcggtgtgtgtttaacgccagcgatttcttgccaatccaagcctccatctttcctccaccaagccctgcacccatgacccagcctggccctctccggctcgagctgaggatcgctaaggatgagactttctccagttactacggcgaagatgactaccccatcgtgcgcctccttagagagccagttcacgtggaagtgagactgcttcagaggactgaccccaatctggtcttgctcctgcaccagtgctggggcgctccatcggccaacccatttcagcaacctcagtggcccatcctaagtgacggctgcccttttaaaggggatagctaccggacacagatggtcgcactggatggagctactccatttcaaagtcactatcagcgctttaccgtcgccaccttcgccctgctcgattccggtagccagcgagccttacgcggtttggtgtacttgttttgctccacatccgcctgtcatacatccggcctggaaacctgctccactgcatgttcgactggaactaccaggcaacggaggtcttctggccatagaaacgatactgctcggccacaggacattgtttcatccccgggtcctgttggttttgaggatagttatggacaggaacccacacttgggccgaccgatagcaacggaaattccagcctgagaccccttctgtgggccgtgttattactgcccgccgtggccctggtgctcggcttcggcgtgttcgtcggtttaagccagacttgggcacaaaagctctgggagagtaataggcagtag

SEQ ID NO: 141785 - DNA, 993 bp, synthetic construct
  misc_feature 1..993: note = Description of Artificial Sequence: Synthetic coding sequence
  source 1..993: mol_type = other DNA
atggcccttacacacagaattactctggctaacattcacctggcgtacgcccccacttcttgctcccccactcagcacactgaggccttcgtggttttctacttcccactcacacactgtggcaccacaatgcaggtggctggcgaccagttgatttacgaaaactggctcgtcagcgggatccatattcagaaaggccctcagggatctattactagagacagcacatttcagctacacgtgcggtgtgtgttcaatgcgtctgattttctccccatccaagccagcatcttccctccgccaagccccgcccctatgacccagcctggccctctgcggttggagctgcgtatcgctaaggacgagacatttagcagctattacggagaagatgactatcccattgtacggctgctgcgggaacccgtccatgtggaagttcgccttcttcagagaaccgacccaaatctggtgctgcttctgcatcagtgctggggcgcgccaagcgcaaatcccttccagcaaccgcagtggcccatcctgtcagacggctgccctttcaaaggggattcatatcgcactcaaatggtggccttggacggagccacccccttccagtcccactatcagcggtttacagtggctacctttgctctgctggattcagggagccaacgcgctctgcggggcttggtgtacttattttgttctaccagcgcctgccacacgtcagggctggagacctgttctactgcctgctcaacagggacaactagacagaggcgatccagcggtcaccggaatgacaccgctcgcccgcaggatatcgtatcctcacccggcccagtggggtttgaggactcgtacggccaggagccaaccttaggtcctacggacagcaatggcaactccagcctgagaccactgctttgggccgtgctcctgctgcccgcggtcgctctagtgctgggatttggcgtgtttgtagcctag

SEQ ID NO: 141786 - DNA, 1317 bp, synthetic construct
  misc_feature 1..1317: note = Description of Artificial Sequence: Synthetic coding sequence
  source 1..1317: mol_type = other DNA
atgggcagagtggaagacggaggcactaccgaagagctcgaggattgggaccccgggacctccgccctccccgcaccaggcattaagcagggccctagggagcaaaccggcactggccccctatcacagaaatgttgggaacccgagcctgatgcccccagtcagcctgggcccgccctgtggagtagaggccgtgccaggacacaggctttagccggtggctcttctctgcagcagctagatccagaaaataccgggtttatcggagccgacacctttaccggactcgtgcattcccatgagctcccgttggatccggcaaaactggacatgctcgtggctttagcacagagcaacgagcaggggcaggtatgttatcaagagctggtcgacctgatcagctcaaagcgcagctcatctttcaaacgggctatcgcaaacggccaaagggccctgcctagagatggtccccttgatgagccaggcttgggagtgtacaagaggtttgtaaggtacgtcgcgtatgagattctcccatgcgaagtcgatcgaaggtggtatttctataggcaccgtagctgcccgccaccagtgtttatggcgagcgtcactcttgcccagatcattgtgttcctgtgctatggggctagactcaacaaatgggttctgcagacttatcatccagaatatatgaagtcaccccttgtgtaccatcccgggcatcgagctagagcctggcgctttcttacatacatgttcatgcacgtagggctggaacaactcgggttcaacgcactccttcagctgatgataggagtaccactggagatggttcatgggctcctgagaatttccctgttgtatctcgcaggtgtcctggccggttcactcaccgtaagcatcactgatatgagggcccccgtggtgggcggctcgggaggggtctacgccttgtgcagcgctcacttagcaaacgtggtgatgaactgggcaggcatgcgctgtccatataaacttctgcgaatggtcctcgctcttgtgtgcatgtctagtgaagtcggccgggctgtgtggctgcgattctctcctcctcttcctgcttccggaccgcaaccctcctttatggcacacctggcaggggccgttgtcggagtctccatgggtcttacgatactgaggtcctatgaagaacgcttgcgggaccagtgcgggtggtgggtggtgctccttgcctacggaacattcctcctgttcgccgtgttttggaacgtcttcgcttatgacttgctaggtgctcatattcccccacccccatag

SEQ ID NO: 141787 - DNA, 1122 bp, synthetic construct
  misc_feature 1..1122: note = Description of Artificial Sequence: Synthetic coding sequence
  source 1..1122: mol_type = other DNA
atggtgatggtctcaaaagatctgtttggaacaggaaagttgatccgcgcagcggatctaaccctaggtcccgaggcgtgcgagcccttggtgtccatggacacagaagacgtcgtacgattcgaggtggggctgcatgagtgcggcaacagtatgcaggtcaccgatgacgccttagtctactccaccttcttactgcacgatcctcggcccgttggcaatttgtccattgtcaggaccaatagagctgagatacccatcgagtgcaggtatccacgccaagggaacgtcagctcacaggccattcttcccacgtggctgccgtttcgcaccaccgtgtttagcgaagaaaaactgacgttctcgctgagattgatggaggaaaactggaacgctgaaaagagatcccccacgttccacctgggtgacgccgcacatctgcaggcagaaatccatactggctctcatgtgccgctgcgtctgtttgtcgaccactgcgttgctacgcctacccctgaccagaacgctagtccctaccacaccatcgtcgatttccatggctgtctcgttgatggcctcactgacgcctcttccgcattcaaggtcccacgaccaggaccggataccctgcaatttacagtcgatgtctttcattttgccaatgactctcgaaatatgatctacatcacgtgccacctgaaagtcacgctagctgagcaggacccagacgaactgaataaagcctgttctttttcgaagccttctaatagctggttcccagtcgagggtagcgccgacatatgccagtgctgtaataaaggcgactgtggtacccctagccattcccggcgacagccacacgtcatgagccagtggagtcggagtgccagtcgcaatcggcggcacgtgacagaggaagccgatgtgaccgtcggccccttgatttttcttgaccgccggggggatcatgaagtggagcaatgggcgctaccttctgacacctccgtggtgcttctgggtgtgggcctggcggtggtcgtgagtctgacactcacagcagtaattctcgtgctgacgagacgctgcagaaccgctagtcacccggtctccgcgtccgaatag

SEQ ID NO: 141788 - DNA, 1275 bp, synthetic construct
  misc_feature 1..1275: note = Description of Artificial Sequence: Synthetic coding sequence
  source 1..1275: mol_type = other DNA
atggagctgtcatacagattgtttatctgcctgttgctgtggggcagcaccgagttatgctatccacaacccctctggctccttcagggcggtgctagtcatcctgaaacttccgttcagcccgtccttgtggagtgccaggaagccacactgatggttatggtttccaaggacttgttcgggacaggaaagctcataagggctgccgatctcaccttaggaccagaggcctgtgagccacttgtgtctatggacacagaggacgtggtcaggtttgaggtcggactccacgaatgcggaaactccatgcaggtcaccgatgacgcccttgtatacagcacttttctcctgcacgacccaagaccagtgggtaacttaagcattgtaagaacgaacagagccgagattcctattgagtgtagatatccccggcaggggaatgtgtcatctcaagctatccttccgacatggctgccttttcgcaccacagtctttagcgaagagaaattaaccttcagtctgcgcctgatggaggagaattggaacgccgagaaaagatctccaacctttcatctgggagacgctgctcacttgcaggctgagatccacactggatcccatgtccctctcaggcttttcgttgaccactgtgtggcaacacctacccctgaccagaacgccagcccctaccacactatcgtcgacttccacgggtgcctggttgacggcctgacagatgccagctctgccttcaaggttcctagacctggcccggataccctccagttcacagtagacgtgtttcactttgcaaatgactcccggaatatgatttatatcacctgtcatctaaaagtgaccctcgctgaacaagacccggacgaacttaacaaagcgtgtagtttcagcaagccatctaatagttggtttcccgtggaaggctccgcagatatttgtcagtgttgtaataaaggggattgcgggacgccttcccattctcgccggcagccccatgtcatgagtcagtggtcgagaagtgcctccagaaatcgaaggcatgtcaccgaagaagctgacgtgactgtgggtccactgatcttcctagatcggcgcggggaccacgaggtggaacagtgggctcttccctctgacacatccgtggtactactgggtgtggggctagcagtggtggtcagtctcaccctcaccgccgtcatactcgtgctaacccggagatgtcgaaccgcatcacaccctgtttccgcaagcgagtag

SEQ ID NO: 141789 - DNA, 1116 bp, synthetic construct
  misc_feature 1..1116: note = Description of Artificial Sequence: Synthetic coding sequence
  source 1..1116: mol_type = other DNA
atggaactcagttacaggttgtttatctgcctccttctctggggcagtacagagttatgctatccgcagcctctgtggctcctccaaggaggagcctcccatcctgaaacctccgtacaacccgtgctggtggagtgtcaggaggccaccctgatggtgatggttagcaaggacctgtttgggacagggaagctcattcgcgctgccgatctaaccctagggccagaggcctgcgaacccctggtatccatggatactgaggacgtggtccgttttgaggttggtctgcacgaatgcggcaatagcatgcaggtgacagacgatgcgctagtgtattctacctttttgctgcacgatccaagacctgtggggaatctgtcgatcgtgagaacgaatcgagccgagattcccattgagtgcagataccccagacaaggaaacgtctcaagtcaggccattctccccacctggctgccctttaggaccacagtgttttcagaggagaagctcacattttctcttaggctcatggaggaaaactggaatgcagagaagaggtcccctacatttcacctcggcgatgctgcccatctgcaagcagaaatacataccgggagccacgttcccttgcggttgtttgtggaccattgcgtcgccactcccactcctgatcagaatgcttccccataccacacgatcgtggactttcacgggtgcctggtagatgggttgacggacgctagcagtgcatttaaggtaccccgtcccgggccagacacgctgcaattcaccgtcgatgtatttcattttgccaacgacagtcggaacatgatttatattacctgtcacttaaaggtgacactggcagagcaggatcccgacgaactaaataaggcttgctcattcagcaagccaagtaactcctggtttccagtagaggggagtgcggatatctgccagtgttgtaataagggtgactgcggcaccccgtcccacagccgtcgtcagccacacgtgatgtcccagtggagtcgatcagcctccagaaacagacggcatgtcaccgaggaagccgatgttaccgtcggcaccgacctgcccggccaagaaggctag

SEQ ID NO: 141790 - DNA, 1623 bp, synthetic construct
  misc_feature 1..1623: note = Description of Artificial Sequence: Synthetic coding sequence
  source 1..1623: mol_type = other DNA
atgtggctgctcaggtgtgtcttactgtgtgtgtcactgagtctagctgtgagtggccagcacaaacctgaggctccagattacagttctgtcttacattgtggcccttggtcttttcagttcgctgtgaatctgaatcaggaggctacctcaccccccgtactgattgcctgggataaccagggactgctgcacgaacttcagaacgacagcgattgtggaacatggatcaggaagggccccgggagttcagtggtgctggaagcgacctactcctcctgctacgtcacagagtgggacagccactacataatgccagtgggtgtcgagggtgccggtgccgcagaacacaaagtagtgactgagcgtaagctgctgaaatgtcccatggatcttctagctagagatgctcccgataccgactggtgcgactccatacctgctcgcgatcggctgccttgcgcaccatctcccatcagcagaggcgactgcgaggggctgggttgctgctattcttctgaagaggtcaacagttgttattatggaaataccgtgaccctgcactgtacaagagaagggcacttctccatcgccgtctctcgcaatgtgacctcccctcccctgctcttggactccgtacgcttagccctgcgtaacgattctgcttgcaatccggtgatggctacacaggctttcgtcctgttccagtttccatttacctcatgtggtaccacccggcagataaccggcgatagagctgtctatgagaatgaactcgtggctacacgagatgtcaagaatggttcccgtggctccgtcacacgagacagtatctttcgcctccatgtgtcctgcagctattccgtgtctagcaacagtctgcccatcaacgtccaggtgttcacacttccgcctcctttccctgagactcagcctgggccattaacactcgagttacagatcgctaaggataaaaattatggcagttactatggcgtaggggattatcctgtggttaagctcctgagggacccaatctatgtcgaagtcagcatactgcaccggactgatccctacctgggactgttacttcagcagtgttgggccacaccatcaaccgatcctttgtctcagcctcagtggcctatcctggtaaaaggatgtccctatataggagacaactatcagacccagttgattcctgtccagaaggcactggatctgcccttccccagccatcatcagcgctttagcatctttacctttagctttgtcaatcccacagtggaaaaacaagcgttacgagggccagtgcatcttcactgcagcgtatccgtgtgtcagcctgccgagacacctagttgtgtcgtcacttgtccggatctgtcaagacggagaaattttgataacagtagccagaatactaccgcttcagtctcctctaaggggcccatgatcctgttacaagcaaccaaggaccctcctgaaaagctgagagtcccagtcgactccaaggtgctttgggtagccgggctgagtgggaccctaatcctcggtgccttattagtgtcatacttggccgtcaaaaagcagaaaagctgcccagatcagatgtgtcagtag

SEQ ID NO: 141791 - DNA, 2340 bp, synthetic construct
  misc_feature 1..2340: note = Description of Artificial Sequence: Synthetic coding sequence
  source 1..2340: mol_type = other DNA
atggcctccttcgttaccgaagtgctggcccattccggtcggcttgagaaagaagatctgggcacccgtatctcccgcctcacgaggcgtgtggaagagataaagggcgaagtgtgtaatatgatctctaaaaaatatagtgagttcttgccatcaatgcagtctgcacaaggattaatcactcaggttgacaaattgtctgaagacatcgacctgcttaagtctagaattgagtcagaagtaaggagagacctccatgttagcaccggagaattcactgatctcaaacaacaacttgagcgcgattctgtcgttctgagtcttctgaagcagctgcaagagttcagcacagctatcgaagagtacaactgcgctctgacagaaaaaaagtacgtgacaggggcccagcgcctggaagaggcccagaagtgtctaaagcttttgaaatccaggaaatgcttcgatctgaaaattctgaagagtctatcaatggagctgactatacaaaagcagaacattctataccatttgggggaggagtggcaaaagctcatcgtttggaagttcccccccagtaaggacacatctagcctcgagtcttatctgcaaacagaactgcatctgtacacagaacagagtcacaaagaagagaagacccctatgcctcccatcagcagtgtattgttagcttttagcgtgctgggagagctccacagcaagctgaagtcttttgggcagatgctgctgaaatacatactcagacctctggcctcttgtccgtctctccacgcggtgatcgaaagccagcccaacatcgttattattcgattcgagtccatcatgaccaatttagagtacccaagtcctagtgaagtgttcacgaaaattaggctagtccttgaagtccttcagaagcaactgctagatctgcctctggacactgacctcgagaatgagaaaacctcaaccgtgcccctcgcagaaatgttaggcgacatgatctgggaggatctgtcagaatgcctgatcaagaactgtctggtttactcaattcctacaaactcctcgaagctgcagcaatatgaggagatcatccagagcaccgaggagtttgaaaacgccctgaaggaaatgagattcctgaagggagatactactgacctgctgaagtacgccagaaatatcaactcccactttgctaacaagaagtgccaagatgttatcgtggcggctagaaatctcatgaccagcgaaatccataacactgtaaagattatccctgattccaagatcaacgttccagagcttcccacacccgacgaagacaataaacttgaggtccagaaggtgagtaacacacagtatcacgaggtgatgaatttggagcccgaaaataccctcgatcagcacagcttttcactcccaacctgtcggatcagtgaatccgtgaagaagctcatggaactcgcctaccagacactgttggaggcaacaacctcctccgaccagtgcgccgtgcagttgttctactcggttcgcaatattttccatctgttccatgatgtggtcccaacttaccataaagaaaatctccagaagctgccacagctggccgctatccatcataacaactgtatgtacatagcccaccatctgctcacactgggccaccagttccggttgagactcgcaccaatcctatgtgatggaactgccacattcgtggacctggtgccaggattcagacgtttagggacggaatgctttttggctcagatgagagcccagaaaggggagttactcgagcggctgagctctgcacgaaacttctccaatatggacgatgaggaaaattattcagctgcctctaaagccgtgagacaggtcttacatcaattgaagagactggggatcgtgtggcaagatgtcctgcctgtgaatatctactgcaaggccatgggaacacttctgaacactgctatcagtgaagttataggaaagattaccgcattggaagatatcagtaccgaggacggcgaccggctgtactctttgtgtaagaccgtcatggacgaggggcctcaagtctttgcccctctatcggaggaatcgaagaataagaaataccaagaggaggttccggtttatgtgcctaagtggatgccattcaaagagctgatgatgatgttacaggcttcgctccaagaaatcggagatagatgggcggatggaaaggggcctcttgctgccgcattctcctccagcgaagtgaaggccctgattcgggcccttttccagaatacagaacgacgggcagccgccctcgctaagatcaaatag

SEQ ID NO: 141792 - DNA, 2019 bp, synthetic construct
  misc_feature 1..2019: note = Description of Artificial Sequence: Synthetic coding sequence
  source 1..2019: mol_type = other DNA
atggccagcttcgtaacggaggtgctggcccactccggacgactagaaaaggaagatttgggtaccagaatttcacggctgacccgcagggttgaagaaatcaagggggaggtgtgtaatatgatctcaaaaaagtactcagaattccttccgagtatgcagtctgctcaaggcctgattacccaggtggataagctgagtgaagatatagatctgctcaagagccgaattgagtccgaggtccgcagggacctgcatgtgagcacaggcgagtttacagaccttaaacagcagttagaacgggatagtgttgtgctttccttgctcaaacagcttcaggagttcagcacagctatagaggaatacaactgtgcacttacagaaaagaagtatgtgactggcgcccaaagactagaagaggctcagaaatgtctcaaattgctgaaatcacgaaagtgtttcgatctgaagattctgaaatcactgagcatggagcttaccatccagaagcaaaatatcttgtatcacctgggagaagaatggcagaagctcatcgtatggaagttccccccttccaaggatacttcttcattggagagctacttacaaactgaacttcatctctacacagagcagtctcataaggaggagaaaacccctatgccacctataagcagtgtgctgcttgcctttagcgtgcttggcgagctgcacagcaagctcaagagtttcggccaaatgcttctgaaatatatcttacggcccttagctagctgtccgagcctgcacgcagttatcgaaagtcaaccaaatatcgtcatcataagattcgagagtattatgacaaatcttgagtacccttcacccagtgaagtgtttacaaagatccgtcttgtcctcgaagtgcttcaaaaacagcttctcgacctgccactagatactgatctggagaatgagaaaactagtaccgtgccactcgccgagatgctgggcgatatgatttgggaggatttaagcgagtgcctgattaaaaactgcctagtgtacagcatccctacaaacagcagcaagttacagcagtatgaagagattattcagagcacagaggagtttgaaaatgcgctgaaggaaatgcgcttcctcaaaggtgatacaacagacttattaaaatacgctcggaacataaactcccactttgctaataaaaaatgtcaagacgtcatcgtagcagcgcgaaacctaatgacaagcgagatccataacacagtcaaaattatcccggacagcaagattaacgttcctgagctcccaacaccagatgaggacaacaagctcgaggtccagaaggtcagcaacacccagtatcacgaggtgatgaacctggagcccgagaacactctcgatcagcactcctttagcctcccgacttgccgaatctcggagtctgttaagaagctgatggaattagcttaccagaccctcctcgaggccacaaccagctctgaccagtgcgcagttcagctgttttattcggtgaggaatatatttcatctgtttcatgatgtggttcccacataccacaaagagaacctgcagaaacttccccagctcgcggccatccaccataataattgtatgtatatcgcgcaccatttacttaccctgggtcatcagttccggctgcgtctggcaccaattttgtgtgatgggacagccacctttgtggatctggtgcccggttttcggcgcttaggaaccgagtgctttttggcgcagatgagagcccaaaaaggggagctgctggagcgacttagtagcgctcggaacttctcaaacatggacgatgaagagaattactccgcggccagcaaagccgtcaggcaagtcctgcatcagctcaagcgcctcggaatcgtgtggcaggacgtgcttccagttaatatctactgcaaagctatgggcacactcctgaacacggccatcagcgaagtcattggtaagatcacagccctagagtag

SEQ ID NO: 141793 - DNA, 1776 bp, synthetic construct
  misc_feature 1..1776: note = Description of Artificial Sequence: Synthetic coding sequence
  source 1..1776: mol_type = other DNA
atgtgggaaaggctgaactgcgcagctgaggacttttacagtagacttctgcagaaattcaacgaggagaagaaggggattagaaaagatccattcctgtacgaagctgacgtacaagtccagttgatctctaaaggccagcccaacccccttaagaacattctcaatgagaacgatattgtttttattgtagaaaaagttcctcttgaaaaagaagaaacaagtcatatagaggagctccagtctgaagagactgcaatatccgatttctctactggtgagaatgtcggacccctcgctctgccggttggcaaggctcgacaattaatcggcttgtacacaatggcccacaatcccaacatgactcacctgaagattaatctgccagttacagccctgccccctctctgggtacggtgcgattcgagcgatcccgaggggacatgctggctgggcgccgagttgataacaaccaacaatagcattactggaatagtgttgtatgtggtgtcctgcaaggctgacaagaactactcagtgaacctagaaaatctgaaaaacttgcataagaagcgccatcatctgagtactgtgacaagcaaagggtttgcccagtatgagctatttaagagtagcgccttagatgataccattaccgctagccagacagcaatagccctagatatctcttggagccctgtggatgaaatcctccagattcctcctcttagtagcaccgctacactgaacattaaggtggagagtggcgagccaagaggtcccctgaatcacctatacagagaactaaagtttctgctggttcttgctgatggtctgcggactggggttacagaatggctggagccgctggaagcaaaatcggccgtcgagcttgtgcaggaatttctgaatgatctaaataagctggacgggttcggagactcgacgaaaaaggacaccgaggtggaaaccctgaaacacgacacagccgcagttgaccgctccgtgaaacgtttgttcaaggttcgcagcgacttagacttcgctgaacagctgtggtgcaaaatgtcgagtagcgtgatttcctatcaagacttagttaaatgcttcaccttgatcatccagagtctgcagcggggcgatatccagccatggctccacagtggctccaatagtctcctttctaagcttatacatcaatcataccacggcaccatggatacggttagcctctccggaaccataccagtgcagatgttgctagagatcggtttggacaagttgaagaaagactacatctcattcttcatcggccaagaactggcttccctcaatcacctcgagtacttcattgcacctagcgtggacattcaggaacaagtgtacagagtgcagaagctgcatcacatcctggagattctggtttcctgtatgcctttcattaaatcccaacacgaactgttgttcagcttgacacagatctgtattaagtattataagcagaaccccctggacgaacagcacatcttccagctgcccgtcaggcctacagcggttaaaaacctctatcaatccgagaagccacagaaatggcgcgttgagatctactctggtcaaaaaaagattaagaccgtttggcagttatccgattctagcccgatcgatcatttgaactttcacaagccagatttctccgaactcacgcttaacggaagcttggaagaacgcatttttttcacgaacatggtaacttgctcgcaagttcattttaaatag

SEQ ID NO: 141794 - DNA, 1434 bp, synthetic construct
  misc_feature 1..1434: note = Description of Artificial Sequence: Synthetic coding sequence
  source 1..1434: mol_type = other DNA
atggctcacaatcctaacatgacacacctcaagatcaacctccccgtcacagccttacctcctttgtgggtgcgatgcgacagctcggacccggagggcacgtgttggttgggggccgagttgattactaccaataattctataaccgggatagttttgtatgttgtgtcatgcaaggccgacaaaaattattcggtgaacctcgagaacctgaagaacttgcacaagaagcgccaccatctttccactgtgaccagtaagggttttgctcaatacgaactgtttaagtcctctgctctggacgataccattaccgcatctcaaacagccattgctctggacatatcttggagccctgttgatgagatcctgcagattcccccgctgtcgtcaaccgctactctcaacatcaaagttgagtccggtgagccccgcggccctcttaaccatctctaccgggaattgaagttcctactcgtgctcgccgacggactgaggactggggtgacggagtggctggagccactggaagctaagagcgccgttgaactggtgcaggaattcttgaacgaccttaacaagctggacggtttcggggacagcaccaagaaggacaccgaagtcgaaacactgaaacacgacacagctgctgtggatagatcggtgaagcgtctcttcaaggtaaggtcagaccttgacttcgccgaacagctttggtgcaaaatgagctcatcggtcatatcctaccaggacttagtgaagtgttttactctcatcattcagtcactacagcgtggagatatccagccctggcttcactcggggagcaattccttgctgagcaaactaatccatcagtcttatcacgggacgatggataccgtcagcttatctgggaccatccccgtgcagatgctcctagaaattggcctggacaaactcaaaaaggattatatttcatttttcattggccaggagctggcctcactcaatcacctggagtattttatagcgccttcagttgacatacaagagcaagtctatagagtacagaaactgcaccatatcctggaaattctcgtcagctgtatgcctttcatcaagtctcagcatgaactactgttttcacttacccaaatctgcatcaaatattacaaacaaaaccctcttgacgagcaacatatctttcaacttcccgtccgccccactgcagtgaaaaacctttatcaatcagaaaagccacagaaatggagggtggaaatctatagcggacaaaaaaagatcaagaccgtctggcagctcagtgactcgagccctatagatcaccttaactttcataaaccagatttttccgaactgaccttaaacgggagccttgaggagcgcattttcttcaccaacatggtgacttgttctcaggtgcatttcaagtag

SEQ ID NO: 141795 - DNA, 1434 bp, synthetic construct
  misc_feature 1..1434: note = Description of Artificial Sequence: Synthetic coding sequence
  source 1..1434: mol_type = other DNA
atggcccacaatcccaacatgacccacctcaagataaatctgccggtcacagccctcccacccctttgggtcaggtgtgatagttctgatcctgaagggacctgctggcttggcgcagagcttataacaacaaataactcaatcacagggattgtcttatacgtggtgagctgcaaggccgacaagaactacagtgtcaacttggagaatttaaaaaacttgcacaagaagcggcaccacctgagtaccgtcacgtccaagggattcgcccaatatgagctatttaagtcaagcgcactcgatgacaccatcacagccagtcagaccgccattgcgctggatatttcatggtcacccgtcgatgagatactacagatccccccactttcaagcactgctactctcaacatcaaagttgagtcaggtgaaccccgtggccccctgaatcacttatacagagaactgaaatttcttctggtgctggccgacggccttaggaccggagtgaccgaatggctcgagcctcttgaagcaaaatccgctgttgagcttgtgcaggagtttttgaacgacctgaataaactggatggatttggagattctaccaaaaaggacacagaagtggaaacgttaaaacacgatacagcagcagttgacaggagcgtcaagaggctgttcaaggtgagaagcgatttggacttcgccgaacagctgtggtgcaagatgagtagctcagtcatctcatatcaagatctagtgaaatgcttcactcttataatccagtccctgcagcggggagacattcagccctggctgcattctgggtctaacagtctcttaagtaaactgatccaccagagctatcacggtaccatggataccgtgagcctctccggcacgattcctgtgcaaatgctgcttgagatcggactcgataaattgaagaaagactacataagctttttcatcggccaggagctcgccagcttaaaccacctggaatactttattgctccatccgtagatattcaggaacaggtttatagggtgcagaagctgcaccacattttggagattctggtgtcttgcatgcccttcatcaagtcccagcatgaactgctcttcagcctgactcaaatatgcattaaatactacaaacagaaccctcttgatgagcagcatattttccagctgcccgtgcgccccacagccgtgaaaaatctctatcagtcggagaagccacagaagtggagagtggagatctactccgggcaaaagaagattaagacagtgtggcagctgagcgacagctccccaatagaccatcttaattttcacaagcctgacttttccgaactaacactcaacggctccctggaagagcgcatcttcttcactaacatggtgacctgctctcaggtgcactttaagtag

SEQ ID NO: 141796 - DNA, 1275 bp, synthetic construct
  misc_feature 1..1275: note = Description of Artificial Sequence: Synthetic coding sequence
  source 1..1275: mol_type = other DNA
atggccgcactgggcgacgaagtacttgacggctacgtgttccctgcatgcccgccatgctcataccggtatccctatcccgccgctaccaaagggaaaggtgctgccgggggctcttggcagcagcgaggacggggctgtctccccgcaagctctccgtgtagcgcaggcgccgccagtctctcatttccaggttgcggacggctaaccgcagctgagtacttcgacagctaccagcgcgaacggctaatggccttactggctcaggtcggccccggacttggccctcgcgcgaggcgggccggaagctgtgacgtggctgtgcaggtttccccaagaattgacgccgccgtgcagtgttcactgggacgcaggacacttcaacgccgtgcacgcgaccccgagtcccccgctggaccaggcgccgaggggacaacaggtggtggaagtttttctcagcagccctctcgcagaggactggaacaaggatcgccacaaaacggagcaccccggcctatgcgatttccaagaacggttgccgtgtactctcctcttgctctgcggagactcactgcttttctggaggggcctggccctgccgcaggagaacagcgtagtggcgcctccgacggcgagcgcgggcctccacccgcccgactacagggcccggaggagggagaggtgtggacgaaaaaggcgcccagacggccacagagcgacgatgatggcgaagcccaggcggccgtgcgtgccagctgggagcaaccggccgacggacccgaactccctcctagggaagctcaggagggggaagcagctccgagaagtgccctgcgctctcccggtcagccccccagcgccggacgagcgagagacggaggcgacggacgggaagccgccgttgcaggagaggggccctcacccagaagcccggagctggggaaggagcggttacggtttcagttcctagaacagaagtacgggtattaccactgcaaagattgcaacattcgctgggagtctgcttacgtctggtgcgttcagggcaccaacaaggtctacttcaagcaattctgcaggacttgccaaaagtcctacaatccctaccgcgtggaggacattacgtgtcagagttgcaaacagacaaggtgttcctgtcctgtgaaactccggcacgtggacccaaagagaccacatcggcaggacctgtgcggtcggtgcaaagggaaacggttgtcctgcgattccacttttagtttcaagtatatcatatag

SEQ ID NO: 141797 - DNA, 1719 bp, synthetic construct
  misc_feature 1..1719: note = Description of Artificial Sequence: Synthetic coding sequence
  source 1..1719: mol_type = other DNA
atggccgctccgcgcccgagccctgcaatctcagtaagtgtgtccgcaccagctttctatgccccccagaagaaattcggtcccgtcgtggcacccaagcctaaggtcaatccctttaggcctggcgatagcgagccccccccggcaccaggcgctcagcgagctcagatgggccgcgtgggagagatccccccaccgccccccgaggacttcccccttccaccgcccccactggctggagatggagacgatgcagaaggcgctctcggtggcgctttccccccccctcctccacctatagaggaatccttccctcctgcccccctggaagaagagatcttccctagtcctcccccccctcccgaggaagagggagggcctgaggcacctattccccctcccccacaacctcgcgagaaggtgtctagcatcgatctggaaattgacagcctatcgtctttgcttgatgatatgacgaaaaacgatccttttaaggcacgggtgagctccggctacgttccaccacccgtcgccactccctttagttccaagagttccaccaaacctgccgcggggggcaccgccccgttacccccctggaaaagtccctctagttctcagccgctgccccaggtacctgcccccgcccaaagccaaacgcagttccacgtgcaacctcaaccgcagccaaagcctcaggtgcaactgcacgtccagtcccagacgcagccggtaagtctcgctaacacacagccccgtggacctcccgcctcctctcccgcaccggcccctaagttcagcccagtaactccgaaatttacacccgtggcttcaaagttctcacccggagcccccggggggtcaggaagccagcctaatcagaagcttggccaccctgaagcattgagcgccggcacaggctcccctcagccccccagcttcacttacgcccagcagagggagaagcctcgcgtgcaggagaagcagcatccggtgcctccaccggcgcagaatcagaatcaggtccgaagccccggagcccctggtccgctgaccttgaaagaagtcgaagaattggagcagctcacccagcagctcatgcaagatatggagcaccctcagagacagaacgtggctgtcaacgagctgtgtgggcgctgccaccagccactagccagggcccaacccgccgtgagagcactgggacaactattccacattgcttgttttacgtgccatcagtgtgcacagcagcttcagggacagcagttctacagcttagagggcgctccctactgcgagggatgctatacggatacgttggagaagtgtaacacctgtggagagcccatcacagaccgcatgctgcgcgctactggcaaagcttaccacccccactgttttacatgcgtagtgtgcgccaggcctctcgagggtacttcctttattgtcgaccaggccaataggccccactgcgtccctgactatcacaagcaatacgccccacgctgctccgtatgtagtgagcccatcatgcctgagccaggtcgggatgagacagtccgcgtggtagctctggacaagaattttcatatgaagtgttataagtgtgaagattgtggaaaacctctgagcattgaggctgacgataatgggtgtttccccctcgatgggcatgtcttgtgcaggaaatgtcatacagctcgggcccagacttag

SEQ ID NO: 141798 - DNA, 1623 bp, synthetic construct
  misc_feature 1..1623: note = Description of Artificial Sequence: Synthetic coding sequence
  source 1..1623: mol_type = other DNA
gccgctccacggccttcaccggcgatttcagtgtccgtgtcggccccagctttctatgctccacagaaaaagttcgggcccgtggtggcccctaaaccaaaggtgaatccgtttcggcctggggactctgagccgccccctgccccaggcgcacagcgcgcacagatgggccgggtgggggaaattccccccccaccacccgaggacttccctctcccccccccaccactggccggcgatggagatgatgccgagggggcgttgggaggcgctttcccgcctcctccaccccctatcgaggaatccttcccacctgccccactggaagaggagatcttccccagcccccctcctccccctgaggaggagggtggacccgaggctcctattcctccaccgcctcaggtctcctccggctatgtcccaccgccagtggccacgcctttttcctcaaaaagtagcacgaaaccagccgcgggaggaacagcaccactgccaccctggaaatcccccagcagtagccagcctctgccacaggtacccgcccctgcacaatcacaaacacaatttcacgtccagccccaaccgcaacctaaaccacaggtccaactacacgtgcaaagtcaaacgcagcccgtatccctggccaacacccagccccgcgggcctcctgccagttctcccgcacccgcccccaagttctctcccgtgaccccaaagttcactcccgtggcctcgaagtttagccccggcgctccgggaggttccggctcacagcctaatcagaagctgggacatcctgaagccctgagcgccggaactggctcacctcagcccccttccttcacctacgcacagcagcgcgaaaagccaagagtccaggagaagcagcacccagtgcccccacccgcgcaaaaccagaaccaggttagatcccccggagccccagggccacttacgctcaaggaggtcgaggagctggagcagctgacccaacaattgatgcaggatatggagcatccacagaggcagaatgtagctgtgaatgagctgtgcgggagatgtcaccaaccattggcccgcgcgcagccggcggtccgggcgcttgggcaactcttccatattgcctgcttcacatgccatcagtgcgcccagcaactccaggggcaacagttttattcactcgaaggcgccccctactgcgaagggtgttatacggacactttggagaaatgcaacacttgtggcgagcctatcaccgaccgtatgttacgggccaccggaaaggcgtaccatcctcattgctttacatgtgtcgtgtgtgcccgacccctggagggcactagtttcattgtggaccaggcaaacaggccccattgcgtgcccgactaccacaagcaatacgctccaagatgctcagtgtgttcagagccaatcatgcccgaacctggacgggatgaaacagttagagtcgtagccctggataagaacttccatatgaagtgctacaaatgtgaagattgcgggaagccactaagcatcgaggcagacgataatggatgtttcccactggacggacacgtgctgtgtcgcaagtgccatacagccagagctcagacttag

SEQ ID NO: 141799 - DNA, 1248 bp, synthetic construct
  misc_feature 1..1248: note = Description of Artificial Sequence: Synthetic coding sequence
  source 1..1248: mol_type = other DNA
atgacaaagaacgaccctttcaaagctcgggtgtcaagcgggtacgttcccccacctgtggccaccccttttagctctaagtccagcaccaagcccgcagccggtggcactgcccccttgcccccctggaagtccccatcttcgtcacagccattacctcaagttcccgcacctgcacagtcgcagacacaattccacgtgcagccgcagccacagccaaagccccaagtacaattacacgtccagtcacagacccagcctgtatccctggccaatactcaacctcgcggcccacctgctagtagccctgctcccgctccaaagttctcgccagttacccctaagtttacacccgttgcgtccaagtttagtcctggggctcctggaggcagcggcagccagccaaaccagaaactgggccaccccgaggcattgtccgccggcacaggcagtccccaacccccttctttcacatatgcccaacagagagagaagccacgagttcaggagaagcagcatccagtacccccccctgcgcagaatcagaatcaggtccggtccccaggggcccccgggcctttgaccctgaaggaagtagaggagttggagcagcttactcagcagcttatgcaggatatggagcatccacagcgtcagaacgttgctgtgaacgagctatgtggccggtgccatcagccactagctagggcacaacctgcggtcagagctctggggcagctgttccatatcgcctgttttacatgccatcaatgcgcacagcagctgcagggtcagcagttctattccctggaaggggccccttactgcgagggatgttacacagataccctggagaaatgtaatacctgtggcgaaccaataactgataggatgctgagggctactggtaaagcataccatccacattgcttcacctgcgtggtatgtgcgcgccccctagaagggacttcatttattgttgaccaggcgaatcgtccccactgcgtacctgattaccacaagcagtacgcaccgcgctgctccgtctgcagcgagcccatcatgcctgaaccagggcgcgacgagaccgtcagggtggtggcactcgacaagaactttcacatgaagtgctacaagtgtgaggactgcggaaaacctctgtcgattgaagcagatgacaacggatgtttcccacttgacggtcacgtcctttgtcggaaatgccacaccgcacgtgcgcagacctag

SEQ ID NO: 141800 - DNA, 1458 bp, synthetic construct
  misc_feature 1..1458: note = Description of Artificial Sequence: Synthetic coding sequence
  source 1..1458: mol_type = other DNA
atgggacgggtcggggaaatacccccaccgccgcctgaggattttcccctacctccccctcctctggccggcgacggtgacgatgcggagggcgccctggggggggcatttccccctccaccgcctcccatcgaagaaagtttccccccagcgccgctggaggaggaaattttcccaagcccccctccgcccccagaagaagaggggggtccagaggcccctatcccacccccaccacaggtgagtagcggatatgtgccaccgcccgtcgcgactcccttttcatcaaagtcaagtaccaaacctgctgcaggtggaactgcccctctgcctccttggaaaagcccctcctcttcccagcctctgcctcaggtgcctgcccccgcccagagccagacgcagttccacgtgcagccacagcctcaacccaagccacaggttcaactgcacgtacaatctcagacccaaccggtctccctcgctaacactcaaccaagggggccgccagcatccagcccagctccggctcccaaatttagtccagtgacccctaagtttactcccgtggcttccaagttctccccaggggcgcctggcgggtctggcagccagccaaatcagaagctggggcaccccgaggctctgagtgcagggaccggttctccgcagcccccaagtttcacctatgctcagcagcgcgagaagcctcgagtgcaggagaagcaacaccccgtcccaccacccgcacagaatcagaaccaggtccgatcaccaggcgcaccaggaccgttaacactcaaagaagtggaagagcttgagcagctcacacagcagcttatgcaggatatggagcatcctcagcgtcaaaacgtcgcagtcaatgaactctgcgggcggtgccaccagccactggcacgggcccagcctgccgtccgggccctcggacagctattccacatcgcttgctttacatgtcatcagtgcgcccaacagctgcaggggcaacaattctattctttagagggcgccccttactgcgaaggctgctacacagataccctggaaaagtgcaatacttgtggggagcccattaccgacaggatgcttagagccacgggaaaagcctaccacccacactgttttacgtgtgtagtgtgcgcaagacctttagaaggtacctcatttatcgtggatcaggccaaccgcccccactgcgttccagattatcataagcagtatgcaccgcgttgctctgtttgttccgaacctattatgccagaaccaggccgagatgagactgtaagggtggtagcactggataagaactttcatatgaagtgctataagtgtgaagactgcggaaaaccgttgtctatagaggctgatgataacggatgtttccccctcgatggacatgtattgtgcaggaagtgtcatactgcgcgcgcccaaacctag

SEQ ID NO: 141801 - DNA, 495 bp, synthetic construct
  misc_feature 1..495: note = Description of Artificial Sequence: Synthetic coding sequence
  source 1..495: mol_type = other DNA
atggccgcacctagaccaagccctgccatatcagtttcagtgagcgccccagccttctatgcaccgcaaaagaaattcggtcctgtagtggcacccaagcctaaggtgaatcctttccgtcctggggatagcgaaccaccaccagcccccggggcacagagggcacagatgggaagggtcggcgagataccgccaccacccccggaggacttccctctgccaccacctcctctcgccggagacggtgatgacgctgagggtgcactgggtggggcttttccaccccctcctccacccattgaggagagctttccccctgcgcccctagaagaagaaatttttccttctcctccaccaccaccagaagaggaaggcggcccagaagccccgataccccctccaccacagccacgggagaaggtgtcaagtattgatttagagattgactctttaagcagcttattggatgacatgaccaaaaatgatcccttctag

SEQ ID NO: 141802 - DNA, 852 bp, synthetic construct
  misc_feature 1..852: note = Description of Artificial Sequence: Synthetic coding sequence
  source 1..852: mol_type = other DNA
atggacctgtggccaggggcctggatgctgctgctgctgctcttcctgctgctgctcttcctgctgcccaccctgtggttctgcagccccagcgccaagtacttcttcaagatggccttctacaacggctggatcctcttcctggccgtgctggccatccctgtgtgtgctgtgcggggcagaaatgtggagaacatgaagatcctgcggctgatgctgctgcacatcaagtacctgtatggcatccgggtggaggtgcggggggcccaccacttcccccccagccagccctacgtggtggtgagcaaccaccagagcagcctggacctgctgggcatgatggaggtgctgcccggccgctgtgtgcccatcgccaagcgggagctgctgtgggccggcagcgctggcctggcctgctggctggccggggtcatcttcatcgacaggaagaggactggagatgccatctctgtgatgtctgaggtggcccagaccctgctgacccaggatgtgcgggtgtgggtgtttcctgagggcaccaggaaccacaacggctccatgctgcccttcaagagaggagccttccacctggccgtgcaggcccaggtgcccatcgtgcccatcgtgatgagcagctaccaggacttctactgcaagaaggagcggcgcttcaccagcggccagtgccaggtgcgggtgctgccccctgtgcccacagagggcctgaccccagatgatgtgcctgccctggccgacagagtgcgccacagcatgctgaccgtcttccgggagatcagcacagatggccggggcggcggggactacctgaagaagccaggcggcggcggctag

SEQ ID NO: 141803 - DNA, 852 bp, synthetic construct; identical to SEQ ID NO: 141802
  misc_feature 1..852: note = Description of Artificial Sequence: Synthetic coding sequence
  source 1..852: mol_type = other DNA

SEQ ID NO: 141804 - DNA, 852 bp, synthetic construct; identical to SEQ ID NO: 141802
  misc_feature 1..852: note = Description of Artificial Sequence: Synthetic coding sequence
  source 1..852: mol_type = other DNA

SEQ ID NO: 141805 - DNA, 852 bp, synthetic construct; identical to SEQ ID NO: 141802
  misc_feature 1..852: note = Description of Artificial Sequence: Synthetic coding sequence
  source 1..852: mol_type = other DNA

SEQ ID NO: 141806 - DNA, 852 bp, synthetic construct; identical to SEQ ID NO: 141802
  misc_feature 1..852: note = Description of Artificial Sequence: Synthetic coding sequence
  source 1..852: mol_type = other DNA

SEQ ID NO: 141807 - DNA, 852 bp, synthetic construct; identical to SEQ ID NO: 141802
  misc_feature 1..852: note = Description of Artificial Sequence: Synthetic coding sequence
  source 1..852: mol_type = other DNA

SEQ ID NO: 141808 - DNA, 852 bp, synthetic construct; identical to SEQ ID NO: 141802
  misc_feature 1..852: note = Description of Artificial Sequence: Synthetic coding sequence
  source 1..852: mol_type = other DNA

SEQ ID NO: 141809 - DNA, 852 bp, synthetic construct; identical to SEQ ID NO: 141802
  misc_feature 1..852: note = Description of Artificial Sequence: Synthetic coding sequence
  source 1..852: mol_type = other DNA

SEQ ID NO: 141810 - DNA, 852 bp, synthetic construct; identical to SEQ ID NO: 141802
  misc_feature 1..852: note = Description of Artificial Sequence: Synthetic coding sequence
  source 1..852: mol_type = other DNA

SEQ ID NO: 141811 - DNA, 852 bp, synthetic construct; identical to SEQ ID NO: 141802
  misc_feature 1..852: note = Description of Artificial Sequence: Synthetic coding sequence
  source 1..852: mol_type = other DNA

SEQ ID NO: 141812 - DNA, 852 bp, synthetic construct; identical to SEQ ID NO: 141802
  misc_feature 1..852: note = Description of Artificial Sequence: Synthetic coding sequence
  source 1..852: mol_type = other DNA

SEQ ID NO: 141813 - DNA, 852 bp, synthetic construct; identical to SEQ ID NO: 141802
  misc_feature 1..852: note = Description of Artificial Sequence: Synthetic coding sequence
  source 1..852: mol_type = other DNA

SEQ ID NO: 141814 - DNA, 516 bp, synthetic construct
  misc_feature 1..516: note = Description of Artificial Sequence: Synthetic coding sequence
  source 1..516: mol_type = other DNA
atgatggaggtgctgcccggccgctgtgtgcccatcgccaagcgggagctgctgtgggccggcagcgctggcctggcctgctggctggccggggtcatcttcatcgacaggaagaggactggagatgccatctctgtgatgtctgaggtggcccagaccctgctgacccaggatgtgcgggtgtgggtgtttcctgagggcaccaggaaccacaacggctccatgctgcccttcaagagaggagccttccacctggccgtgcaggcccaggtgcccatcgtgcccatcgtgatgagcagctaccaggacttctactgcaagaaggagcggcgcttcaccagcggccagtgccaggtgcgggtgctgccccctgtgcccacagagggcctgaccccagatgatgtgcctgccctggccgacagagtgcgccacagcatgctgaccgtcttccgggagatcagcacagatggccggggcggcggggactacctgaagaagccaggcggcggcggctag

SEQ ID NO: 141815 - DNA, 852 bp, synthetic construct; identical to SEQ ID NO: 141802
  misc_feature 1..852: note = Description of Artificial Sequence: Synthetic coding sequence
  source 1..852: mol_type = other DNA

SEQ ID NO: 141816 - DNA, 852 bp, synthetic construct; identical to SEQ ID NO: 141802
  misc_feature 1..852: note = Description of Artificial Sequence: Synthetic coding sequence
  source 1..852: mol_type = other DNA

SEQ ID NO: 141817 - DNA, 852 bp, synthetic construct; identical to SEQ ID NO: 141802
  misc_feature 1..852: note = Description of Artificial Sequence: Synthetic coding sequence
  source 1..852: mol_type = other DNA

SEQ ID NO: 141818 - DNA, 852 bp, synthetic construct; identical to SEQ ID NO: 141802
  misc_feature 1..852: note = Description of Artificial Sequence: Synthetic coding sequence
  source 1..852: mol_type = other DNA

SEQ ID NO: 141819 - DNA, 852 bp, synthetic construct; identical to SEQ ID NO: 141802
  misc_feature 1..852: note = Description of Artificial Sequence: Synthetic coding sequence
  source 1..852: mol_type = other DNA

SEQ ID NO: 141820 - DNA, 852 bp, synthetic construct; identical to SEQ ID NO: 141802
  misc_feature 1..852: note = Description of Artificial Sequence: Synthetic coding sequence
  source 1..852: mol_type = other DNA

SEQ ID NO: 141821 - DNA, 852 bp, synthetic construct; identical to SEQ ID NO: 141802
  misc_feature 1..852: note = Description of Artificial Sequence: Synthetic coding sequence
  source 1..852: mol_type = other DNA

SEQ ID NO: 141822 - DNA, 852 bp, synthetic construct; identical to SEQ ID NO: 141802
  misc_feature 1..852: note = Description of Artificial Sequence: Synthetic coding sequence
  source 1..852: mol_type = other DNA

SEQ ID NO: 141823 - DNA, 852 bp, synthetic construct; identical to SEQ ID NO: 141802
  misc_feature 1..852: note = Description of Artificial Sequence: Synthetic coding sequence
  source 1..852: mol_type = other DNA

SEQ ID NO: 141824 - DNA, 852 bp, synthetic construct; identical to SEQ ID NO: 141802
  misc_feature 1..852: note = Description of Artificial Sequence: Synthetic coding sequence
  source 1..852: mol_type = other DNA

SEQ ID NO: 141825 - DNA, 852 bp, synthetic construct; identical to SEQ ID NO: 141802
  misc_feature 1..852: note = Description of Artificial Sequence: Synthetic coding sequence
  source 1..852: mol_type = other DNA

SEQ ID NO: 141826 - DNA, 852 bp, synthetic construct; identical to SEQ ID NO: 141802
  misc_feature 1..852: note = Description of Artificial Sequence: Synthetic coding sequence
  source 1..852: mol_type = other DNA

SEQ ID NO: 141827 - DNA, 852 bp, synthetic construct; identical to SEQ ID NO: 141802
  misc_feature 1..852: note = Description of Artificial Sequence: Synthetic coding sequence
  source 1..852: mol_type = other DNA

SEQ ID NO: 141828 - DNA, 852 bp, synthetic construct; identical to SEQ ID NO: 141802
  misc_feature 1..852: note = Description of Artificial Sequence: Synthetic coding sequence
  source 1..852: mol_type = other DNA

SEQ ID NO: 141829 - DNA, 852 bp, synthetic construct; identical to SEQ ID NO: 141802
  misc_feature 1..852: note = Description of Artificial Sequence: Synthetic coding sequence
  source 1..852: mol_type = other DNA

SEQ ID NO: 141830 - DNA, 852 bp, synthetic construct; identical to SEQ ID NO: 141802
  misc_feature 1..852: note = Description of Artificial Sequence: Synthetic coding sequence
  source 1..852: mol_type = other DNA

SEQ ID NO: 141831 - DNA, 852 bp, synthetic construct; identical to SEQ ID NO: 141802
  misc_feature 1..852: note = Description of Artificial Sequence: Synthetic coding sequence
  source 1..852: mol_type = other DNA

SEQ ID NO: 141832 - DNA, 852 bp, synthetic construct; identical to SEQ ID NO: 141802
  misc_feature 1..852: note = Description of Artificial Sequence: Synthetic coding sequence
  source 1..852: mol_type = other DNA

SEQ ID NO: 141833 - DNA, 852 bp, synthetic construct; identical to SEQ ID NO: 141802
  misc_feature 1..852: note = Description of Artificial Sequence: Synthetic coding sequence
  source 1..852: mol_type = other DNA

SEQ ID NO: 141834 - DNA, 852 bp, synthetic construct; identical to SEQ ID NO: 141802
  misc_feature 1..852: note = Description of Artificial Sequence: Synthetic coding sequence
  source 1..852: mol_type = other DNA

SEQ ID NO: 141835 - DNA, 852 bp, synthetic construct; identical to SEQ ID NO: 141802
  misc_feature 1..852: note = Description of Artificial Sequence: Synthetic coding sequence
  source 1..852: mol_type = other DNA

SEQ ID NO: 141836 - DNA, 852 bp, synthetic construct; identical to SEQ ID NO: 141802
  misc_feature 1..852: note = Description of Artificial Sequence: Synthetic coding sequence
  source 1..852: mol_type = other DNA

SEQ ID NO: 141837 - DNA, 852 bp, synthetic construct; identical to SEQ ID NO: 141802
  misc_feature 1..852: note = Description of Artificial Sequence: Synthetic coding sequence
  source 1..852: mol_type = other DNA

SEQ ID NO: 141838 - DNA, 852 bp, synthetic construct; identical to SEQ ID NO: 141802
  misc_feature 1..852: note = Description of Artificial Sequence: Synthetic coding sequence
  source 1..852: mol_type = other DNA

SEQ ID NO: 141839 - DNA, 852 bp, synthetic construct; identical to SEQ ID NO: 141802
  misc_feature 1..852: note = Description of Artificial Sequence: Synthetic coding sequence
  source 1..852: mol_type = other DNA

SEQ ID NO: 141840 - DNA, 852 bp, synthetic construct; identical to SEQ ID NO: 141802
  misc_feature 1..852: note = Description of Artificial Sequence: Synthetic coding sequence
  source 1..852: mol_type = other DNA

SEQ ID NO: 141841 - DNA, 852 bp, synthetic construct; identical to SEQ ID NO: 141802
  misc_feature 1..852: note = Description of Artificial Sequence: Synthetic coding sequence
  source 1..852: mol_type = other DNA

SEQ ID NO: 141842 - DNA, 852 bp, synthetic construct; identical to SEQ ID NO: 141802
  misc_feature 1..852: note = Description of Artificial Sequence: Synthetic coding sequence
  source 1..852: mol_type = other DNA

SEQ ID NO: 141843 - DNA, 852 bp, synthetic construct; identical to SEQ ID NO: 141802
  misc_feature 1..852: note = Description of Artificial Sequence: Synthetic coding sequence
  source 1..852: mol_type = other DNA

SEQ ID NO: 141844 - DNA, 852 bp, synthetic construct; identical to SEQ ID NO: 141802
  misc_feature 1..852: note = Description of Artificial Sequence: Synthetic coding sequence
  source 1..852: mol_type = other DNA

SEQ ID NO: 141845 - DNA, 276 bp, synthetic construct
  misc_feature 1..276: note = Description of Artificial Sequence: Synthetic coding sequence
  source 1..276: mol_type = other DNA
cacagcgccagcacccccatcctgacccacagccacccagcccagggcatgatggaggtgctgcccggccgctgtgtgcccatcgccaagcgggagctgctgtgggccggcagcgctggcctggcctgctggctggccggggtcatcttcatcgacaggaagaggactggagatgccatctctgtgatgtctgaggtggcccagaccctgctgacccaggatgtgagccaccctggcctgctgctgcaggagggcgccagcctgcacctgggctag

SEQ ID NO: 141846 - DNA, 276 bp, synthetic construct; identical to SEQ ID NO: 141845
  misc_feature 1..276: note = Description of Artificial Sequence: Synthetic coding sequence
  source 1..276: mol_type = other DNA

SEQ ID NO: 141847 - DNA, 276 bp, synthetic construct; identical to SEQ ID NO: 141845
  misc_feature 1..276: note = Description of Artificial Sequence: Synthetic coding sequence
  source 1..276: mol_type = other DNA

SEQ ID NO: 141848 - DNA, 516 bp, synthetic construct; identical to SEQ ID NO: 141814
  misc_feature 1..516: note = Description of Artificial Sequence: Synthetic coding sequence
  source 1..516: mol_type = other DNA

SEQ ID NO: 141849 - DNA, 516 bp, synthetic construct; identical to SEQ ID NO: 141814
  misc_feature 1..516: note = Description of Artificial Sequence: Synthetic coding sequence
  source 1..516: mol_type = other DNA

SEQ ID NO: 141850 - DNA, 276 bp, synthetic construct; identical to SEQ ID NO: 141845
  misc_feature 1..276: note = Description of Artificial Sequence: Synthetic coding sequence
  source 1..276: mol_type = other DNA

SEQ ID NO: 141851 - DNA, 276 bp, synthetic construct; identical to SEQ ID NO: 141845
  misc_feature 1..276: note = Description of Artificial Sequence: Synthetic coding sequence
  source 1..276: mol_type = other DNA

SEQ ID NO: 141852 - DNA, 276 bp, synthetic construct; identical to SEQ ID NO: 141845
  misc_feature 1..276: note = Description of Artificial Sequence: Synthetic coding sequence
  source 1..276: mol_type = other DNA

SEQ ID NO: 141853 - DNA, 516 bp, synthetic construct; identical to SEQ ID NO: 141814
  misc_feature 1..516: note = Description of Artificial Sequence: Synthetic coding sequence
  source 1..516: mol_type = other DNA

SEQ ID NO: 141854 - DNA, 516 bp, synthetic construct; identical to SEQ ID NO: 141814
  misc_feature 1..516: note = Description of Artificial Sequence: Synthetic coding sequence
  source 1..516: mol_type = other DNA

SEQ ID NO: 141855 - DNA, 276 bp, synthetic construct; identical to SEQ ID NO: 141845
  misc_feature 1..276: note = Description of Artificial Sequence: Synthetic coding sequence
  source 1..276: mol_type = other DNA

SEQ ID NO: 141856 - DNA, 516 bp, synthetic construct; identical to SEQ ID NO: 141814
  misc_feature 1..516: note = Description of Artificial Sequence: Synthetic coding sequence
  source 1..516: mol_type = other DNA

SEQ ID NO: 141857 - DNA, 516 bp, synthetic construct; identical to SEQ ID NO: 141814
  misc_feature 1..516: note = Description of Artificial Sequence: Synthetic coding sequence
  source 1..516: mol_type = other DNA

SEQ ID NO: 141858 - DNA, 741 bp, synthetic construct
  misc_feature 1..741: note = Description of Artificial Sequence: Synthetic coding sequence
  source 1..741: mol_type = other DNA
atggagctgtggccctgcctggccgccgccctgctgctgctgctgctgctggtgcagctgagcagagctgctgagttctacgccaaggtggccctgtactgtgccctgtgcttcaccgtgtctgctgtggccagcctggtgtgcctgctgcggcacggcggccgcacagtggagaacatgagcatcatcggctggtttgtgcgctccttcaagtacttctacggcctgcgctttgaggtgcgggacccccggcggctgcaggaggcccggccctgcgtcatcgtgagcaaccaccagagcatcctggacatgatgggcctgatggaggtgctgcctgagcgctgtgtgcagatcgccaagcgggagctgctcttcctgggccctgtgggcctcatcatgtacctgggcggcgtcttcttcatcaaccggcagaggagcagcacagccatgacagtgatggctgacctgggggagaggatggtgagagaaaatgtgcccatcgtgcctgtggtgtacagcagcttcagcagcttctacaacaccaagaagaagttcttcaccagcggcaccgtgacagtgcaggtgctggaggccatccccaccagcggcctgacagctgctgatgtgcctgccctggtggacacctgccaccgggccatgaggaccaccttcctgcacatcagcaagaccccccaggagaatggagccacagctggcagcggcgtgcagcctgcccagtag

SEQ ID NO: 141859 - DNA, 837 bp, synthetic construct
  misc_feature 1..837: note = Description of Artificial Sequence: Synthetic coding sequence
  source 1..837: mol_type = other DNA
atggagctgtggccctgcctggccgccgccctgctgctgctgctgctgctggtgcagctgagcagagctgctgagttctacgccaaggtggccctgtactgtgccctgtgcttcaccgtgtctgctgtggccagcctggtgtgcctgctgcggcacggcggccgcacagtggagaacatgagcatcatcggctggtttgtgcgctccttcaagtacttctacggcctgcgctttgaggtgcgggacccccggcggctgcaggaggcccggccctgcgtcatcgtgagcaaccaccagagcatcctggacatgatgggcctgatggaggtgctgcctgagcgctgtgtgcagatcgccaagcgggagctgctcttcctgggccctgtgggcctcatcatgtacctgggcggcgtcttcttcatcaaccggcagaggagcagcacagccatgacagtgatggctgacctgggggagaggatggtgcgggagaacctgaaggtgtggatctacccagagggcaccagaaatgacaacggggacctgctgcccttcaagaagggggccttctacctggccgtgcaggcccaggtgcccatcgtgcctgtggtgtacagcagcttcagcagcttctacaacaccaagaagaagttcttcaccagcggcaccgtgacagtgcaggtgctggaggccatccccaccagcggcctgacagctgctgatgtgcctgccctggtggacacctgccaccgggccatgaggaccaccttcctgcacatcagcaagaccccccaggagaatggagccacagctggcagcggcgtgcagcctgcccagtag

SEQ ID NO: 141860 - DNA, 837 bp, synthetic construct; identical to SEQ ID NO: 141859
  misc_feature 1..837: note = Description of Artificial Sequence: Synthetic coding sequence
  source 1..837: mol_type = other DNA

SEQ ID NO: 141861 - DNA, 1371 bp, synthetic construct
  misc_feature 1..1371: note = Description of Artificial Sequence: Synthetic coding sequence
  source 1..1371: mol_type = other DNA
atgttcctgctgctgccctttgacagcctgattgtgaacctgctgggcatcagcctgactgtgctcttcaccctgctgctggtgttcatcatcgtgcctgccatcttcggcgtgtcctttggcatcaggaagctgtacatgaagagcctgctgaagatctttgcctgggccaccctgaggatggagcggggggccaaggagaagaaccaccagctgtacaagccctacaccaacggcatcatcgccaaggaccccaccagcctggaggaggagatcaaggagatccgccgcagcggcagcagcaaggccctggacaacaccccagagtttgagctgagtgacatcttctacttctgcaggaagggcatggagaccatcatggatgatgaggtgaccaagcgcttctctgctgaggagctggagagctggaacctgctgagcaggaccaactacaacttccagtacatcagcctgcggctgactgtgctgtggggcctgggcgtgctgatccgctactgcttcctgctgcccctgcgcatcgccctggccttcaccggcatcagcctgctggtggtgggcaccaccgtggtgggctacctgcccaacggccgcttcaaggagttcatgagcaagcacgtgcacctgatgtgctaccgcatctgtgtgcgggccctgacagccatcatcacctaccatgacagagaaaatcggcccagaaatggaggcatctgtgtggccaaccacaccagccccattgatgtgatcatcctggccagtgatggctactatgccatggtgggccaggtgcacggcggcctgatgggcgtcatccagagggccatggtgaaggcctgcccccacgtgtggtttgagaggtctgaggtgaaggacagacacctggtggccaagaggctgacagagcacgtgcaggacaagagcaagctgcccatcctgatcttccctgagggcacctgcatcaacaacacctctgtgatgatgttcaagaagggcagctttgaaattggagccaccgtgtaccctgtggccatcaagtatgacccccagtttggagatgccttctggaacagcagcaaatatggcatggtgacctacctgctgaggatgatgacctcctgggccatcgtgtgcagcgtgtggtacctgccccccatgacccgggaggctgatgaagatgctgtgcagtttgccaacagagtgaagagcgccatcgcccggcagggcggcctggtggacctgctgtgggatggcggcctgaagcgggagaaggtgaaggacaccttcaaggaggagcagcagaagctgtacagcaagatgattgtgggcaaccacaaggacaggagccgctcctag

SEQ ID NO: 141862 - DNA, 1305 bp, synthetic construct
  misc_feature 1..1305: note = Description of Artificial Sequence: Synthetic coding sequence
  source 1..1305: mol_type = other DNA
atggagggcgctgagctggccggcaagatcctgagcacctggctgaccctggtgctgggcttcatcctgctgcccagcgtgtttggagtgtccctgggcatcagcgagatctacatgaagatcctggtgaagaccctggagtgggccaccatcagaattgagaagggcacccccaaggagagcatcctgaagaacagcgcctctgtgggcatcatccagagagatgagagccccatggagaagggcctgagcggcctgcggggccgggactttgagctgagtgatgtgttctacttcagcaagaagggcctggaggccatcgtggaggatgaggtgacccagcgcttcagcagcgaggagctggtgtcctggaacctgctgaccaggaccaacgtgaacttccagtacatcagcctgcggctgaccatggtgtgggtgctgggcgtcatcgtgcgctactgtgtgctgctgcccctgcgggtgaccctggccttcatcggcatcagcctgctggtgattggcaccaccctggtgggccagctgcctgacagcagcctgaagaactggctgtctgagctggtgcacctgacctgctgccgcatctgtgtgcgggccctgagcggcaccatccactaccacaacaagcagtaccggccccagaagggcggcatctgtgtggccaaccacaccagccccattgatgtgctgatcctgaccacagatggctgctacgccatggtgggccaggtgcatggaggcctgatgggcatcatccagagggccatggtgaaggcctgcccccacgtgtggtttgagaggtctgagatgaaggacagacacctggtgaccaagaggctgaaggagcacatcgctgacaagaagaagctgcccatcctgatcttccctgagggcacctgcatcaacaacacctctgtgatgatgttcaagaagggcagctttgagatcggcggcaccatccaccctgtggccatcaagtacaacccccagtttggagatgccttctggaacagcagcaagtacaacatggtgtcctacctgctgaggatgatgacctcctgggccatcgtgtgtgatgtgtggtacatgccacccatgacccgggaggagggggaggatgctgtgcagtttgccaacagagtgaagagcgccatcgccatccagggcggcctgacagagctgccctgggatggcggcctgaagagggccaaggtgaaggacatcttcaaggaggagcagcagaagaactacagcaagatgattgtgggcaatggcagcctgtcctag

SEQ ID NO: 141863 - DNA, 1305 bp, synthetic construct; identical to SEQ ID NO: 141862
  misc_feature 1..1305: note = Description of Artificial Sequence: Synthetic coding sequence
  source 1..1305: mol_type = other DNA

SEQ ID NO: 141864 - DNA, 1506 bp, synthetic construct
  misc_feature 1..1506: note = Description of Artificial Sequence: Synthetic coding sequence
  source 1..1506: mol_type = other DNA
atgttcaccctgccccagaaggacttccgggcccccaccacctgcctgggccccacctgcatgcaggacctgggcagcagccacggggaggacctggagggagaatgttccaggaagctggaccagaagctgcctgagctgcggggcgtgggggaccctgccatgatcagcagtgacaccagctacctgagcagccggggccgcatgatcaagtggttctgggacagcgctgaggagggctaccgcacctaccacatggatgaatatgatgaggacaagaaccccagcggcatcatcaacctgggcaccagcgagaacaagctgtgctttgacctgctgtcctggaggctgagccagagggacatgcagagggtggagcccagcctgctgcagtatgctgactggaggggccacctgttcctgcgggaggaggtggccaagttcctgtccttctactgcaagagccctgtgcccctgcggccagaaaatgtggtggtgctgaatggaggagccagcctcttcagcgccctggccaccgtgctgtgtgaggccggggaggccttcctgatccccaccccctactatggagccatcacccagcacgtgtgcctgtatggcaacatccggctggcctacgtgtacctggacagcgaggtgacaggcctggacacccggcccttccagctgactgtggagaagctggagatggccctgcgggaggcccacagcgagggcgtgaaggtgaagggcctcatcctgatcagcccccagaaccccctgggagatgtgtacagccctgaggagctgcaggagtacctggtgtttgccaagaggcaccggctgcacgtgattgtggatgaggtgtacatgctgtctgtgtttgagaagtctgtgggctacagatctgtgctgagcctggagcggctgcctgacccccagaggacccacgtgatgtgggccaccagcaaggactttggcatgagcggcctgcgcttcggcaccctgtacacagagaaccaggatgtggccacagctgtggccagcctgtgccgctaccacggcctgagcggcctggtgcagtaccagatggcccagctgctgcgggaccgggactggatcaaccaggtgtacctgcctgagaaccacgcccggctgaaggccgcccacacctacgtgtctgaggagctgcgggccctgggcatccccttcctgagcagaggagctggcttcttcatctgggtggacctgaggaagtacctgcccaagggcacctttgaggaggagatgctgctgtggaggcgcttcctggacaacaaggtgctgctgagctttgggaaggcctttgagtgcaaggagcccggctggttccgctttgtgttcagtgaccaggtgcaccggctgtgcctgggcatgcagagggtgcagcaggtgctggccggcaagagccaggtggccgaggacccccggcccagccagagccaggagcccagcgaccagaggaggtag

SEQ ID NO: 141865 - DNA, 477 bp, synthetic construct
  misc_feature 1..477: note = Description of Artificial Sequence: Synthetic coding sequence
  source 1..477: mol_type = other DNA
atgttcaccctgccccagaaggacttccgggcccccaccacctgcctgggccccacctgcatgcaggacctgggcagcagccacggggaggacctggagggagaatgttccaggaagctggaccagaagctgcctgagctgcggggcgtgggggaccctgccatgatcagcagtgacaccagctacctgagcagccggggccgcatgatcaagtggttctgggacagcgctgaggagggctaccgcacctaccacatggatgaatatgatgaggacaagaaccccagcggcatcatcaacctgggcaccagcgagaacaagctgtgctttgacctgctgtcctggaggcctcctgggggcagcggccaggtgcctgtgttcctgctgcaggagcccagcaccccccagaccagagaatgtggctgcccagagtggtggtgcctggccctgctgtgcagcggccatggagctgtgtag

SEQ ID NO: 141866 - DNA, 420 bp, synthetic construct
  misc_feature 1..420: note = Description of Artificial Sequence: Synthetic coding sequence
  source 1..420: mol_type = other DNA
atgttcaccctgccccagaaggacttccgggcccccaccacctgcctgggccccacctgcatgcaggacctgggcagcagccacggggaggacctggagggagaatgttccaggaagctggaccagaagctgcctgagctgcggggcgtgggggaccctgccatgatcagcagtgacaccagctacctgagcagccggggccgcatgatcaagtggttctgggacagcgctgaggagggctaccgcacctaccacatggatgaatatgatgaggacaagaaccccagcggcatcatcaacctgggcaccagcgagaacaagctgtgctttgacctgctgtcctggaggctgagccagagggacatgcagagggtggagcccagcctgctgcagtatgctgactggaggggccacctgtag

SEQ ID NO: 141867 - DNA, 234 bp, synthetic construct
  misc_feature 1..234: note = Description of Artificial Sequence: Synthetic coding sequence
  source 1..234: mol_type = other DNA
atgttcaccctgccccagaaggacttccgggcccccaccacctgcctgggccccacctgcatgcaggacctgggcagcagccacggggaggacctggagggagaatgttccaggaagctggaccagaagctgcctgagctgcggggcgtgggggaccctgccatgatcagcagtgacaccagctacctgagcagccggggccgcatgatcaagtggttctgggacagcgcctag

SEQ ID NO: 141868 - DNA, 780 bp, synthetic construct
  misc_feature 1..780: note = Description of Artificial Sequence: Synthetic coding sequence
  source 1..780: mol_type = other DNA
atgagcaagtacaagctgatcatgctgcggcatggagagggcgcctggaacaaggaaaatcgcttctgctcctgggtggaccagaagctgaacagcgagggcatggaggaggccaggaactgtgggaagcagctgaaggccctgaactttgaatttgacctggtgttcacctctgtgctgaacagaagcatccacacagcctggctgatcctggaggagctgggccaggagtgggtgcctgtggagagctcctggaggctgaatgaaagacactacggggccctgattggcctgaaccgggagcagatggccctgaaccacggggaggagcaggtgcggctgtggaggaggagctacaacgtgaccccaccacccatcgaggagagccacccctactaccaggagatctacaatgaccggcgctacaaggtgtgtgatgtgcccctggaccagctgcccaggtctgagagcctgaaggatgtgctggagcggctgctgccctactggaatgaaagaattgcccctgaggtgctgcggggcaagaccatcctgatcagcgcccacggcaacagcagccgggccctgctgaagcacctggagggcatcagtgatgaggacatcatcaacatcaccctgcccaccggggtgcccatcctgctggagctggatgagaacctgcgggctgtgggcccccaccagttcctgggggaccaggaggccatccaggccgccatcaagaaggtggaggaccagggcaaggtgaagcaggccaagaagtag

SEQ ID NO: 141869 - DNA, 780 bp, synthetic construct; identical to SEQ ID NO: 141868
  misc_feature 1..780: note = Description of Artificial Sequence: Synthetic coding sequence
  source 1..780: mol_type = other DNA

SEQ ID NO: 141870 - DNA, 780 bp, synthetic construct; identical to SEQ ID NO: 141868
  misc_feature 1..780: note = Description of Artificial Sequence: Synthetic coding sequence
  source 1..780: mol_type = other DNA

SEQ ID NO: 141871 - DNA, 237 bp, synthetic construct
  misc_feature 1..237: note = Description of Artificial Sequence: Synthetic coding sequence
  source 1..237: mol_type = other DNA
atgagcaagtacaagctgatcatgctgcggcatggagagggcgcctggaacaaggaaaatcgcttctgctcctgggtggaccagaagctgaacagcgagggcatggaggaggccaggaactgtgggaagcagctgaaggccctgaactttgaatttgacctggtgttcacctctgtgctgaacagaagcatccacacagcctggctgatcctggaggagctgggccaggagtggtag

SEQ ID NO: 141872 - DNA, 894 bp, synthetic construct
  misc_feature 1..894: note = Description of Artificial Sequence: Synthetic coding sequence
  source 1..894: mol_type = other DNA
atgaacagaggcttcagcaggaagagccacaccttcctgcccaagatcttcttcaggaagatgagcagcagcggggccaaggacaagccagagctgcagttccccttcctgcaggatgaggacacagtggccaccctgctggagtgcaagaccctcttcatcctgcggggcctgcccggcagcggcaagagcaccctggcccgggtcatcgtggacaagtacagagatggcaccaagatggtgtctgcagatgcctacaagatcacccctggggcccggggggccctgaaggagctgcggcagtttgtgcctggagatgagccccgggagaagatggacctggtgacctactttgggaagaggcctcctggggtgctgcactgcaccaccaagttctgtgactatggcaaggcccctggagctgaggagtatgcccagcaggatgtgctgaagaagagctacagcaaggccttcaccctgaccatcagcgccctgtttgtgacccccaagaccaccggggcccgggtggagctgtctgagcagcagctgcagctgtggcccagtgatgtggacaagctgagccccacagacaacctgccccggggcagccgggcccacatcaccctgggctgtgccgcagatgtggaggccgtgcagacaggcctggacctgctggagatcctgcggcaggagaagggcggcagcagaggagaggaggtgggggagctgagccggggcaagctgtacagcctgggcaatggccgctggatgctgaccctggccaagaacatggaggtgcgggccatcttcaccggctactacggcaagggcaagcctgtgcccacccagggcagcaggaaaggaggagccctgcagagctgcaccatcatctag

SEQ ID NO: 141873 - DNA, 1206 bp, synthetic construct
  misc_feature 1..1206: note = Description of Artificial Sequence: Synthetic coding sequence
  source 1..1206: mol_type = other DNA
atgagcagcagcggggccaaggacaagccagagctgcagttccccttcctgcaggatgaggacacagtggccaccctgctggagtgcaagaccctcttcatcctgcggggcctgcccggcagcggcaagagcaccctggcccgggtcatcgtggacaagtacagagatggcaccaagatggtgtctgcagatgcctacaagatcacccctggggcccggggggccttcagcgaggagtacaagaggctggatgaggacctggccgcctactgcagaagaagagacatccgcatcctggtgctggatgacaccaaccacgagcgggagcggctggagcagctgtttgagatggctgaccagtaccagtaccaggtggtgctggtggagcccaagacagcctggaggctggactgtgcccagctgaaggagaagaaccagtggcagctgtctgcagatgacctgaagaagctgaagccaggcctggagaaggacttcctgcccctgtacttcggctggttcctgaccaagaagagcagcgagaccctgaggaaggccggccaggtgttcctggaggagctgggcaaccacaaggccttcaagaaggagctgcggcagtttgtgcctggagatgagccccgggagaagatggacctggtgacctactttgggaagaggcctcctggggtgctgcactgcaccaccaagttctgtgactatggcaaggcccctggagctgaggagtatgcccagcaggatgtgctgaagaagagctacagcaaggccttcaccctgaccatcagcgccctgtttgtgacccccaagaccaccggggcccgggtggagctgtctgagcagcagctgcagctgtggcccagtgatgtggacaagctgagccccacagacaacctgccccggggcagccgggcccacatcaccctgggctgtgccgcagatgtggaggccgtgcagacaggcctggacctgctggagatcctgcggcaggagaagggcggcagcagaggagaggaggtgggggagctgagccggggcaagctgtacagcctgggcaatggccgctggatgctgaccctggccaagaacatggaggtgcgggccatcttcaccggctactacggcaagggcaagcctgtgcccacccagggcagcaggaaaggaggagccctgcagagctgcaccatcatctag

SEQ ID NO: 141874 - DNA, 1266 bp, synthetic construct
  misc_feature 1..1266: note = Description of Artificial Sequence: Synthetic coding sequence
  source 1..1266: mol_type = other DNA
atgaacagaggcttcagcaggaagagccacaccttcctgcccaagatcttcttcaggaagatgagcagcagcggggccaaggacaagccagagctgcagttccccttcctgcaggatgaggacacagtggccaccctgctggagtgcaagaccctcttcatcctgcggggcctgcccggcagcggcaagagcaccctggcccgggtcatcgtggacaagtacagagatggcaccaagatggtgtctgcagatgcctacaagatcacccctggggcccggggggccttcagcgaggagtacaagaggctggatgaggacctggccgcctactgcagaagaagagacatccgcatcctggtgctggatgacaccaaccacgagcgggagcggctggagcagctgtttgagatggctgaccagtaccagtaccaggtggtgctggtggagcccaagacagcctggaggctggactgtgcccagctgaaggagaagaaccagtggcagctgtctgcagatgacctgaagaagctgaagccaggcctggagaaggacttcctgcccctgtacttcggctggttcctgaccaagaagagcagcgagaccctgaggaaggccggccaggtgttcctggaggagctgggcaaccacaaggccttcaagaaggagctgcggcagtttgtgcctggagatgagccccgggagaagatggacctggtgacctactttgggaagaggcctcctggggtgctgcactgcaccaccaagttctgtgactatggcaaggcccctggagctgaggagtatgcccagcaggatgtgctgaagaagagctacagcaaggccttcaccctgaccatcagcgccctgtttgtgacccccaagaccaccggggcccgggtggagctgtctgagcagcagctgcagctgtggcccagtgatgtggacaagctgagccccacagacaacctgccccggggcagccgggcccacatcaccctgggctgtgccgcagatgtggaggccgtgcagacaggcctggacctgctggagatcctgcggcaggagaagggcggcagcagaggagaggaggtgggggagctgagccggggcaagctgtacagcctgggcaatggccgctggatgctgaccctggccaagaacatggaggtgcgggccatcttcaccggctactacggcaagggcaagcctgtgcccacccagggcagcaggaaaggaggagccctgcagagctgcaccatcatctag

SEQ ID NO: 141875 - DNA, 174 bp, synthetic construct
  misc_feature 1..174: note = Description of Artificial Sequence: Synthetic coding sequence
  source 1..174: mol_type = other DNA
atgagcagcagcggggccaaggacaagccagagctgcagttccccttcctgcaggatgaggacacagtggccaccctgctggagtgcaagaccctcttcatcctgcggggcctgcccggcagcggcaagagcaccctggcccgggtcatcgtggacaagtacagagatggatag

SEQ ID NO: 141876 - DNA, 1419 bp, synthetic construct
  misc_feature 1..1419: note = Description of Artificial Sequence: Synthetic coding sequence
  source 1..1419: mol_type = other DNA
atgaagttcctgatctttgccttctttggaggagtgcacctgctgagcctgtgcagcggcaaggccatctgcaagaatggcatcagcaagaggacctttgaggagatcaaggaggagatcgccagctgtggagatgtggccaaggccatcatcaacctggccgtgtatggcaaggcccagaacagaagctatgaaaggctggccctgctggtggacacagtgggcccccggctgagcggcagcaagaacctggagaaggccatccagatcatgtaccagaacctgcagcaggacggcctggagaaggtgcacctggagcctgtgcgcatcccccactgggagcggggggaggagagcgctgtgatgctggagccccgcatccacaagatcgccatcctgggcctgggcagcagcatcggcaccccacctgagggcatcacagctgaggtgctggtggtgaccagctttgatgagctgcagaggcgggccagcgaggcccggggcaagatcgtggtgtacaaccagccctacatcaactacagcaggacagtgcagtaccgcacccagggcgctgtggaggccgccaaggtgggcgccctggccagcctcatccgctctgtggccagcttcagcatctacagcccccacacaggcatccaggagtaccaggatggagtgcccaagatccccacagcctgcatcaccgtggaggatgctgagatgatgagcaggatggccagccacggcatcaagatcgtcatccagctgaagatgggcgccaagacctacccagacacagacagcttcaacacagtggccgagatcaccggcagcaagtacccagagcaggtggtgctggtgtctggccacctggacagctgggatgtgggccagggcgccatggatgatggcggcggggccttcatctcctgggaggccctgagcctcatcaaggacctgggcctgcggcccaagaggaccctgcggctggtgctgtggacagctgaggagcagggcggcgtgggcgccttccagtactaccagctgcacaaggtgaacatcagcaactacagcctggtgatggagagtgatgctggcaccttcctgcccaccggcctgcagttcaccggcagcgagaaggcccgggccatcatggaggaggtgatgagcctgctgcagcccctgaacatcacccaggtgctgagccatggagagggcacagacatcaacttctggatccaggccggcgtgcctggggccagcctgctggatgacctgtacaagtacttcttcttccaccacagccacggggacaccatgacagtgatggaccccaagcagatgaatgtggccgctgctgtgtgggccgtggtgtcctatgtggtggccgacatggaggagatgctgcccaggagctag

SEQ ID NO: 141877 - DNA, 981 bp, synthetic construct
  misc_feature 1..981: note = Description of Artificial Sequence: Synthetic coding sequence
  source 1..981: mol_type = other DNA
atgagcggcctgggcaagaagcacctgctgctgatgggagagttcttctcctatggcaccaagatcctgtaccagaacacagaggccctgcagagcaagttcttcagccccctgcagaaggccatgctgccccccaacagcttccagggcaaggtggccttcatcaccggcggcggcaccggcctgggcaagggcatgaccaccctgctgagcagcctgggcgcccagtgtgtgattgccagcaggaagatggatgtgctgaaggccacagctgagcagatcagcagccagacaggcaacaaggtgcacgccatccagtgtgatgtgcgggaccctgacatggtgcagaacacagtgtctgagctgatcaaggtggccggccaccccaacatcgtcatcaacaatgctgctggcaacttcatcagccccacagagcggctgagccccaatgcctggaagaccatcacagacatcgtgctgaatggaacagcctttgtgaccctggagatcggcaagcagctgatcaaggcccagaagggagctgccttcctgagcatcaccaccatctatgcagagactggaagtggctttgtggtgcccagcgccagcgccaaggccggcgtggaggccatgagcaagagcctggccgctgagtggggcaagtatggcatgaggttcaacgtcatccagcccggccccatcaagaccaagggggccttcagccggctggaccccaccggcacctttgagaaggagatgattggccgcatcccctgtggccgcctgggcaccgtggaggagctggccaacctggccgccttcctgtgcagcgactatgcctcctggatcaacggggccgtcatcaagtttgatggaggagaggaggtgctgatctctggagagttcaatgacctgaggaaggtgaccaaggagcagtgggacaccatcgaggagctgatcaggaagaccaagggcagctag

SEQ ID NO: 141878 - DNA, 1551 bp, synthetic construct
  misc_feature 1..1551: note = Description of Artificial Sequence: Synthetic coding sequence
  source 1..1551: mol_type = other DNA
atggagcctgctgtgtccctggccgtgtgtgccctgctcttcctgctgtgggtgcggctgaagggcctggagtttgtgctgatccaccagcgctgggtgtttgtgtgcctcttcctgctgcccctgagcctcatctttgacatctactactacgtgcgggcctgggtggtgttcaagctgagcagcgccccccggctgcacgagcagagggtgcgggacatccagaagcaggtgcgggagtggaaggagcagggcagcaagaccttcatgtgcaccggccggcccggctggctgactgtgtccctgcgggtgggcaagtacaagaagacccacaagaacatcatgatcaacctgatggacatcctggaggtggacaccaagaagcagatcgtgcgggtggagcccctggtgaccatgggccaggtgacagccctgctgaccagcatcggctggaccctgcctgtgctgcctgagctggatgacctgactgtgggcggcctcatcatgggcactggaattgagagcagcagccacaagtatggcctcttccagcacatctgcacagcctatgagctggtgctggctgatggcagctttgtgcgctgcaccccatctgagaacagcgacctcttctatgctgtgccctggagctgtggcaccctgggcttcctggtggccgctgagatccgcatcatcccagccaagaagtatgtgaagctgcgctttgagcctgtgcggggcctggaggccatctgtgccaagttcacccatgagagccagaggcaggagaaccactttgtggagggcctgctgtacagcctggatgaagctgtgatcatgactggagtgatgacagatgaggccgagcccagcaagctgaacagcatcggcaactactacaagccctggttcttcaagcacgtggagaactacctgaagaccaaccgggagggcctggagtacatccccctgcggcactactaccaccgccacaccaggagcatcttctgggagctgcaggacatcatcccctttggaaacaaccccatcttccgctacctgtttggctggatggtgccccccaagatcagcctgctgaagctgacccagggcgagaccctgaggaagctgtatgagcagcaccacgtggtgcaggacatgctggtgcccatgaagtgcctgcagcaggccctgcacaccttccagaatgacatccacgtgtaccccatctggctgtgccccttcatcctgcccagccagcccggcctggtgcaccccaagggaaatgaagctgagctgtacattgatattggagcctacggggagccccgggtgaagcactttgaggcccggagctgcatgaggcagctggagaagtttgtgcgctctgtgcacggcttccagatgctgtatgctgactgctacatgaaccgggaggagttctgggagatgtttgatggcagcctgtaccacaagctgcgggagaagctgggctgccaggatgccttccctgaggtgtatgacaagatctgcaaggccgcccggcactag

SEQ ID NO: 141879 - DNA, 465 bp, synthetic construct
  misc_feature 1..465: note = Description of Artificial Sequence: Synthetic coding sequence
  source 1..465: mol_type = other DNA
tgaagcctgctgaagctgacccagggcgagaccctgaggaagctgtatgagcagcaccacgtggtgcaggacatgctggtgcccatgaagtgcctgcagcaggccctgcacaccttccagaatgacatccacgtgtaccccatctggctgtgccccttcatcctgcccagccagcccggcctggtgcaccccaagggaaatgaagctgagctgtacattgatattggagcctacggggagccccgggtgaagcactttgaggcccggagctgcatgaggcagctggagaagtttgtgcgctctgtgcacggcttccagatgctgtatgctgactgctacatgaaccgggaggagttctgggagatgtttgatggcagcctgtaccacaagctgcgggagaagctgggctgccaggatgccttccctgaggtgtatgacaagatctgcaaggccgcccggcactag

SEQ ID NO: 141880 - DNA, 1428 bp, synthetic construct
  misc_feature 1..1428: note = Description of Artificial Sequence: Synthetic coding sequence
  source 1..1428: mol_type = other DNA
atgggcgctggggagcagaaccggcagagcgcccactgtgtgcagggcatctgtggctacctggagggagatgaggagggggaggagggggaggtgcgcagcacccaggtgcgggagtggaaggagcagggcagcaagaccttcatgtgcaccggccggcccggctggctgactgtgtccctgcgggtgggcaagtacaagaagacccacaagaacatcatgatcaacctgatggacatcctggaggtggacaccaagaagcagatcgtgcgggtggagcccctggtgaccatgggccaggtgacagccctgctgaccagcatcggctggaccctgcctgtgctgcctgagctggatgacctgactgtgggcggcctcatcatgggcaccggcatcgagagcagcagccacaagtatggcctcttccagcacatctgcacagcctatgagctggtgctggctgatggcagctttgtgcgctgcacccccagtgaaaattctgacctcttctatgctgtgccctggagctgtggcaccctgggcttcctggtggccgctgagatccgcatcatcccagccaagaagtatgtgaagctgcgctttgagcctgtgcggggcctggaggccatctgtgccaagttcacccatgagagccagaggcaggagaaccactttgtggagggcctgctgtacagcctggatgaggccgtcatcatgactggagtgatgacagatgaagctgagcccagcaagctgaacagcatcggcaactactacaagccctggttcttcaagcacgtggagaactacctgaagaccaaccgggagggcctggagtacatccccctgcggcactactaccaccgccacaccaggagcatcttctgggagctgcaggacatcatccccttcggcaacaaccccatcttccgctacctgtttggctggatggtgccccccaagatcagcctgctgaagctgacccagggcgagaccctgaggaagctgtatgagcagcaccacgtggtgcaggacatgctggtgcccatgaagtgcctgcagcaggccctgcacaccttccagaatgacatccacgtgtaccccatctggctgtgccccttcatcctgcccagccagcccggcctggtgcaccccaagggaaatgaggccgagctgtacatcgacatcggggcctatggagagccccgggtgaagcactttgaggcccggagctgcatgaggcagctggagaagtttgtgcgctctgtgcacggcttccagatgctgtatgctgactgctacatgaaccgggaggagttctgggagatgtttgatggcagcctgtaccacaagctgcgggagaagctgggctgccaggatgccttccctgaggtgtatgacaagatctgcaaggccgcccggcactag

SEQ ID NO: 141881 - DNA, 903 bp, synthetic construct
  misc_feature 1..903: note = Description of Artificial Sequence: Synthetic coding sequence
  source 1..903: mol_type = other DNA
atgggcactggaattgagagcagcagccacaagtatggcctcttccagcacatctgcacagcctatgagctggtgctggctgatggcagctttgtgcgctgcaccccatctgagaacagcgacctcttctatgctgtgccctggagctgtggcaccctgggcttcctggtggccgctgagatccgcatcatcccagccaagaagtatgtgaagctgcgctttgagcctgtgcggggcctggaggccatctgtgccaagttcacccatgagagccagaggcaggagaaccactttgtggagggcctgctgtacagcctggatgaagctgtgatcatgactggagtgatgacagatgaggccgagcccagcaaggacatcatcccctttggaaacaaccccatcttccgctacctgtttggctggatggtgccccccaagatcagcctgctgaagctgacccagggcgagaccctgaggaagctgtatgagcagcaccacgtggtgcaggacatgctggtgcccatgaagtgcctgcagcaggccctgcacaccttccagaatgacatccacgtgtaccccatctggctgtgccccttcatcctgcccagccagcccggcctggtgcaccccaagggaaatgaagctgagctgtacattgatattggagcctacggggagccccgggtgaagcactttgaggcccggagctgcatgaggcagctggagaagtttgtgcgctctgtgcacggcttccagatgctgtatgctgactgctacatgaaccgggaggagttctgggagatgtttgatggcagcctgtaccacaagctgcgggagaagctgggctgccaggatgccttccctgaggtgtatgacaagatctgcaaggccgcccggcactag

SEQ ID NO: 141882 - DNA, 729 bp, synthetic construct
  misc_feature 1..729: note = Description of Artificial Sequence: Synthetic coding sequence
  source 1..729: mol_type = other DNA
atggagcctgctgtgtccctggccgtgtgtgccctgctcttcctgctgtgggtgcggctgaagggcctggagtttgtgctgatccaccagcgctgggtgtttgtgtgcctcttcctgctgcccctgagcctcatctttgacatctactactacgtgcgggcctgggtggtgttcaagctgagcagcgccccccggctgcacgagcagagggtgcgggacatccagaagcaggtgcgggagtggaaggagcagggcagcaagaccttcatgtgcaccggccggcccggctggctgactgtgtccctgcgggtgggcaagtacaagaagacccacaagaacatcatgatcaacctgatggacatcctggaggtggacaccttccagaatgacatccacgtgtaccccatctggctgtgccccttcatcctgcccagccagcccggcctggtgcaccccaagggaaatgaagctgagctgtacattgatattggagcctacggggagccccgggtgaagcactttgaggcccggagctgcatgaggcagctggagaagtttgtgcgctctgtgcacggcttccagatgctgtatgctgactgctacatgaaccgggaggagttctgggagatgtttgatggcagcctgtaccacaagctgcgggagaagctgggctgccaggatgccttccctgaggtgtatgacaagatctgcaaggccgcccggcactag

SEQ ID NO: 141883 - DNA, 1203 bp, synthetic construct
  misc_feature 1..1203: note = Description of Artificial Sequence: Synthetic coding sequence
  source 1..1203: mol_type = other DNA
atgatggacctgaggaacaccccagccaagagcctggacaagttcatcgaggactacctgctgcctgacacctgcttcaggatgcagatcaaccacgccatcgacatcatctgtggcttcctgaaggagcgctgcttccggggcagcagctaccctgtgtgtgtgtccaaggtggtgaagggcggcagcagcggcaagggcaccaccctgcggggccgcagtgatgctgacctggtggtgttcctgagccccctgaccaccttccaggaccagctgaacagaagaggagagttcatccaggagatccggcggcagctggaggcctgccagcgggagcgggccttctctgtgaagtttgaggtgcaggccccccgctggggcaacccccgggccctgagctttgtgctgagcagcctgcagctgggggagggcgtggagtttgatgtgctgcctgcctttgatgccctgggccagctgaccggcggctacaagcccaacccccagatctacgtgaagctgattgaggagtgcacagacctgcagaaggagggggagttcagcacctgcttcacagagctgcagagggacttcctgaagcagaggcccaccaagctgaagagcctcatccggctggtgaagcactggtaccagaactgcaagaagaagctgggcaagctgcccccccagtatgccctggagctgctgactgtgtatgcctgggagcggggctccatgaagacccacttcaacacagcccagggcttcagaacagtgctggagctggtgatcaactaccagcagctgtgcatctactggaccaagtactatgacttcaagaaccccatcatcgagaagtacctgcggcggcagctgaccaagcccaggcctgtgatcctggaccctgctgaccccactggaaacctgggcggcggggaccccaagggctggaggcagctggcccaggaggccgaggcctggctgaactacccctgcttcaagaactgggatggcagccctgtgtcctcctggatcctgctggccgagagcaacagcgcagatgatgaaacagatgacccccggcgctaccagaagtatggctacatcggcacccatgagtacccccacttcagccaccggcccagcaccctgcaggccgccagcaccccccaggccgaggaggactggacctgcaccatcctgtag

SEQ ID NO: 141884 - DNA, 1146 bp, synthetic construct
  misc_feature 1..1146: note = Description of Artificial Sequence: Synthetic coding sequence
  source 1..1146: mol_type = other DNA
atgatggacctgaggaacaccccagccaagagcctggacaagttcatcgaggactacctgctgcctgacacctgcttcaggatgcagatcaaccacgccatcgacatcatctgtggcttcctgaaggagcgctgcttccggggcagcagctaccctgtgtgtgtgtccaaggtggtgaagggcggcagcagcggcaagggcaccaccctgcggggccgcagtgatgctgacctggtggtgttcctgagccccctgaccaccttccaggaccagctgaacagaagaggagagttcatccaggagatccggcggcagctggaggcctgccagcgggagcgggccttctctgtgaagtttgaggtgcaggccccccgctggggcaacccccgggccctgagctttgtgctgagcagcctgcagctgggggagggcgtggagtttgatgtgctgcctgcctttgatgccctgggccagctgaccggcggctacaagcccaacccccagatctacgtgaagctgattgaggagtgcacagacctgcagaaggagggggagttcagcacctgcttcacagagctgcagagggacttcctgaagcagaggcccaccaagctgaagagcctcatccggctggtgaagcactggtaccagaactgcaagaagaagctgggcaagctgcccccccagtatgccctggagctgctgactgtgtatgcctgggagcggggctccatgaagacccacttcaacacagcccagggcttcagaacagtgctggagctggtgatcaactaccagcagctgtgcatctactggaccaagtactatgacttcaagaaccccatcatcgagaagtacctgcggcggcagctgaccaagcccaggcctgtgatcctggaccctgctgaccccactggaaacctgggcggcggggaccccaagggctggaggcagctggcccaggaggccgaggcctggctgaactacccctgcttcaagaactgggatggcagccctgtgtcctcctggatcctgctggtgaacctgaccctggtgggcagaagaaactacatcatcagcgagcacgctgtgaacctgcagcagaccaggggggccagcctgagctacagcttccaggtggcctag

SEQ ID NO: 141885 - DNA, 1245 bp, synthetic construct
  misc_feature 1..1245: note = Description of Artificial Sequence: Synthetic coding sequence
  source 1..1245: mol_type = other DNA
atgatggacctgaggaacaccccagccaagagcctggacaagttcatcgaggactacctgctgcctgacacctgcttcaggatgcagatcaaccacgccatcgacatcatctgtggcttcctgaaggagcgctgcttccggggcagcagctaccctgtgtgtgtgtccaaggtggtgaagggcggcagcagcggcaagggcaccaccctgcggggccgcagtgatgctgacctggtggtgttcctgagccccctgaccaccttccaggaccagctgaacagaagaggagagttcatccaggagatccggcggcagctggaggcctgccagcgggagcgggccttctctgtgaagtttgaggtgcaggccccccgctggggcaacccccgggccctgagctttgtgctgagcagcctgcagctgggggagggcgtggagtttgatgtgctgcctgcctttgatgccctgggccagctgaccggcggctacaagcccaacccccagatctacgtgaagctgattgaggagtgcacagacctgcagaaggagggggagttcagcacctgcttcacagagctgcagagggacttcctgaagcagaggcccaccaagctgaagagcctcatccggctggtgaagcactggtaccagaactgcaagaagaagctgggcaagctgcccccccagtatgccctggagctgctgactgtgtatgcctgggagcggggctccatgaagacccacttcaacacagcccagggcttcagaacagtgctggagctggtgatcaactaccagcagctgtgcatctactggaccaagtactatgacttcaagaaccccatcatcgagaagtacctgcggcggcagctgaccaagcccaggcctgtgatcctggaccctgctgaccccactggaaacctgggcggcggggaccccaagggctggaggcagctggcccaggaggccgaggcctggctgaactacccctgcttcaagaactgggatggcagccctgtgtcctcctggatcctgctgacccagcacaccccaggcagcatccaccccactggaagaagaggcctggacctgcaccaccccctgaatgccagcgcctcctggggcaagggcctgcagtgctacctggaccagttcctgcacttccaggtgggcctgctgatccagaggggccagagcagctctgtgtcctggtgcatcatccaggacaggacccaggtgtcctag

SEQ ID NO: 141886 - DNA, 1095 bp, synthetic construct
  misc_feature 1..1095: note = Description of Artificial Sequence: Synthetic coding sequence
  source 1..1095: mol_type = other DNA
atgatggacctgaggaacaccccagccaagagcctggacaagttcatcgaggactacctgctgcctgacacctgcttcaggatgcagatcaaccacgccatcgacatcatctgtggcttcctgaaggagcgctgcttccggggcagcagctaccctgtgtgtgtgtccaaggtggtgaagggcggcagcagcggcaagggcaccaccctgcggggccgcagtgatgctgacctggtggtgttcctgagccccctgaccaccttccaggaccagctgaacagaagaggagagttcatccaggagatccggcggcagctggaggcctgccagcgggagcgggccttctctgtgaagtttgaggtgcaggccccccgctggggcaacccccgggccctgagctttgtgctgagcagcctgcagctgggggagggcgtggagtttgatgtgctgcctgcctttgatgccctgggccagctgaccggcggctacaagcccaacccccagatctacgtgaagctgattgaggagtgcacagacctgcagaaggagggggagttcagcacctgcttcacagagctgcagagggacttcctgaagcagaggcccaccaagctgaagagcctcatccggctggtgaagcactggtaccagaactgcaagaagaagctgggcaagctgcccccccagtatgccctggagctgctgactgtgtatgcctgggagcggggctccatgaagacccacttcaacacagcccagggcttcagaacagtgctggagctggtgatcaactaccagcagctgtgcatctactggaccaagtactatgacttcaagaaccccatcatcgagaagtacctgcggcggcagctgaccaagcccaggcctgtgatcctggaccctgctgaccccactggaaacctgggcggcggggaccccaagggctggaggcagctggcccaggaggccgaggcctggctgaactacccctgcttcaagaactgggatggcagccctgtgtcctcctggatcctgctggtgcggcccccagccagcagcctgcccttcatcccagcccccctgcacgaggcctag

SEQ ID NO: 141887 - DNA, 2160 bp, synthetic construct
  misc_feature 1..2160: note = Description of Artificial Sequence: Synthetic coding sequence
  source 1..2160: mol_type = other DNA
atgggaaatggagagagccagctgagctctgtgcctgcccagaagctgggctggttcatccaggagtacctgaagccctatgaggagtgccagaccctgattgatgagatggtgaacaccatctgtgatgtgctgcaggagcctgagcagttccccctggtgcagggcgtggccatcggcggcagctatggcaggaagacagtgctgcggggcaacagtgatggcaccctggtgctcttcttcagtgacctgaagcagttccaggaccagaagaggagccagagggacatcctggacaagacaggagacaagctgaagttctgcctcttcaccaagtggctgaagaacaactttgagatccagaagagcctggatggcttcaccatccaggtgttcaccaagaaccagaggatcagctttgaggtgctggccgccttcaatgccctgagcctgaatgacaaccccagcccctggatctaccgggagctgaagaggagcctggacaagaccaatgccagccctggagaatttgctgtgtgcttcacagagctgcagcagaagttctttgacaacagacctgggaagctgaaggacctgatcctgctgatcaagcactggcaccagcagtgccagaagaagatcaaggacctgcccagcctgagcccctatgccctggagctgctgactgtgtatgcctgggagcagggctgcaggaaggacaactttgatattgctgagggcgtgaggacagtgctggagctgatcaagtgccaggagaagctgtgcatctactggatggtgaactacaactttgaagatgagaccatccggaacatcctgctgcaccagctgcagagcgcccggcctgtgatcctggaccctgtggaccccaccaacaacgtgtctggggacaagatctgctggcagtggctgaagaaggaggcccagacctggctgaccagccccaacctggacaatgagctgcctgcccccagctggaatgtgctgcctgcccccctcttcaccaccccaggccacctgctggacaagttcatcaaggagttcctgcagcccaacaagtgcttcctggagcagattgacagcgctgtgaacatcatccgcaccttcctgaaggagaactgcttccggcagagcacagccaagatccagatcgtgcggggcggcagcacagccaagggcacagccctgaagacaggcagtgatgctgacctggtggtgttccacaacagcctgaagagctacaccagccagaagaatgaaagacacaagatcgtgaaggagatccacgagcagctgaaggccttctggagggagaaggaggaggagctggaggtgtcctttgagccccccaagtggaaggccccccgggtgctgtccttcagcctgaagagcaaggtgctgaatgaatctgtgtcctttgatgtgctgcctgccttcaatgccctgggccagctgagcagcggcagcacccccagccctgaggtgtatgccggcctgattgacctgtacaagagcagtgacctgcccggcggggagttcagcacctgcttcaccgtgctgcagaggaacttcatccgcagccggcccaccaagctgaaggacctgatccggctggtgaagcactggtacaaggaatgtgagaggaagctgaagcccaagggcagcctgccccccaagtatgccctggagctgctgaccatctatgcctgggagcagggcagcggcgtgcctgactttgacacagctgagggcttcagaacagtgctggagctggtgacccagtaccagcagctgtgcatcttctggaaggtgaactacaactttgaagatgaaacagtgaggaagttcctgctgagccagctgcagaagaccaggcctgtgatcctggaccctgctgagcccactggagatgtgggcggcggggaccgctggtgctggcacctgctggccaaggaggccaaggagtggctgagcagcccctgcttcaaggatggcactggaaaccccatccccccctggaaggtgcccaccatgcagaccccaggcagctgtggggcccgcatccaccccatcgtgaatgagatgttcagcagccgcagccaccgcatcctgaacaacaacagcaagaggaacttctag

SEQ ID NO: 141888 - DNA, 2064 bp, synthetic construct
  misc_feature 1..2064: note = Description of Artificial Sequence: Synthetic coding sequence
  source 1..2064: mol_type = other DNA
atgggaaatggagagagccagctgagctctgtgcctgcccagaagctgggctggttcatccaggagtacctgaagccctatgaggagtgccagaccctgattgatgagatggtgaacaccatctgtgatgtgctgcaggagcctgagcagttccccctggtgcagggcgtggccatcggcggcagctatggcaggaagacagtgctgcggggcaacagtgatggcaccctggtgctcttcttcagtgacctgaagcagttccaggaccagaagaggagccagagggacatcctggacaagacaggagacaagctgaagttctgcctcttcaccaagtggctgaagaacaactttgagatccagaagagcctggatggcttcaccatccaggtgttcaccaagaaccagaggatcagctttgaggtgctggccgccttcaatgccctgagcctgaatgacaaccccagcccctggatctaccgggagctgaagaggagcctggacaagaccaatgccagccctggagaatttgctgtgtgcttcacagagctgcagcagaagttctttgacaacagacctgggaagctgaaggacctgatcctgctgatcaagcactggcaccagcagtgccagaagaagatcaaggacctgcccagcctgagcccctatgccctggagctgctgactgtgtatgcctgggagcagggctgcaggaaggacaactttgatattgctgagggcgtgaggacagtgctggagctgatcaagtgccaggagaagctgtgcatctactggatggtgaactacaactttgaagatgagaccatccggaacatcctgctgcaccagctgcagagcgcccggcctgtgatcctggaccctgtggaccccaccaacaacgtgtctggggacaagatctgctggcagtggctgaagaaggaggcccagacctggctgaccagccccaacctggacaatgagctgcctgcccccagctggaatgtgctgcctgcccccctcttcaccaccccaggccacctgctggacaagttcatcaaggagttcctgcagcccaacaagtgcttcctggagcagattgacagcgctgtgaacatcatccgcaccttcctgaaggagaactgcttccggcagagcacagccaagatccagatcgtgcggggcggcagcacagccaagggcacagccctgaagacaggcagtgatgctgacctggtggtgttccacaacagcctgaagagctacaccagccagaagaatgaaagacacaagatcgtgaaggagatccacgagcagctgaaggccttctggagggagaaggaggaggagctggaggtgtcctttgagccccccaagtggaaggccccccgggtgctgtccttcagcctgaagagcaaggtgctgaatgaatctgtgtcctttgatgtgctgcctgccttcaatgccctgggccagctgagcagcggcagcacccccagccctgaggtgtatgccggcctgattgacctgtacaagagcagtgacctgcccggcggggagttcagcacctgcttcaccgtgctgcagaggaacttcatccgcagccggcccaccaagctgaaggacctgatccggctggtgaagcactggtacaaggaatgtgagaggaagctgaagcccaagggcagcctgccccccaagtatgccctggagctgctgaccatctatgcctgggagcagggcagcggcgtgcctgactttgacacagctgagggcttcagaacagtgctggagctggtgacccagtaccagcagctgtgcatcttctggaaggtgaactacaactttgaagatgaaacagtgaggaagttcctgctgagccagctgcagaagaccaggcctgtgatcctggaccctgctgagcccactggagatgtgggcggcggggaccgctggtgctggcacctgctggccaaggaggccaaggagtggctgagcagcccctgcttcaaggatggcactggaaaccccatccccccctggaaggtgcctgtgaaggtgatctag

SEQ ID NO: 141889 - DNA, 519 bp, synthetic construct
  misc_feature 1..519: note = Description of Artificial Sequence: Synthetic coding sequence
  source 1..519: mol_type = other DNA
atgggaaatggagagagccagctgagctctgtgcctgcccagaagctgggctggttcatccaggagtacctgaagccctatgaggagtgccagaccctgattgatgagatggtgaacaccatctgtgatgtgctgcaggagcctgagcagttccccctggtgcagggcgtggccatcggcggcagctatggcaggaagacagtgctgcggggcaacagtgatggcaccctggtgctcttcttcagtgacctgaagcagttccaggaccagaagaggagccagagggacatcctggacaagacaggagacaagctgaagttctgcctcttcaccaagtggctgaagaacaactttgagatccagaagagcctggatggcttcaccatccaggtgttcaccaagaaccagaggatcagctttgaggtgctggccgccttcaatgccctgagcaagcactgctgggtgtctggagagaagagccagaggagcggctgccagacagccctgtgcaacctgtag

SEQ ID NO: 141890 - DNA, 1053 bp, synthetic construct
  misc_feature 1..1053: note = Description of Artificial Sequence: Synthetic coding sequence
  source 1..1053: mol_type = other DNA
atggccaccgtgggcgcccccaggcacttctgccgctgtgcctgcttctgcacagacaacctgtatgtggcccgctatggcctgcacgtgcgcttccggggggagcagcagctgcggcgggactatggccccatcctgcggagccggggctgtgtgtctgccaaggacttccagcagctgctggccgagctggagcaggaggtggagcggcggcagaggctgggccaggagagcgctgccaggaaggccctgattgccagcagctaccacccagcccggcctgaggtgtatgacagcctgcaggatgctgccctggcccctgagttcctggccgtgacagagtacagcgtgtccccagatgctgacctgaagggcctgctgcagaggctggagaccgtgtctgaggagaagaggatctacagagtgcctgtgttcaccgcccccttctgccaggccctgctggaggagctggagcactttgagcagagcgacatgcccaagggccggcccaacaccatgaacaactacggcgtgctgctgcacgagctgggcctggatgagcccctgatgacccccctgcgggagcgcttcctgcagcccctgatggccctgctgtacccagactgtggcggcggccgcctggacagccaccgggcctttgtggtgaagtatgcccctggccaggacctggagctgggctgccactatgacaatgctgagctgaccctgaatgtggccctgggcaaggtgttcaccggcggggccctgtactttggaggcctcttccaggcccccacagccctgacagagcccctggaggtggagcacgtggtgggccagggcgtgctgcaccggggcggccagctgcacggggcccggcccctgggcactggagagcgctggaacctggtggtgtggctgcgggccagcgctgtgaggaacagcctgtgccccatgtgctgccgggagccagacctggtggatgatgagggctttggagatggcttcacccgggaggagcccgccaccgtggatgtgtgtgccctgacctag

SEQ ID NO: 141891 - DNA, 3261 bp, synthetic construct
  misc_feature 1..3261: note = Description of Artificial Sequence: Synthetic coding sequence
  source 1..3261: mol_type = other DNA
atggacctgtacagcaccccagctgctgccctggacagatttgtggcccggcggctgcagcccaggaaggagtttgtggagaaggcccggcgggccctgggcgccctggccgccgccctgcgggagcggggcggccgcctgggcgccgccgccccccgggtgctgaagacagtgaagggcggcagcagcggccggggcacagccctgaagggcggctgtgacagcgagctggtgatcttcctggactgcttcaagagctatgtggaccagagggccaggagagctgagatcctgtctgagatgagggccagcctggagagctggtggcagaaccctgtgcccggcctgcggctgaccttccctgagcagagcgtgcctggggccctgcagttccggctgacctctgtggacctggaggactggatggatgtgtccctggtgcctgccttcaacgtgctgggccaggccggcagcggcgtgaagcccaagccccaggtgtacagcaccctgctgaacagcggctgccagggcggggagcacgccgcctgcttcacagagctgcggaggaactttgtgaacatccggcctgccaagctgaagaacctgatcctgctggtgaagcactggtaccaccaggtgtgcctgcagggcctgtggaaggagaccctgccccctgtgtatgccctggagctgctgaccatctttgcctgggagcagggctgcaagaaggatgccttcagcctggccgagggcctgaggacagtgctgggcctcatccagcagcaccagcacctgtgtgtgttctggacagtgaactacggctttgaggaccctgctgtgggccagttcctgcagaggcagctgaagaggcccaggcctgtgatcctggaccctgctgaccccacctgggacctgggcaatggagctgcctggcactgggacctgctggcccaggaggccgccagctgctatgaccacccctgcttcctgcggggcatgggagaccctgtgcagagctggaagggccctggcctgccccgggccggctgcagcggcctgggccaccccatccagctggaccccaaccagaagaccccagagaacagcaagagcctgaatgctgtgtaccccagggctggcagcaagccacccagctgcccagcccctggccccaccggccagcctgccagcagctctgtgcccggcatggccctggacctgagccagatccccaccaaggagctggaccgcttcatccaggaccacctgaagcccagcccccagttccaggagcaggtgaagaaggccatcgacatcatcctgcgctgcctgcacgagaactgtgtgcacaaggccagccgggtgtccaaaggaggcagctttggccggggcacagacctgagagatggctgtgatgtggagctgatcatcttcctgaactgcttcacagactacaaggaccagggccccaggagagctgagatcctggatgagatgagggcccagctggagagctggtggcaggaccaggtgcccagcctgagcctgcagtttcctgagcagaatgtgcctgaggccctgcagttccagctggtgtccacagccctgaagtcctggacagatgtgtccctgctgcctgcctttgatgctgtgggccagctgagcagcggcaccaagcccaacccccaggtgtacagccggctgctgaccagcggctgccaggagggggagcacaaggcctgctttgctgagctgcggaggaacttcatgaacatccggcctgtgaagctgaagaacctgatcctgctggtgaagcactggtaccggcaggtggccgcccagaacaagggcaagggccctgccccagccagcctgcccccagcctatgccctggagctgctgaccatctttgcctgggagcagggctgccggcaggactgcttcaacatggcccagggcttcagaacagtgctgggcctggtgcagcagcaccagcagctgtgtgtgtactggacagtgaactacagcacagaggaccctgccatgaggatgcacctgctgggccagctgaggaagccccggcccctggtgctggaccctgctgaccccacctggaatgtgggccacggctcctgggagctgctggcccaggaggccgccgccctgggcatgcaggcctgcttcctgagcagagatggcacctctgtgcagccctgggatgtgatgcctgccctgctgtaccagaccccagctggggacctggacaagttcatcagcgagttcctgcagcccaaccggcagttcctggcccaggtgaacaaggctgtggacaccatctgcagcttcctgaaggagaactgcttcaggaacagccccatcaaggtgatcaaggtggtgaagggcggcagcagcgccaagggcacagccctgcggggccgcagtgatgctgacctggtggtgttcctgagctgcttcagccagttcacagagcagggcaacaagagagctgagatcatcagcgagatccgggcccagctggaggcctgccagcaggagcggcagtttgaggtgaagtttgaggtgtccaagtgggagaacccccgggtgctgtccttcagcctgaccagccagaccatgctggaccagagcgtggactttgatgtgctgcctgcctttgatgccctgggccagctggtgtctggcagccggcccagcagccaggtgtatgtggacctgatccacagctacagcaatgctggggagtacagcacctgcttcacagagctgcagagggacttcatcatcagccggcccaccaagctgaagagcctcatccggctggtgaagcactggtaccagcagtgcaccaagatcagcaagggccggggcagcctgcccccccagcacggcctggagctgctgactgtgtatgcctgggagcagggcggcaaggacagccagttcaacatggccgagggcttcagaacagtgctggagctggtgacccagtaccggcagctgtgcatctactggaccatcaactacaatgccaaggacaagacagtgggggacttcctgaagcagcagctgcagaagccccggcccatcatcctggaccctgctgaccccaccggcaacctgggccacaatgcccgctgggacctgctggccaaggaggccgccgcctgcaccagcgccctgtgctgcatgggcagaaatggcatccccatccagccctggcctgtgaaggctgctgtgtag

SEQ ID NO: 141892 - DNA, 1545 bp, synthetic construct
  misc_feature 1..1545: note = Description of Artificial Sequence: Synthetic coding sequence
  source 1..1545: mol_type = other DNA
atggccctgatgcaggagctgtacagcaccccagccagccggctggacagctttgtggcccagtggctgcagccccaccgggagtggaaggaggaggtgctggatgctgtgaggacagtggaggagttcctgcggcaggagcacttccagggcaagaggggcctggaccaggatgtgcgggtgctgaaggtggtgaaggtgggcagctttggaaatggcaccgtgctgcggagcacccgggaggtggagctggtggccttcctgagctgcttccacagcttccaggaggccgccaagcaccacaaggatgtgctgcggctcatctggaagaccatgtggcagagccaggacctgctggacctgggcctggaggacctgaggatggagcagagggtgcctgatgccctggtgttcaccatccagacccggggcacagctgagcccatcaccgtgaccatcgtgcctgcctaccgggccctgggccccagcctgcccaacagccagcccccacctgaggtgtatgtgtccctcatcaaggcctgtggcggccctggcaacttctgccccagcttcagcgagctgcagaggaactttgtgaagcaccggcccaccaagctgaagagcctgctgcggctggtgaagcactggtaccagcagtatgtgaaggcccggagcccccgggccaacctgccccccctgtatgccctggagctgctgaccatctatgcctgggagatgggcacagaggaggatgagaacttcatgctggatgagggcttcaccaccgtgatggacctgctgctggagtatgaggtgatctgcatctactggaccaagtactacaccctgcacaatgccatcatcgaggactgtgtgaggaagcagctgaagaaggagcggcccatcatcctggaccctgctgaccccaccctgaatgtggccgagggctaccgctgggacatcgtggcccagagggccagccagtgcctgaagcaggactgctgctatgacaaccgggagaaccccatcagctcctggaatgtgaagagggcccgggacatccacctgactgtggagcagaggggctacccagacttcaacctgattgtgaacccctatgagcccatcaggaaggtgaaggagaagatccggaggacccggggctacagcggcctgcagaggctgtccttccaggtgcccggcagcgagcggcagctgctgagcagccgctgcagcctggccaagtatggcatcttcagccacacccacatctacctgctggagaccatccccagcgagatccaggtgtttgtgaagaacccagatggcggcagctatgcctatgccatcaaccccaacagcttcatcctgggcctgaagcagcagatcgaggaccagcagggcctgcccaagaagcagcagcagctggagttccagggccaggtgctgcaggactggctgggcctgggcatctacggcatccaggacagcgacaccctcatcctgagcaagaagaagggggaggccctcttccctgccagctag

SEQ ID NO: 141893 - DNA, 768 bp, synthetic construct
  misc_feature 1..768: note = Description of Artificial Sequence: Synthetic coding sequence
  source 1..768: mol_type = other DNA
atggccctgatgcaggagctgtacagcaccccagccagccggctggacagctttgtggcccagtggctgcagccccaccgggagtggaaggaggaggtgctggatgctgtgaggacagtggaggagttcctgcggcaggagcacttccagggcaagaggggcctggaccaggatgtgcgggtgctgaaggtggtgaaggtgggcagctttggaaatggcaccgtgctgcggagcacccgggaggtggagctggtggccttcctgagctgcttccacagcttccaggaggccgccaagcaccacaaggatgtgctgcggctcatctggaagaccatgtggcagagccaggacctgctggacctgggcctggaggacctgaggatggagcagagggtgcctgatgccctggtgttcaccatccagacccggggcacagctgagcccatcaccgtgaccatcgtgcctgcctaccgggccctgggccccagcctgcccaacagccagcccccacctgaggtgtatgtgtccctcatcaaggcctgtggcggccctggcaacttctgccccagcttcagcgagctgcagaggaactttgtgaagcaccggcccaccaagctgaagagcctgctgcggctggtgaagcactggtaccagcaggcccaccaccctggcagcggccggccccacccccagaggggccggcgggtgcagatgggccaccgctgcagcgagggcctgcctgtgcctgagaccggcctgctgctgtag

SEQ ID NO: 141894 - DNA, 1737 bp, synthetic construct
  misc_feature 1..1737: note = Description of Artificial Sequence: Synthetic coding sequence
  source 1..1737: mol_type = other DNA
atgccagacagcaactttgctgagaggtctgaggagcaggtgtctggggccaaggtgattgcccaggccctgaagacccaggatgtggagtacatctttggaattgtgggcatccctgtgacagaaattgccatcgccgcccagcagctgggcatcaagtacatcggcatgagaaatgagcaggccgcctgctacgccgccagcgccatcggctacctgaccagcaggcctggggtgtgcctggtggtgtctggccctggcctcatccacgccctgggcggcatggccaatgccaacatgaactgctggcccctgctggtgattggaggcagcagcgagaggaaccaggagaccatgggcgccttccaggagttcccccaggtggaggcctgccgcctgtacaccaagttcagcgcccggcccagcagcattgaggccatcccctttgtgattgagaaggctgtgcgcagcagcatctacggccggcctggggcctgctacgtggacatcccagctgactttgtgaacctgcaggtgaatgtgaacagcatcaagtacatggagcgctgcatgagcccccccatctccatggccgagaccagcgctgtgtgcacagctgccagcgtcatcagaaatgccaagcagcccctgctgatcatcggcaagggggccgcctatgcccatgctgaggagagcatcaagaagctggtggagcagtacaagctgcccttcctgcccacccccatgggcaaaggagtggtgcctgacaaccacccctactgtgtgggcgccgcccggagccgggccctgcagtttgctgatgtgattgtgctgtttggagcccggctgaactggatcctgcacttcggcctgcccccacgctaccagccagatgtgaagttcatccaggtggacatctgtgccgaggagctgggcaacaacgtgaagccagctgtgaccctgctgggcaacatccatgctgtgaccaagcagctgctggaggagctggacaagaccccctggcagtacccacctgagagcaagtggtggaagaccctgcgggagaagatgaagagcaatgaggccgccagcaaggagctggccagcaagaagagcctgcccatgaactactacacagtgttctaccacgtgcaggagcagctgccccgggactgctttgtggtgtctgagggcgccaacaccatggacatcggccgcacagtgctgcagaactacctgcccaggcaccggctggatgctggcaccttcggcaccatgggcgtgggcctgggctttgccatcgctgctgctgtggtggccaaggacaggagccctggccagtggatcatctgtgtggagggggacagcgccttcggcttcagcggcatggaggtggagaccatctgccgctacaacctgcccatcatcctgctggtggtgaacaacaacggcatctaccagggctttgacacagacacctggaaggagatgctgaagttccaggatgccacagctgtggtgccccccatgtgcctgctgcccaacagccactatgagcaggtgatgacagcctttggaggcaagggctactttgtgcagaccccagaggagctgcagaagagcctgcggcagagcctggccgacaccaccaagcccagcctcatcaacatcatgattgagccccaggccaccaggaaggcccaggacttccactggctgaccaggagcaacatgtag

SEQ ID NO: 141895 - DNA, 1563 bp, synthetic construct
  misc_feature 1..1563: note = Description of Artificial Sequence: Synthetic coding sequence
  source 1..1563: mol_type = other DNA
atgcctggcagcctgcccctgaatgctgaggcctgctggcccaaggatgtgggcatcgtggccctggagatctacttccccagccagtatgtggaccaggccgagctggagaagtatgatggagtggatgctgggaagtacaccatcggcctgggccaggccaagatgggcttctgcacagaccgggaggacatcaacagcctgtgcatgacagtggtgcagaacctgatggagaggaacaacctgtcctatgactgcatcggccgcctggaggtgggcacagagaccatcatcgacaagagcaagtctgtgaagaccaacctgatgcagctgtttgaggagagcggcaacacagacatcgagggcatcgacaccaccaatgcctgctacggcggcacagctgctgtgttcaatgctgtgaactggattgagagcagctcctgggatggccgctatgccctggtggtggccggggacattgctgtgtatgccactggaaatgcccggcccactggaggagtgggcgctgtggccctgctgattggccccaatgcccccctcatctttgagcggggcctgcggggcacccacatgcagcacgcctatgacttctacaagccagacatgctgtctgagtaccccatcgtggatggcaagctgagcatccagtgctacctgagcgccctggaccgctgctacagcgtgtactgcaagaagatccacgcccagtggcagaaggagggcaatgacaaggacttcaccctgaatgactttggcttcatgatcttccacagcccctactgcaagctggtgcagaagagcctggccaggatgctgctgaatgacttcctgaatgaccagaacagagacaagaacagcatctacagcggcctggaggcctttggagatgtgaagctggaggacacctactttgacagagatgtggagaaggccttcatgaaggccagcagcgagctgttcagccagaagaccaaggccagcctgctggtgagcaaccagaatggaaacatgtacaccagctctgtgtatggcagcctggcctctgtgctggcccagtacagcccccagcagctggccggcaagagaattggagtcttctcctatggcagcggcctggccgccaccctgtacagcctgaaggtgacccaggatgccaccccaggcagcgccctggacaagatcacagccagcctgtgtgacctgaagagccggctggacagcaggactggagtggccccagatgtgtttgctgagaacatgaagctgcgggaggacacccaccacctggtgaactacatcccccagggcagcattgacagcctgtttgagggcacctggtacctggtgcgggtggatgagaagcacaggaggacctacgcccggcggcccaccccaaatgatgacaccctggatgagggcgtgggcctggtgcacagcaacatcgccacagagcacatccccagccctgccaagaaggtgccccggctgcctgccacagctgctgagcctgaggccgctgtgatcagcaatggagagcactag

SEQ ID NO: 141896 - DNA, 1563 bp, synthetic construct; identical to SEQ ID NO: 141895
  misc_feature 1..1563: note = Description of Artificial Sequence: Synthetic coding sequence
  source 1..1563: mol_type = other DNA

SEQ ID NO: 141897 - DNA, 291 bp, synthetic construct
  misc_feature 1..291: note = Description of Artificial Sequence: Synthetic coding sequence
  source 1..291: mol_type = other DNA
atgcctggcagcctgcccctgaatgctgaggcctgctggcccaaggatgtgggcatcgtggccctggagatctacttccccagccagtatgtggaccaggccgagctggagaagtatgatggagtggatgctgggaagtacaccatcggcctgggccaggccaagatgggcttctgcacagaccgggaggacatcaacagcctgtgcatgacagtggtgcagaacctgatggagaggaacaacctgtcctatgactgcatcggccgcctggaggtgggcacagagacctag

SEQ ID NO: 141898 - DNA, 1530 bp, synthetic construct
  misc_feature 1..1530: note = Description of Artificial Sequence: Synthetic coding sequence
  source 1..1530: mol_type = other DNA
atgcctggcagcctgcccctgaatgctgaggcctgctggcccaaggatgtgggcatcgtggccctggagatctacttccccagccagtatgtggaccaggccgagctggagaagtatgatggagtggatgctgggaagtacaccatcggcctgggccaggccaagatgggcttctgcacagaccgggaggacatcaacagcctgtgcatgacagtggtgcagaacctgatggagaggaacaacctgtcctatgactgcatcggccgcctggaggtgggcacagagaccatcatcgacaagagcaagtctgtgaagaccaacctgatgcagctgtttgaggagagcggcaacacagacatcgagggcatcgacaccaccaatgctgtgaactggattgagagcagctcctgggatggccgctatgccctggtggtggccggggacattgctgtgtatgccactggaaatgcccggcccaccggcggcgtgggcgctgtggccctgctgattggccccaatgcccccctcatctttgagcggggcctgcggggcacccacatgcagcacgcctatgacttctacaagccagacatgctgtctgagtaccccatcgtggatggcaagctgagcatccagtgctacctgagcgccctggaccgctgctacagcgtgtactgcaagaagatccacgcccagtggcagaaggagggcaatgacaaggacttcaccctgaatgactttggcttcatgatcttccacagcccctactgcaagctggtgcagaagagcctggccaggatgctgctgaatgacttcctgaatgaccagaacagagacaagaacagcatctacagcggcctggaggcctttggagatgtgaagctggaggacacctactttgacagagatgtggagaaggccttcatgaaggccagcagcgagctgttcagccagaagaccaaggccagcctgctggtgagcaaccagaatggaaacatgtacaccagctctgtgtatggcagcctggcctctgtgctggcccagtacagcccccagcagctggccggcaagagaattggagtcttctcctatggcagcggcctggccgccaccctgtacagcctgaaggtgacccaggatgccaccccaggcagcgccctggacaagatcacagccagcctgtgtgacctgaagagccggctggacagcaggactggagtggccccagatgtgtttgctgagaacatgaagctgcgggaggacacccaccacctggtgaactacatcccccagggcagcattgacagcctgtttgagggcacctggtacctggtgcgggtggatgagaagcacaggaggacctacgcccggcggcccaccccaaatgatgacaccctggatgaaggagtgggcctggtgcacagcaacatcgccacagagcacatccccagccctgccaagaaggtgccccggctgcctgccacagctgctgagcctgaggccgccgtcatcagcaatggagagcactag

SEQ ID NO: 141899 - DNA, 1527 bp, synthetic construct
  misc_feature 1..1527: note = Description of Artificial Sequence: Synthetic coding sequence
  source 1..1527: mol_type = other DNA
atgcagaggctgctgacccctgtgaagaggatcctgcagctgaccagggctgtgcaggagaccagcctgaccccagcccggctgctgcctgtggcccaccagcgcttcagcacagccagcgctgtgcccctggccaagacagacacctggcccaaggatgtgggcatcctggccctggaggtgtacttccctgcccagtatgtggaccagacagacctggagaagtacaacaacgtggaggccggcaagtacacagtgggcctgggccagaccaggatgggcttctgcagcgtgcaggaggacatcaacagcctgtgcctgactgtggtgcagaggctgatggagcgcatccagctgccctgggacagcgtgggccgcctggaggtgggcacagagaccatcatcgacaagagcaaggctgtgaagacagtgctgatggagctgttccaggacagcggcaacacagacatcgagggcatcgacaccaccaatgcctgctatggaggaacagccagcctcttcaatgctgccaactggatggagagcagctcctgggatggccgctatgccatggtggtgtgtggggacattgctgtgtaccccagcggaaatgcccggcccaccggcggggccggggctgtggccatgctgattggccccaaggcccccctggccctggagcggggcctgcggggcacccacatggagaatgtgtatgacttctacaagcccaacctggccagcgagtaccccatcgtggatggcaagctgagcatccagtgctacctgcgggccctggaccgctgctacaccagctacaggaagaagatccagaaccagtggaagcaggccggcagtgaccggcccttcaccctggatgacctgcagtacatgatcttccacacccccttctgcaagatggtgcagaagagcctggcccggctgatgtttaatgacttcctgagcgccagcagtgacacccagaccagcctgtacaagggcctggaggccttcggcggcctgaagctggaggacacctacaccaacaaggacctggacaaggccctgctgaaggccagccaggacatgtttgacaagaagaccaaggccagcctgtacctgagcacccacaacggcaacatgtacaccagcagcctgtatggctgcctggccagcctgctgagccaccacagcgcccaggagctggccggcagcagaattggagccttctcctatggcagcggcctggccgccagcttcttctccttccgggtgtcccaggatgctgcccctggcagccccctggacaagctggtgagcagcaccagtgacctgcccaagaggctggccagcaggaaatgtgtgtccccagaggagttcacagagatcatgaaccagcgggagcagttctaccacaaggtgaacttcagccccccaggggacaccaacagcctcttccctggcacctggtacctggagcgggtggatgagcagcacaggaggaaatatgcccggcggcctgtgtag

SEQ ID NO: 141900 - DNA, 1401 bp, synthetic construct
  misc_feature 1..1401: note = Description of Artificial Sequence: Synthetic coding sequence
  source 1..1401: mol_type = other DNA
atgcagaggctgctgacccctgtgaagaggatcctgcagctgaccagggctgtgcaggagaccagcctgaccccagcccggctgctgcctgtggcccaccagcgcttcagcacagccagcgctgtgcccctggccaagacagacacctggcccaaggatgtgggcatcctggccctggaggtgtacttccctgcccagtatgtggaccagacagacctggagaagtacaacaacgtggaggccggcaagtacacagtgggcctgggccagaccaggatgggcttctgcagcgtgcaggaggacatcaacagcctgtgcctgactgtggtgcagaggctgatggagcgcatccagctgccctgggacagcgtgggccgcctggaggtgggcacagagaccatcatcgacaagagcaaggctgtgaagacagtgctgatggagctgttccaggacagcggcaacacagacatcgagggcatcgacaccaccaatgcctgctatggaggaacagccagcctcttcaatgctgccaactggatggagagcagctcctgggatggcctgcggggcacccacatggagaatgtgtatgacttctacaagcccaacctggccagcgagtaccccatcgtggatggcaagctgagcatccagtgctacctgcgggccctggaccgctgctacaccagctacaggaagaagatccagaaccagtggaagcaggccggcagtgaccggcccttcaccctggatgacctgcagtacatgatcttccacacccccttctgcaagatggtgcagaagagcctggcccggctgatgtttaatgacttcctgagcgccagcagtgacacccagaccagcctgtacaagggcctggaggccttcggcggcctgaagctggaggacacctacaccaacaaggacctggacaaggccctgctgaaggccagccaggacatgtttgacaagaagaccaaggccagcctgtacctgagcacccacaacggcaacatgtacaccagcagcctgtatggctgcctggccagcctgctgagccaccacagcgcccaggagctggccggcagcagaattggagccttctcctatggcagcggcctggccgccagcttcttctccttccgggtgtcccaggatgctgcccctggcagccccctggacaagctggtgagcagcaccagtgacctgcccaagaggctggccagcaggaaatgtgtgtccccagaggagttcacagagatcatgaaccagcgggagcagttctaccacaaggtgaacttcagccccccaggggacaccaacagcctcttccctggcacctggtacctggagcgggtggatgagcagcacaggaggaaatatgcccggcggcctgtgtag

SEQ ID NO: 141901 - DNA, 1161 bp, synthetic construct
  misc_feature 1..1161: note = Description of Artificial Sequence: Synthetic coding sequence
  source 1..1161: mol_type = other DNA
atgggccagcgggagatgtggaggctgatgagccgcttcaatgccttcaagaggaccaacaccatcctgcaccacctgaggatgagcaagcacacagatgctgctgaggaggtgctgctggagaagaagggctgcaccggggtcatcaccctgaaccggcccaagttcctgaatgccctgaccctgaacatgatccggcagatctacccccagctgaagaagtgggagcaggaccctgagaccttcctgatcatcatcaagggagctgggggcaaggccttctgtgccggcggggacatccgggtcatcagcgaggccgagaaggccaagcagaagatcgcccctgtgttcttccgggaggagtacatgctgaacaatgctgtgggcagctgccagaagccctacgtggccctgatccacggcatcaccatgggcggcggcgtgggcctgtctgtgcacggccagttccgggtggccacagagaagtgcctgtttgccatgcctgagacagccatcggcctcttcccagatgtgggcggcggctacttcctgccccggctgcagggcaagctgggctacttcctggccctgaccggcttccggctgaagggcagagatgtgtaccgggccggcatcgccacccactttgtggacagcgagaagctggccatgctggaggaggacctgctggccctgaagagccccagcaaggagaacatcgcctctgtgctggagaactaccacacagagagcaagattgaccgggacaagagcttcatcctggaggagcacatggacaagatcaacagctgcttcagcgccaacacagtggaggagatcatcgagaacctgcagcaggacggcagcagctttgccctggagcagctgaaggtgatcaacaagatgagccccaccagcctgaagatcaccctgcggcagctgatggagggcagcagcaagaccctgcaggaggtgctgaccatggagtaccgcctgagccaggcctgcatgaggggccatgacttccatgaaggagtgcgggctgtgctgattgacaaggaccagagccccaagtggaagccagctgacctgaaggaggtgacagaggaggacctgaacaaccacttcaagagcctgggcagcagtgacctgaagttctag

SEQ ID NO: 141902 - DNA, 1017 bp, synthetic construct
  misc_feature 1..1017: note = Description of Artificial Sequence: Synthetic coding sequence
  source 1..1017: mol_type = other DNA
atgggccagcgggagatgtggaggctgatgagccgcttcaatgccttcaagaggaccaacaccatcctgcaccacctgaggatgagcaagcacacagatgctgctgaggaggtgctgctggagaagaagggctgcaccggggtcatcaccctgaaccggcccaagttcctgaatgccctgaccctgaacatgatccggcagatctacccccagctgaagaagtgggagcaggaccctgagaccttcctgatcatcatcaagggagctgggggcaaggccttctgtgccggcggggacatccgggtcatcagcgaggccgagaaggccaagcagaagatcgcccctgtgttcttccgggaggagtacatgctgaacaatgctgtgggcagctgccagaagccctacgtggccctgatccacggcatcaccatgggcggcggcgtgggcctgtctgtgcacggccagttccgggtggccacagagaagtgcctgtttgccatgcctgagacagccatcggcctcttcccagatgtgggcggcggctacttcctgccccggctgcagggcaagctgggctacttcctggccctgaccggcttccggctgaagggcagagatgtgtaccgggccggcatcgccacccactttgtggacagcgagaagctggccatgctggaggaggacctgctggccctgaagagccccagcaaggagaacatcgcctctgtgctggagaactaccacacagagagcaagattgaccgggacaagagcttcatcctggaggagcacatggacaagatcaacagctgcttcagcgccaacacagtggaggagatcatcgagaacctgcagcaggacggcagcagctttgccctggagcagctgaaggtgatcaacaagatgagccccaccagcctgaagatcaccctgcggcagctgatggagggcagcagcaagaccctgcaggaggtgctgaccatggagtaccgcctgagccaggcctgcatgttttag

SEQ ID NO: 141903 - DNA, 117 bp, synthetic construct
  misc_feature 1..117: note = Description of Artificial Sequence: Synthetic coding sequence
  source 1..117: mol_type = other DNA
tgactgattgacaaggaccagagccccaagtggaagccagctgacctgaaggaggtgacagaggaggacctgaacaaccacttcaagagcctgggcagcagtgacctgaagttctag

SEQ ID NO: 141904 - DNA, 903 bp, synthetic construct
  misc_feature 1..903: note = Description of Artificial Sequence: Synthetic coding sequence
  source 1..903: mol_type = other DNA
atgggcaccctgcccaagagggtgaagatcgtggaggtgggccccagagatggcctgcagaatgagaagaacatcgtgtccacccctgtgaagatcaagctgattgacatgctgtctgaggccggcctgagcgtcatcgagaccaccagctttgtgagccccaagtgggtgccccagatgggagaccacacagaggtgctgaagggcatccagaagtttcctggcatcaactaccctgtgctgacccccaacctgaagggctttgaggccgctgtggccgccggggccaaggaggtggtgatctttggagctgccagcgagctgttcaccaagaagaacatcaactgcagcattgaggagagcttccagagatttgatgccatcctgaaggccgcccagagcgccaacatctctgtgcggggctacgtgtcctgtgccctgggctgcccctatgagggcaagatcagccctgccaaggtggccgaggtgaccaagaagttctacagcatgggctgctatgagatcagcctgggggacaccatcggcgtgggcaccccaggcatcatgaaggacatgctgtctgctgtgatgcaggaggtgcccctggccgccctggccgtgcactgccacgacacctacggccaggccctggccaacaccctgatggccctgcagatgggcgtgtctgtggtggacagctctgtggccggcctgggcggctgcccctatgcccagggcgccagcggcaacctggccacagaggacctggtgtacatgctggagggcctgggcatccacactggagtgaacctgcagaagctgctggaggccggcaacttcatctgccaggccctgaacaggaagaccagcagcaaggtggcccaggccacctgcaagctgtag

SEQ ID NO: 141905 - DNA, 978 bp, synthetic construct
  misc_feature 1..978: note = Description of Artificial Sequence: Synthetic coding sequence
  source 1..978: mol_type = other DNA
atggccgccatgaggaaggccctgccccggcggctggtgggcctggccagcctgcgggctgtgtccaccagctccatgggcaccctgcccaagagggtgaagatcgtggaggtgggccccagagatggcctgcagaatgagaagaacatcgtgtccacccctgtgaagatcaagctgattgacatgctgtctgaggccggcctgtctgtgattgagaccaccagctttgtgagccccaagtgggtgccccagatgggagaccacacagaggtgctgaagggcatccagaagtttcctggcatcaactaccctgtgctgacccccaacctgaagggctttgaagctgctgtggccgccggggccaaggaggtggtgatctttggagctgccagcgagctgttcaccaagaagaacatcaactgcagcattgaggagagcttccagagatttgatgccatcctgaaggccgcccagagcgccaacatctctgtgcggggctacgtgtcctgtgccctgggctgcccctatgagggcaagatcagccctgccaaggtggccgaggtgaccaagaagttctacagcatgggctgctatgagatcagcctgggggacaccatcggcgtgggcaccccaggcatcatgaaggacatgctgtctgctgtgatgcaggaggtgcccctggccgccctggccgtgcactgccacgacacctacggccaggccctggccaacaccctgatggccctgcagatgggcgtgtctgtggtggacagctctgtggccggcctgggcggctgcccctatgcccagggcgccagcggcaacctggccacagaggacctggtgtacatgctggagggcctgggcatccacactggagtgaacctgcagaagctgctggaggccggcaacttcatctgccaggccctgaacaggaagaccagcagcaaggtggcccaggccacctgcaagctgtag

SEQ ID NO: 141906 - DNA, 765 bp, synthetic construct
  misc_feature 1..765: note = Description of Artificial Sequence: Synthetic coding sequence
  source 1..765: mol_type = other DNA
atggccgccatgaggaaggccctgccccggcggctggtgggcctggccagcctgcgggctgtgtccaccagctccatgggcaccctgcccaagagggtgaagatcgtggaggtgggccccagagatggcctgcagaatgagaagaacatcgtgtccacccctgtgaagatcaagctgattgacatgctgtctgaggccggcctgtctgtgattgagaccaccagctttgtgagccccaagtgggtgccccagatgggagaccacacagaggtgctgaagggcatccagaagtttcctggcatcaactaccctgtgctgacccccaacctgaagggctttgaagctgctgtgaccaagaagttctacagcatgggctgctatgagatcagcctgggggacaccatcggcgtgggcaccccaggcatcatgaaggacatgctgtctgctgtgatgcaggaggtgcccctggccgccctggccgtgcactgccacgacacctacggccaggccctggccaacaccctgatggccctgcagatgggcgtgtctgtggtggacagctctgtggccggcctgggcggctgcccctatgcccagggcgccagcggcaacctggccacagaggacctggtgtacatgctggagggcctgggcatccacactggagtgaacctgcagaagctgctggaggccggcaacttcatctgccaggccctgaacaggaagaccagcagcaaggtggcccaggccacctgcaagctgtag

SEQ ID NO: 141907 - DNA, 501 bp, synthetic construct
  misc_feature 1..501: note = Description of Artificial Sequence: Synthetic coding sequence
  source 1..501: mol_type = other DNA
atgggcaccctgcccaagagggtgaagatcgtggaggtgggccccagagatggcctgcagaatgagaagaacatcgtgtccacccctgtgaagatcaagctgattgacatgctgtctgaggccggcctgagcgtcatcgagaccaccagctttgtgagccccaagtgggtgccccagatgggagaccacacagaggtgctgaagggcatccagaagtttcctggcatcaactaccctgtgctgacccccaacctgaagggctttgaggccgccatgggcgtgtctgtggtggacagctctgtggccggcctgggcggctgcccctatgcccagggcgccagcggcaacctggccacagaggacctggtgtacatgctggagggcctgggcatccacactggagtgaacctgcagaagctgctggaggccggcaacttcatctgccaggccctgaacaggaagaccagcagcaaggtggcccaggccacctgcaagctgtag

SEQ ID NO: 141908 - DNA, 1563 bp, synthetic construct
  misc_feature 1..1563: note = Description of Artificial Sequence: Synthetic coding sequence
  source 1..1563: mol_type = other DNA
atggccgccctgaagctgctgagcagcggcctgcggctgtgtgccagcgcccggggcagcggggccacctggtacaagggctgtgtgtgcagcttcagcaccagcgcccaccgccacaccaagttctacacagatcctgtggaggccgtgaaggacatcccagatggagccaccgtgctggtgggcggcttcggcctgtgtggcatccctgagaacctgattgatgccctgctgaagacaggagtgaagggcctgacagctgtgagcaacaatgctggggtggacaactttggcctgggcctgctgctgcggagcaagcagatcaagaggatggtgagcagctatgtgggggagaatgctgagtttgagcggcagtacctgagcggggagctggaggtggagctgaccccccagggcaccctggccgagcgcatccgggccggcggggccggcgtgcctgccttctacacccccaccggctacggcaccctggtgcaggagggcggcagccccatcaagtacaacaaggatggctctgtggccatcgccagcaagccccgggaggtgcgggagttcaacggccagcacttcatcctggaggaggccatcaccggggactttgccctggtgaaggcctggaaggctgacagagctggaaatgtcatcttcaggaagagcgccaggaacttcaacctgcccatgtgcaaggctgctgagaccaccgtggtggaggtggaggagatcgtggacattggagcctttgcccctgaggacatccacatcccccagatctacgtgcacaggctcatcaagggggagaagtatgagaagagaattgagcggctgagcatcaggaaggagggagatggagaggccaagagcgccaagccaggagatgatgtgcgggagcgcatcatcaagagagctgccctggagtttgaagatggcatgtatgccaacctgggcatcggcatccccctgctggccagcaacttcatcagccccaacatcaccgtgcacctgcagagtgaaaatggagtgctgggcctgggcccctacccccggcagcatgaagcagatgctgacctgatcaatgctgggaaggagaccgtgaccatcctgcccggggccagcttcttcagcagtgatgagagctttgccatgatccggggcggccacgtggacctgaccatgctgggcgccatgcaggtgtccaaatatggagacctggccaactggatgatccctgggaagatggtgaagggcatgggcggggccatggacctggtgagcagcgccaagaccaaggtggtggtgaccatggagcacagcgccaagggaaatgcccacaagatcatggagaagtgcaccctgcccctgaccgggaagcagtgtgtgaaccgcatcatcacagagaaggctgtgtttgatgtggacaagaagaagggcctgaccctgattgagctgtgggagggcctgactgtggatgatgtgcagaagagcacaggctgtgactttgctgtgagccccaagctgatgcccatgcagcagatcgccaactag

SEQ ID NO: 141909 - DNA, 1005 bp, synthetic construct
  misc_feature 1..1005: note = Description of Artificial Sequence: Synthetic coding sequence
  source 1..1005: mol_type = other DNA
atgatggtgcgggagttcaacggccagcacttcatcctggaggaggccatcaccggggactttgccctggtgaaggcctggaaggctgacagagctggaaatgtcatcttcaggaagagcgccaggaacttcaacctgcccatgtgcaaggctgctgagaccaccgtggtggaggtggaggagatcgtggacattggagcctttgcccctgaggacatccacatcccccagatctacgtgcacaggctcatcaagggggagaagtatgagaagagaattgagcggctgagcatcaggaaggagggagatggagaggccaagagcgccaagccaggagatgatgtgcgggagcgcatcatcaagagagctgccctggagtttgaagatggcatgtatgccaacctgggcatcggcatccccctgctggccagcaacttcatcagccccaacatcaccgtgcacctgcagagtgaaaatggagtgctgggcctgggcccctacccccggcagcatgaagcagatgctgacctgatcaatgctgggaaggagaccgtgaccatcctgcccggggccagcttcttcagcagtgatgagagctttgccatgatccggggcggccacgtggacctgaccatgctgggcgccatgcaggtgtccaaatatggagacctggccaactggatgatccctgggaagatggtgaagggcatgggcggggccatggacctggtgagcagcgccaagaccaaggtggtggtgaccatggagcacagcgccaagggaaatgcccacaagatcatggagaagtgcaccctgcccctgaccgggaagcagtgtgtgaaccgcatcatcacagagaaggctgtgtttgatgtggacaagaagaagggcctgaccctgattgagctgtgggagggcctgactgtggatgatgtgcagaagagcacaggctgtgactttgctgtgagccccaagctgatgcccatgcagcagatcgccaactag

SEQ ID NO: 141910 - DNA, 372 bp, synthetic construct
  misc_feature 1..372: note = Description of Artificial Sequence: Synthetic coding sequence
  source 1..372: mol_type = other DNA
atgctgggcgccatgcaggtgtccaagtacggggacctggccaactggatgatccctgggaagatggtgaagggcatgggcggggccatggacctggtgtcctctgccaagaccaaggtggtggtgaccatggagcacagcgccaagggaaatgcccacaagatcatggagaagtgcaccctgcccctgaccgggaagcagtgtgtgaaccgcatcatcacagagaaggctgtgtttgatgtggacaagaagaagggcctgaccctcatcgagctgtgggagggcctgactgtggatgatgtgcagaagagcacaggctgtgactttgctgtgagccccaagctgatgcccatgcagcagatcgccaactag

SEQ ID NO: 141911 - DNA, 372 bp, synthetic construct; identical to SEQ ID NO: 141910
  misc_feature 1..372: note = Description of Artificial Sequence: Synthetic coding sequence
  source 1..372: mol_type = other DNA

SEQ ID NO: 141912 - DNA, 453 bp, synthetic construct
  misc_feature 1..453: note = Description of Artificial Sequence: Synthetic coding sequence
  source 1..453: mol_type = other DNA
agcaatgcctacaaggtggacaactttggcctgggcctgctgctgcggagcaagcagatcaagaggatggtgagcagctatgtgggggagaatgctgagtttgagcggcagtacctgagcggggagctggaggtggagctgaccccccagggcaccctggccgagcgcatccgggccggcggggccggcgtgcctgccttctacacccccaccggctacggcaccctggtgcaggagggcggcagccccatcaagtacaacaaggatggctctgtggccatcgccagcaagccccgggaggtgcgggagttcaacggccagcacttcatcctggaggaggccatcaccggggactttgccctggtgaaggcctggaaggctgacagagctggaaatgtcatcttcaggaagagcgccaggaacttcaacctgcccatgtgcaaggccgcctag

SEQ ID NO: 141913 - DNA, 1131 bp, synthetic construct
  misc_feature 1..1131: note = Description of Artificial Sequence: Synthetic coding sequence
  source 1..1131: mol_type = other DNA
atgagcaactgcctgcagaacttcctgaagatcaccagcacccggctgctgtgcagccggctgtgccagcagctgcggagcaagaggaagttcttcggcaccgtgcccatcagccggctgcaccggcgggtggtgatcactggaattggcctggtgacccccctgggcgtgggcacccacctggtgtgggaccggctgattggaggagagagcggcatcgtgtccctggtgggggaggagtacaagagcatcccctgcagcgtggccgcctacgtgccccggggcagtgatgagggccagttcaatgagcagaactttgtgtccaagagtgacatcaagtccatgagcagccccaccatcatggccatcggggctgctgagctggccatgaaggacagcggctggcacccccagagcgaggccgaccaggtggccaccggggtggccatcggcatgggcatgatccccctggaggtggtgtctgaaacagccctgaacttccagaccaagggctacaacaaggtgagccccttctttgtgcccaagatcctggtgaacatggctgctggccaggtgtccatccgctacaagctgaagggccccaaccacgctgtgtccacagcctgcaccactggagcccatgctgtgggggacagcttccgcttcatcgcccatggagatgctggccacatcacagccccagaccctgagggggagggcgccctgcgctgcatggctgctgccctgaaggatgctggggtgcagcctgaggagatctcctacatcaatgcccacgccaccagcacccccctgggagatgctgctgagaacaaggccatcaagcacctgttcaaggaccacgcctatgccctggccgtgagcagcaccaagggggccaccggccacctgctgggcgctgctggagctgtggaggccgccttcaccaccctggcctgctactaccagaagctgccccccaccctgaacctggactgcagcgagcctgagtttgacctgaactacgtgcccctgaaggcccaggagtggaagacagagaagcgcttcatcggcctgaccaacagctttggatttggaggcaccaatgccaccctgtgcatcgccggcctgtag

SEQ ID NO: 141914 - DNA, 1380 bp, synthetic construct
  misc_feature 1..1380: note = Description of Artificial Sequence: Synthetic coding sequence
  source 1..1380: mol_type = other DNA
atgagcaactgcctgcagaacttcctgaagatcaccagcacccggctgctgtgcagccggctgtgccagcagctgcggagcaagaggaagttcttcggcaccgtgcccatcagccggctgcaccggcgggtggtgatcactggaattggcctggtgacccccctgggcgtgggcacccacctggtgtgggaccggctgattggaggagagagcggcatcgtgtccctggtgggggaggagtacaagagcatcccctgcagcgtggccgcctacgtgccccggggcagtgatgagggccagttcaatgagcagaactttgtgtccaagagtgacatcaagtccatgagcagccccaccatcatggccatcggggctgctgagctggccatgaaggacagcggctggcacccccagagcgaggccgaccaggtggccaccggggtggccatcggcatgggcatgatccccctggaggtggtgtctgaaacagccctgaacttccagaccaagggctacaacaaggtgagccccttctttgtgcccaagatcctggtgaacatggctgctggccaggtgtccatccgctacaagctgaagggccccaaccacgctgtgtccacagcctgcaccactggagcccatgctgtgggggacagcttccgcttcatcgcccatggagatgctgatgtgatggtggccggcggcacagacagctgcatcagccccctgagcctggccggcttcagccgggcccgggccctgagcaccaacagcgaccccaagctggcctgccggcccttccaccccaagagagatggctttgtgatgggagagggcgctgctgtgctggtgctggaggagtatgagcacgctgtgcagaggcgggcccgcatctatgcagaggtgctgggctacggcctgtctggagatgctggccacatcacagccccagaccctgagggggagggcgccctgcgctgcatggccgccgccctgaaggatgctggggtgcagcctgaggagatctcctacatcaatgcccacgccaccagcacccccctgggagatgctgctgagaacaaggccatcaagcacctgttcaaggaccacgcctatgccctggccgtgagcagcaccaagggggccaccggccacctgctgggcgccgccggggctgtggaggccgccttcaccaccctggcctgctactaccagaagctgccccccaccctgaacctggactgcagcgagcctgagtttgacctgaactacgtgcccctgaaggcccaggagtggaagacagagaagcgcttcatcggcctgaccaacagctttggatttggaggcaccaatgccaccctgtgcatcgccggcctgtag

SEQ ID NO: 141915 - DNA, 696 bp, synthetic construct
  misc_feature 1..696: note = Description of Artificial Sequence: Synthetic coding sequence
  source 1..696: mol_type = other DNA
atgagcaactgcctgcagaacttcctgaagatcaccagcacccggctgctgtgcagccggctgtgccagcagctgcggagcaagaggaagttcttcggcaccgtgcccatcagccggctgcaccggcgggtggtgatcactggaattggcctggtgacccccctgggcgtgggcacccacctggtgtgggaccggctgattggaggagagagcggcatcgtgtccctggtgggggaggagtacaagagcatcccctgcagcgtggccgcctacgtgccccggggcagtgatgagggccagttcaatgagcagaactttgtgtccaagagtgacatcaagtccatgagcagccccaccatcatggccatcggggctgctgagctggccatgaaggacagcggctggcacccccagagcgaggccgaccaggtggccaccggggtggccatcggcatgggcatgatccccctggaggtggtgtctgaaacagccctgaacttccagaccaagggctacaacaaggtgagccccttctttgtgcccaagatcctggtgaacatggctgctggccaggtgtccatccgctacaagctgaagggccccaaccacgctgtgtccacagcctgcaccactggagcccatgctgtgggggacagcttccgcttcatcgcccatggagatgctgatgtgatgtag

SEQ ID NO: 141916 - DNA, 663 bp, synthetic construct
  misc_feature 1..663: note = Description of Artificial Sequence: Synthetic coding sequence
  source 1..663: mol_type = other DNA
atgagcaactgcctgcagaacttcctgaagatcaccagcacccggctgctgtgcagccggctgtgccagcagctgcggagcaagaggaagttcttcggcaccgtgcccatcagccggctgcaccggcgggtggtgatcactggaattggcctggtgacccccctgggcgtgggcacccacctggtgtgggaccggctgattggaggagagagcggcatcgtgtccctggtgggggaggagtacaagagcatcccctgcagcgtggccgcctacgtgccccggggcagtgatgagggccagttcaatgagcagaactttgtgtccaagagtgacatcaagtccatgagcagccccaccatcatggccatcggggctgctgagctggccatgaaggacagcggctggcacccccagagcgaggccgaccaggtggccaccggggtggccatcggcatgggcatgatccccctggaggtggtgtctgaaacagccctgaacttccagaccaagggctacaacaaggtgagccccttctttgtgcccaagatcctggtgaacatggctgctggccaggtgtccatccgctacaagctgaagggccccaaccacgctgtgtccacagcctgcaccactggagcccatgctgtgggggacagcttctag

SEQ ID NO: 141917 - DNA, 1875 bp, synthetic construct
  misc_feature 1..1875: note = Description of Artificial Sequence: Synthetic coding sequence
  source 1..1875: mol_type = other DNA
atggagatccctggcagcctgtgcaagaaggtgaagctgagcaacaatgcccagaactggggcatgcagagggccaccaacgtgacctaccaggcccaccacgtgtccaggaacaagaggggccaggtggtgggcacccggggcggcttccggggctgcaccgtgtggctgaccggcctgtctggagctgggaagaccaccgtgtccatggccctggaggagtacctggtgtgccacggcatcccctgctacaccctggatggagacaacatccggcagggcctgaacaagaacctgggcttcagccctgaggaccgggaggagaatgtgagaagaattgctgaggtggccaagctgtttgctgatgctggcctggtgtgcatcaccagcttcatcagcccctacacccaggacagaaataatgcccggcagatccacgagggcgccagcctgcccttctttgaggtgtttgtggatgcccccctgcacgtgtgtgagcagagagatgtgaagggcctgtacaagaaggcccgggccggggagatcaagggcttcaccggcatcgacagtgaatatgagaagccagaggcccctgagctggtgctgaagacagacagctgtgatgtgaatgactgtgtgcagcaggtggtggagctgctgcaggagcgggacatcgtgcctgtggatgccagctatgaggtgaaggagctgtatgtgcctgagaacaagctgcacctggccaagacagatgctgagaccctgcctgccctgaagatcaacaaggtggacatgcagtgggtgcaggtgctggccgagggctgggccacccccctgaatggcttcatgagggagcgggagtacctgcagtgcctgcactttgactgcctgctggatggcggcgtcatcaacctgtctgtgcccatcgtgctgacagccacccatgaggacaaggagcggctggatggctgcacagcctttgccctgatgtatgagggcagaagagtggccatcctgagaaatcctgagttctttgagcacaggaaggaggagcgctgtgcccggcagtggggcaccacctgcaagaaccacccctacatcaagatggtgatggagcagggcgactggctgattggaggagacctgcaggtgctggacagagtgtactggaatgatggcctggaccagtaccgcctgacccccacagagctgaagcagaagttcaaggacatgaatgctgatgctgtgtttgccttccagctgagaaatcctgtgcacaacggccacgccctgctgatgcaggacacccacaagcagctgctggagcggggctacagaagacctgtgctgctgctgcaccccctgggcggctggaccaaggatgatgatgtgcccctgatgtggaggatgaagcagcacgccgctgtgctggaggagggcgtgctgaaccctgagaccaccgtggtggccatcttccccagccccatgatgtatgccggccccacagaggtgcagtggcactgccgggccaggatggtggccggggccaacttctacatcgtgggccgggaccctgctggcatgccccaccctgagaccgggaaggacctgtatgagcccagccatggagccaaggtgctgaccatggcccctggcctcatcaccctggagatcgtgcccttccgggtggccgcctacaacaagaagaagaagaggatggactactatgattctgagcaccatgaagattttgagttcatcagcggcaccaggatgaggaagctggcccgggagggccagaagcccccagagggcttcatggcccccaaggcctggacagtgctgacagagtactacaagagcctggagaaggcctag

SEQ ID NO: 141918 - DNA, 1845 bp, synthetic construct
  misc_feature 1..1845: note = Description of Artificial Sequence: Synthetic coding sequence
  source 1..1845: mol_type = other DNA
atgagcggcatcaagaagcagaagacagagaaccagcagaagagcaccaacgtggtgtaccaggcccaccacgtgtccaggaacaagaggggccaggtggtgggcacccggggcggcttccggggctgcaccgtgtggctgaccggcctgtctggagctgggaagaccaccatcagctttgccctggaggagtacctggtgtcccatgccatcccctgctacagcctggatggagacaacgtgagacatggcctgaacagaaacctgggcttcagccctggggaccgggaggagaacatcagaagaattgctgaggtggccaagctgtttgctgatgctggcctggtgtgcatcaccagcttcatcagcccctttgccaaggaccgggagaatgccaggaagatccacgagagcgctggcctgcccttctttgagatctttgtggatgcccccctgaacatctgtgagagcagagatgtgaagggcctgtacaagagggcccgggccggggagatcaagggcttcaccggcatcgacagcgactatgagaagccagagaccccagagcgggtgctgaagaccaacctgagcacagtgtctgactgtgtgcaccaggtggtggagctgctgcaggagcagaacatcgtgccctacaccatcatcaaggacatccacgagctgtttgtgcctgagaacaagctggaccacgtgcgggcagaggccgagaccctgcccagcctgagcatcaccaagctggacctgcagtgggtgcaggtgctgtctgagggctgggccacccccctgaagggcttcatgagggagaaggagtacctgcaggtgatgcactttgacaccctgctggatgatggagtcatcaacatgagcatccccatcgtgctgcctgtgtctgctgaggacaagacccggctggagggctgcagcaagtttgtgctggcccacggcggcagaagagtggccatcctgagagatgctgagttctatgagcacaggaaggaggagcgctgcagccgggtgtggggcaccacctgcaccaagcacccccacatcaagatggtgatggagagcggggactggctggtgggcggggacctgcaggtgctggagaagatccgctggaatgatggcctggaccagtaccgcctgacccccctggagctgaagcagaagtgcaaggagatgaatgctgatgctgtgtttgccttccagctgagaaatcctgtgcacaacggccacgccctgctgatgcaggacacccggcggcggctgctggagcggggctacaagcaccctgtgctgctgctgcaccccctgggcggctggaccaaggatgatgatgtgcccctggactggaggatgaagcagcacgccgctgtgctggaggagggcgtgctggaccccaagagcaccatcgtggccatcttccccagccccatgctgtatgccggccccacagaggtgcagtggcactgccgcagcaggatgattgctggggccaacttctacatcgtgggccgggaccctgctggcatgccccaccctgagaccaagaaggacctgtatgagcccacccatggaggcaaggtgctgtccatggcccctggcctgacctctgtggagatcatccccttccgggtggccgcctacaacaaggccaagaaggccatggacttctatgaccctgcccggcacaatgaatttgacttcatcagcggcaccaggatgaggaagctggcccgggagggagaaaatcctccagatggcttcatggcccccaaggcctggaaggtgctgacagactactaccgcagcctggagaagaactag

SEQ ID NO: 141919 - DNA, 1857 bp, synthetic construct
  misc_feature 1..1857: note = Description of Artificial Sequence: Synthetic coding sequence
  source 1..1857: mol_type = other DNA
tctgggaagaagcaggagaaggaggagaaccagcagaagagcaccaacgtggtgtaccaggcccaccacgtgtccaggaacaagaggggccaggtggtgggcacccggggcggcttccggggctgcaccgtgtggctgaccggcctgagcggggccggcaagaccaccatcagctttgccctggaggagtacctggtgagccacgccatcccctgctacagcctggatggagacaacgtgcgccacggcctgaacagaaacctgggcttcagccctggggaccgggaggagaacatcagaagaattgctgaggtggccaagctgtttgctgatgctggcctggtgtgcatcaccagcttcatcagcccctttgccaaggacagagaaaatgccaggaagatccatgaatctgctggcctgcccttctttgagatctttgtggatgcccccctgaacatctgtgagagcagagatgtgaagggcctgtacaagagggcccgggccggggagatcaagggcttcaccggcatcgacagcgactatgagaagccagagaccccagagcgggtgctgaagaccaacctgagcacagtgtctgactgtgtgcaccaggtggtggagctgctgcaggagcagaacatcgtgccctacaccatcatcaaggacatccacgagctgtttgtgcctgagaacaagctggaccacgtgcgggcagaggccgagaccctgcccagcctgagcatcaccaagctggacctgcagtgggtgcaggtgctgtctgagggctgggccacccccctgaagggcttcatgagggagaaggagtacctgcaggtgatgcactttgacaccctgctggatggcatgttcctgctggatggagtcatcaacatgagcatccccatcgtgctgcctgtgtctgctgaggacaagacccggctggagggctgcagcaagtttgtgctggcccacggcggcagaagagtggccatcctgagagatgctgagttctatgagcacaggaaggaggagcgctgcagccgggtgtggggcaccacctgcaccaagcacccccacatcaagatggtgatggagagcggggactggctggtgggcggggacctgcaggtgctggagaagatccgctggaatgatggcctggaccagtaccgcctgacccccctggagctgaagcagaagtgcaaggagatgaatgctgatgctgtgtttgccttccagctgagaaatcctgtgcacaacggccacgccctgctgatgcaggacacccggcggcggctgctggagcggggctacaagcaccctgtgctgctgctgcaccccctgggcggctggaccaaggatgatgatgtgcccctggactggaggatgaagcagcacgccgctgtgctggaggagggcgtgctggaccccaagagcaccatcgtggccatcttccccagccccatgctgtatgccggccccacagaggtgcagtggcactgccgcagcaggatgattgctggggccaacttctacatcgtgggccgggaccctgctggcatgccccaccctgagaccaagaaggacctgtatgagcccacccatggaggcaaggtgctgtccatggcccctggcctgacctctgtggagatcatccccttccgggtggccgcctacaacaaggccaagaaggccatggacttctatgaccctgcccggcacaatgaatttgacttcatcagcggcaccaggatgaggaagctggcccgggagggagaaaatcctccagatggcttcatggcccccaaggcctggaaggtgctgacagactactaccgcagcctggagaagaactag

SEQ ID NO: 141920 - DNA, 1857 bp, synthetic construct
  misc_feature 1..1857: note = Description of Artificial Sequence: Synthetic coding sequence
  source 1..1857: mol_type = other DNA
atgattgtgctggtgacagagtgggtggacctgagcctggagaaccagcagaagagcaccaacgtggtgtaccaggcccaccacgtgtccaggaacaagaggggccaggtggtgggcacccggggcggcttccggggctgcaccgtgtggctgaccggcctgtctggagctgggaagaccaccatcagctttgccctggaggagtacctggtgtcccatgccatcccctgctacagcctggatggagacaacgtgagacatggcctgaacagaaacctgggcttcagccctggggaccgggaggagaacatcagaagaattgctgaggtggccaagctgtttgctgatgctggcctggtgtgcatcaccagcttcatcagcccctttgccaaggaccgggagaatgccaggaagatccacgagagcgctggcctgcccttctttgagatctttgtggatgcccccctgaacatctgtgagagcagagatgtgaagggcctgtacaagagggcccgggccggggagatcaagggcttcaccggcatcgacagcgactatgagaagccagagaccccagagcgggtgctgaagaccaacctgagcacagtgtctgactgtgtgcaccaggtggtggagctgctgcaggagcagaacatcgtgccctacaccatcatcaaggacatccacgagctgtttgtgcctgagaacaagctggaccacgtgcgggcagaggccgagaccctgcccagcctgagcatcaccaagctggacctgcagtgggtgcaggtgctgtctgagggctgggccacccccctgaagggcttcatgagggagaaggagtacctgcaggtgatgcactttgacaccctgctggatgatggagtcatcaacatgagcatccccatcgtgctgcctgtgtctgctgaggacaagacccggctggagggctgcagcaagtttgtgctggcccacggcggcagaagagtggccatcctgagagatgctgagttctatgagcacaggaaggaggagcgctgcagccgggtgtggggcaccacctgcaccaagcacccccacatcaagatggtgatggagagcggggactggctggtgggcggggacctgcaggtgctggagaagatccgctggaatgatggcctggaccagtaccgcctgacccccctggagctgaagcagaagtgcaaggagatgaatgctgatgctgtgtttgccttccagctgagaaatcctgtgcacaacggccacgccctgctgatgcaggacacccggcggcggctgctggagcggggctacaagcaccctgtgctgctgctgcaccccctgggcggctggaccaaggatgatgatgtgcccctggactggaggatgaagcagcacgccgctgtgctggaggagggcgtgctggaccccaagagcaccatcgtggccatcttccccagccccatgctgtatgccggccccacagaggtgcagtggcactgccgcagcaggatgattgctggggccaacttctacatcgtgggccgggaccctgctggcatgccccaccctgagaccaagaaggacctgtatgagcccacccatggaggcaaggtgctgtccatggcccctggcctgacctctgtggagatcatccccttccgggtggccgcctacaacaaggccaagaaggccatggacttctatgaccctgcccggcacaatgaatttgacttcatcagcggcaccaggatgaggaagctggcccgggagggagaaaatcctccagatggcttcatggcccccaaggcctggaaggtgctgacagactactaccgcagcctggagaagaactag

SEQ ID NO: 141921 - DNA, 1860 bp, synthetic construct
  misc_feature 1..1860: note = Description of Artificial Sequence: Synthetic coding sequence
  source 1..1860: mol_type = other DNA
atgagcggcatcaagaagcagaagacagagaaccagcagaagagcaccaacgtggtgtaccaggcccaccacgtgtccaggaacaagaggggccaggtggtgggcacccggggcggcttccggggctgcaccgtgtggctgaccggcctgtctggagctgggaagaccaccatcagctttgccctggaggagtacctggtgtcccatgccatcccctgctacagcctggatggagacaacgtgagacatggcctgaacagaaacctgggcttcagccctggggaccgggaggagaacatcagaagaattgctgaggtggccaagctgtttgctgatgctggcctggtgtgcatcaccagcttcatcagcccctttgccaaggaccgggagaatgccaggaagatccacgagagcgctggcctgcccttctttgagatctttgtggatgcccccctgaacatctgtgagagcagagatgtgaagggcctgtacaagagggcccgggccggggagatcaagggcttcaccggcatcgacagcgactatgagaagccagagaccccagagcgggtgctgaagaccaacctgagcacagtgtctgactgtgtgcaccaggtggtggagctgctgcaggagcagaacatcgtgccctacaccatcatcaaggacatccacgagctgtttgtgcctgagaacaagctggaccacgtgcgggcagaggccgagaccctgcccagcctgagcatcaccaagctggacctgcagtgggtgcaggtgctgtctgagggctgggccacccccctgaagggcttcatgagggagaaggagtacctgcaggtgatgcactttgacaccctgctggatggcatggccctgcctgatggagtcatcaacatgagcatccccatcgtgctgcctgtgtctgctgaggacaagacccggctggagggctgcagcaagtttgtgctggcccatggaggccggcgggtggccatcctgagagatgctgagttctatgagcacaggaaggaggagcgctgcagccgggtgtggggcaccacctgcaccaagcacccccacatcaagatggtgatggagagcggggactggctggtgggcggggacctgcaggtgctggagaagatccgctggaatgatggcctggaccagtaccgcctgacccccctggagctgaagcagaagtgcaaggagatgaatgctgatgctgtgtttgccttccagctgaggaaccctgtgcacaatggacatgccctgctgatgcaggacacccggcggcggctgctggagcggggctacaagcaccctgtgctgctgctgcaccccctgggcggctggaccaaggatgatgatgtgcccctggactggaggatgaagcagcacgccgctgtgctggaggagggcgtgctggaccccaagagcaccatcgtggccatcttccccagccccatgctgtatgccggccccacagaggtgcagtggcactgccgcagcaggatgattgctggggccaacttctacatcgtgggccgggaccctgctggcatgccccaccctgagaccaagaaggacctgtatgagcccacccacggcggcaaggtgctgtccatggcccctggcctgacctctgtggagatcatccccttccgggtggccgcctacaacaaggccaagaaggccatggacttctatgaccctgcccggcacaatgaatttgacttcatcagcggcaccaggatgaggaagctggcccgggagggggagaaccccccagatggcttcatggcccccaaggcctggaaggtgctgacagactactaccgcagcctggagaagaactag

SEQ ID NO: 141922 - DNA, 1503 bp, synthetic construct
  misc_feature 1..1503: note = Description of Artificial Sequence: Synthetic coding sequence
  source 1..1503: mol_type = other DNA
atggcctccatgctgctggcccagaggctggcctgcagcttccagcacagctaccgcctgctggtgcccggcagccgccacatcagccaggccgccgccaaggtggatgtggagtttgattatgatggccccctgatgaagacagaggtgcccggccccaggagccaggagctgatgaagcagctgaacatcatccagaatgctgaggccgtgcacttcttctgcaactatgaggagagccggggcaactacctggtggatgtggatggcaacaggatgctggacctgtacagccagatcagctctgtgcccatcggctacagccacccagccctgctgaagctgatccagcagccccagaatgcctccatgtttgtgaacagacctgccctgggcatcctgcccccagaaaattttgtggagaagctgcggcagagcctgctgtctgtggcccccaagggcatgagccagctgatcaccatggcctgtggcagctgcagcaatgaaaatgccctgaagaccatcttcatgtggtaccgcagcaaggagcggggccagaggggcttcagccaggaggagctggagacctgcatgatcaaccaggcccctggctgcccagactacagcatcctgtccttcatgggcgccttccacggccgcaccatgggctgcctggccaccacccacagcaaggccatccacaagattgacatccccagctttgactggcccatcgcccccttcccccggctgaagtaccccctggaggagtttgtgaaggagaaccagcaggaggaggcccgctgcctggaggaggtggaggacctgattgtgaagtacaggaagaagaagaagacagtggccggcatcatcgtggagcccatccagagcgagggcggggacaaccacgccagtgatgacttcttcaggaagctgcgggacatcgccaggaagcacggctgtgccttcctggtggatgaggtgcagacaggaggcggctgcaccgggaagttctgggcccacgagcactggggcctggatgatcctgcagatgtgatgaccttcagcaagaagatgatgactggaggcttcttccacaaggaggagttccggcccaatgccccctaccgcatcttcaacacctggctgggggaccccagcaagaacctgctgctggccgaggtgatcaacatcatcaagcgggaggacctgctgaacaatgctgcccatgctgggaaggccctgctgaccggcctgctggacctgcaggcccgctacccccagttcatcagccgggtgcggggccggggcaccttctgcagctttgacaccccagatgacagcatccggaacaagctgatcctgattgccaggaacaagggcgtggtgctgggcggctgtggggacaagagcatccgcttccggcccaccctggtgttccgggaccaccacgcccacctgttcctgaacatcttcagtgacatcctggccgacttcaagtag

SEQ ID NO: 141923 - DNA, 1503 bp, synthetic construct; identical to SEQ ID NO: 141922
  misc_feature 1..1503: note = Description of Artificial Sequence: Synthetic coding sequence
  source 1..1503: mol_type = other DNA

SEQ ID NO: 141924 - DNA, 1503 bp, synthetic construct; identical to SEQ ID NO: 141922
  misc_feature 1..1503: note = Description of Artificial Sequence: Synthetic coding sequence
  source 1..1503: mol_type = other DNA

SEQ ID NO: 141925 - DNA, 462 bp, synthetic construct
  misc_feature 1..462: note = Description of Artificial Sequence: Synthetic coding sequence
  source 1..462: mol_type = other DNA
gtggacatggatggagtgctggccgactttgaggccggcctgctgcggggcttcagaagacgcttccctgaggagccccacgtgcccctggagcagaggcggggcttcctggcccgggagcagtaccgggccctgcggccagacctggccgacaaggtggcctctgtgtatgaggcccctggcttcttcctggacctggagcccatccctggggccctggatgctgtgcgggagatgaatgacctgcctgacacccaggtgttcatctgcaccagccccctgctgaagtaccaccactgtgtgggggagaaggaggagacccccagctgggagcacatcctcttcacctgctgccacaacagacacctggtgctgccccccacccggcggcggctgctgtcctggagcgacaactggagggagatcctggacagcaagagaggagctgcccagcgggagtag

SEQ ID NO: 141926 - DNA, 606 bp, synthetic construct
  misc_feature 1..606: note = Description of Artificial Sequence: Synthetic coding sequence
  source 1..606: mol_type = other DNA
atggcccggtctgtgcgggtgctggtggacatggatggagtgctggccgactttgaggccggcctgctgcggggcttcagaagacgcttccctgaggagccccacgtgcccctggagcagaggcggggcttcctggcccgggagcagtaccgggccctgcggccagacctggccgacaaggtggcctctgtgtatgaggcccctggcttcttcctggacctggagcccatccctggggccctggatgctgtgcgggagatgaatgacctgcctgacacccaggtgttcatctgcaccagccccctgctgaagtaccaccactgtgtgggggagaagtaccgctgggtggagcagcacctgggcccccagtttgtggagcgcatcatcctgacccgggacaagacagtggtgctgggggacctgctgattgatgacaaggacacagtgcggggccaggaggagacccccagctgggagcacatcctcttcacctgctgccacaacagacacctggtgctgccccccacccggcggcggctgctgtcctggagcgacaactggagggagatcctggacagcaagagaggagctgcccagcgggagtag

SEQ ID NO: 141927 - DNA, 687 bp, synthetic construct
  misc_feature 1..687: note = Description of Artificial Sequence: Synthetic coding sequence
  source 1..687: mol_type = other DNA
atgatccggctgggcggctggtgtgcccggcggctgtgcagcgctgctgtgcctgctggaagaagaggagctgctgggggcctgggcctggccggcggccgggccctgcgggtgctggtggacatggatggagtgctggccgactttgaaggaggcttcctgaggaagttccgggcccgcttcccagaccagcccttcatcgccctggaggaccggcggggcttctgggtgtctgagcagtatggccgcctgcggcccggcctgtctgagaaggccatcagcatctgggagagcaagaacttcttctttgagctggagcccctgcctggagctgtggaggccgtgaaggagatggccagcctgcagaacacagatgtgttcatctgcaccagccccatcaagatgttcaagtactgcccctatgagaagtatgcctgggtggagaagtactttggaccagacttcctggagcagatcgtgctgacccgggacaagacagtggtgtctgctgacctgctgattgatgacagaccagacatcactggagctgagcccacccccagctgggagcacgtgctcttcaccgcctgccacaaccagcacctgcagctgcagcccccccggcggcggctgcacagctgggcagatgactggaaggccatcctggacagcaagaggccctgctag

SEQ ID NO: 141928 - DNA, 720 bp, synthetic construct
  misc_feature 1..720: note = Description of Artificial Sequence: Synthetic coding sequence
  source 1..720: mol_type = other DNA
atgatccggctgggcggctggtgtgcccggcggctgtgcagcgctgctgtgcctgctggaagaagaggagctgctgggggcctgggcctggccggcggccgggccctgcgggtgctggtggacatggatggagtgctggccgactttgaaggaggcttcctgaggaagttccgggcccgcttcccagaccagcccttcatcgccctggaggaccggcggggcttctgggtgtctgagcagtatggccgcctgcggcccggcctgtctgagaaggccatcagcatctgggagagcaagaacttcttctttgagctggagcccctgcctggagctgtggaggccgtgaaggagatggccagcctgcagaacacagatgtgttcatctgcaccagccccatcaagatgttcaagtactgcccctatgagaagtatgcctgggtggagaagtactttggaccagacttcctggagcagatcgtgctgacccgggacaagacagtggtgtctgctgacctgctgattgatgacagaccagacatcactggaaaccagcccccagctggctccatgagcagcagccccccagccaccaccagcacctgcagctgcagccccccagctgctggctgcacccggggccgcaccaccggccggcccttctggacagccagcggccctgctgagctggactgtgccagcggcagctctgtgggcctgtag

SEQ ID NO: 141929 - DNA, 2853 bp, synthetic construct
  misc_feature 1..2853: note = Description of Artificial Sequence: Synthetic coding sequence
  source 1..2853: mol_type = other DNA
atgggcgtgcctgccttcttccgctggctgagcaggaagtaccccagcatcatcgtgaactgtgtggaggagaagcccaaggagtgcaatggagtgaagatccctgtggatgccagcaagcccaaccccaatgatgtggagtttgacaacctgtacctggacatgaatggcatcatccacccctgcacccaccctgaggacaagccagcccccaagaatgaagatgagatgatggtggccatctttgagtacatcgacaggctcttcagcatcgtgcggccccggcggctgctgtacatggccattgatggagtggccccccgggccaagatgaaccagcagaggagccgccgcttccgggccagcaaggagggcatggaggccgctgtggagaagcagagggtgcgggaggagatcctggccaagggcggcttcctgcccccagaggagatcaaggagagatttgacagcaactgcatcaccccaggcacagagttcatggacaacctggccaagtgcctgcgctactacatcgctgaccggctgaacaatgaccccggctggaagaacctgaccgtcatcctgagtgatgccagcgcccctggagagggggagcacaagatcatggactacatccggcggcagagggcccagcccaaccacgaccccaacacccaccactgcctgtgtggggctgatgctgacctgatcatgctgggcctggccacccatgagcccaacttcaccatcatccgggaggagttcaagcccaacaagcccaagccctgtggcctgtgcaaccagtttggacatgaggtgaaggactgtgagggcctgccccgggagaagaagggcaagcatgatgagctggccgacagcctgccctgtgccgagggggagttcatcttcctgcggctgaatgtgctgcgggagtacctggagcgggagctgaccatggccagcctgcccttcacctttgatgtggagaggagcattgatgactgggtgttcatgtgcttctttgtgggcaatgacttcctgccccacctgcccagcctggagatcagagaaaatgccatcgaccggctggtgaacatctacaagaatgtggtgcacaagacaggaggctacctgacagaaagtggctacgtgaacctgcagagggtgcagatgatcatgctggccgtgggggaggtggaggacagcatcttcaagaagaggaaggatgatgaagattccttcagaagacggcagaaggagaagaggaagaggatgaagagggaccagcctgccttcaccccatctggcatcctgacccctcatgccctgggcagcaggaacagccctggcagccaggtggccagcaacccccggcaggccgcctatgagatgaggatgcagaacaacagcagccccagcatcagccccaacaccagcttcaccagtgatggcagccccagccccctgggcggcatcaagaggaaggcagaagattctgattctgagcctgagcctgaggacaacgtgcggctgtgggaggccggctggaagcagcgctactacaagaacaagtttgatgtggatgctgctgatgagaagttccggaggaaggtggtgcagagctatgtggagggcctgtgctgggtgctgcgctactactaccagggctgtgcctcctggaagtggtactaccccttccactacgccccctttgccagtgactttgagggcattgctgacatgcccagcgactttgagaagggcaccaagcccttcaagcccctggagcagctgatgggcgtcttccctgctgccagcggcaacttcctgcccccatcctggaggaagctgatgtctgaccctgacagcagcatcatcgacttctacccagaagattttgccatcgacctgaatggcaagaagtatgcctggcagggcgtggccctgctgccctttgtggatgagcggcggctgcgggccgccctggaggaggtgtacccagacctgaccccagaggagaccaggaggaacagcctgggcggagatgtgctgtttgtgggcaagcaccaccccctgcatgacttcatcctggagctgtaccagacaggcagcacagagcctgtggaggtgcccccagagctgtgccacggcatccagggcaagttcagcctggatgaggaggccatcctgcctgaccagatcgtgtgcagccctgtgcccatgctgcgggacctgacccagaacacagtggtgtccatcaacttcaaggacccccagtttgctgaggactacatcttcaaggctgtgatgctgcccggggccaggaagccagctgctgtgctgaagcccagcgactgggagaagagcagcaatggccggcagtggaagccccagctgggcttcaacagagacagaagacctgtgcacctggaccaggccgccttccgcaccctgggccacgtgatgccccggggcagcggcaccggcatctacagcaatgctgcccctcctcctgtgacctaccagggcaacctgtaccggcccctgctgcggggccaggcccagatccccaagctgatgagcaacatgaggccccaggacagctggaggggccccccacccctcttccagcagcagagatttgaccggggcgtgggcgctgagcccctgctgccctggaacaggatgctgcagacccagaatgctgccttccagcccaaccagtaccagatgctggccggccctgggggctaccccccaagaagagatgaccggggcggccggcagggctacccccgggagggcaggaagtaccccctgcccccacccagcggccgctacaactggaactag

SEQ ID NO: 141930 - DNA, 2625 bp, synthetic construct
  misc_feature 1..2625: note = Description of Artificial Sequence: Synthetic coding sequence
  source 1..2625: mol_type = other DNA
atgatggtggccatctttgagtacatcgacaggctcttcagcatcgtgcggccccggcggctgctgtacatggccattgatggagtggccccccgggccaagatgaaccagcagaggagccgccgcttccgggccagcaaggagggcatggaggccgctgtggagaagcagagggtgcgggaggagatcctggccaagggcggcttcctgcccccagaggagatcaaggagagatttgacagcaactgcatcaccccaggcacagagttcatggacaacctggccaagtgcctgcgctactacatcgctgaccggctgaacaatgaccccggctggaagaacctgaccgtcatcctgagtgatgccagcgcccctggagagggggagcacaagatcatggactacatccggcggcagagggcccagcccaaccacgaccccaacacccaccactgcctgtgtggggctgatgctgacctgatcatgctgggcctggccacccatgagcccaacttcaccatcatccgggaggagttcaagcccaacaagcccaagccctgtggcctgtgcaaccagtttggacatgaggtgaaggactgtgagggcctgccccgggagaagaagggcaagcatgatgagctggccgacagcctgccctgtgccgagggggagttcatcttcctgcggctgaatgtgctgcgggagtacctggagcgggagctgaccatggccagcctgcccttcacctttgatgtggagaggagcattgatgactgggtgttcatgtgcttctttgtgggcaatgacttcctgccccacctgcccagcctggagatcagagaaaatgccatcgaccggctggtgaacatctacaagaatgtggtgcacaagacaggaggctacctgacagaaagtggctacgtgaacctgcagagggtgcagatgatcatgctggccgtgggggaggtggaggacagcatcttcaagaagaggaaggatgatgaagattccttcagaagacggcagaaggagaagaggaagaggatgaagagggaccagcctgccttcaccccatctggcatcctgacccctcatgccctgggcagcaggaacagccctggcagccaggtggccagcaacccccggcaggccgcctatgagatgaggatgcagaacaacagcagccccagcatcagccccaacaccagcttcaccagtgatggcagccccagccccctgggcggcatcaagaggaaggcagaagattctgattctgagcctgagcctgaggacaacgtgcggctgtgggaggccggctggaagcagcgctactacaagaacaagtttgatgtggatgctgctgatgagaagttccggaggaaggtggtgcagagctatgtggagggcctgtgctgggtgctgcgctactactaccagggctgtgcctcctggaagtggtactaccccttccactacgccccctttgccagtgactttgagggcattgctgacatgcccagcgactttgagaagggcaccaagcccttcaagcccctggagcagctgatgggcgtcttccctgctgccagcggcaacttcctgcccccatcctggaggaagctgatgtctgaccctgacagcagcatcatcgacttctacccagaagattttgccatcgacctgaatggcaagaagtatgcctggcagggcgtggccctgctgccctttgtggatgagcggcggctgcgggccgccctggaggaggtgtacccagacctgaccccagaggagaccaggaggaacagcctgggcggagatgtgctgtttgtgggcaagcaccaccccctgcatgacttcatcctggagctgtaccagacaggcagcacagagcctgtggaggtgcccccagagctgtgccacggcatccagggcaagttcagcctggatgaggaggccatcctgcctgaccagatcgtgtgcagccctgtgcccatgctgcgggacctgacccagaacacagtggtgtccatcaacttcaaggacccccagtttgctgaggactacatcttcaaggctgtgatgctgcccggggccaggaagccagctgctgtgctgaagcccagcgactgggagaagagcagcaatggccggcagtggaagccccagctgggcttcaacagagacagaagacctgtgcacctggaccaggccgccttccgcaccctgggccacgtgatgccccggggcagcggcaccggcatctacagcaatgctgcccctcctcctgtgacctaccagggcaacctgtaccggcccctgctgcggggccaggcccagatccccaagctgatgagcaacatgaggccccaggacagctggaggggccccccacccctcttccagcagcagagatttgaccggggcgtgggcgctgagcccctgctgccctggaacaggatgctgcagacccagaatgctgccttccagcccaaccagtaccagatgctggccggccctgggggctaccccccaagaagagatgaccggggcggccggcagggctacccccgggagggcaggaagtaccccctgcccccacccagcggccgctacaactggaactag

SEQ ID NO: 141931 - DNA, 2691 bp, synthetic construct
  misc_feature 1..2691: note = Description of Artificial Sequence: Synthetic coding sequence
  source 1..2691: mol_type = other DNA
atgaatggcatcatccacccctgcacccaccctgaggacaagccagcccccaagaatgaagatgagatgatggtggccatctttgagtacatcgacaggctcttcagcatcgtgcggccccggcggctgctgtacatggccattgatggagtggccccccgggccaagatgaaccagcagaggagccgccgcttccgggccagcaaggagggcatggaggccgctgtggagaagcagagggtgcgggaggagatcctggccaagggcggcttcctgcccccagaggagatcaaggagagatttgacagcaactgcatcaccccaggcacagagttcatggacaacctggccaagtgcctgcgctactacatcgctgaccggctgaacaatgaccccggctggaagaacctgaccgtcatcctgagtgatgccagcgcccctggagagggggagcacaagatcatggactacatccggcggcagagggcccagcccaaccacgaccccaacacccaccactgcctgtgtggggctgatgctgacctgatcatgctgggcctggccacccatgagcccaacttcaccatcatccgggaggagttcaagcccaacaagcccaagccctgtggcctgtgcaaccagtttggacatgaggtgaaggactgtgagggcctgccccgggagaagaagggcaagcatgatgagctggccgacagcctgccctgtgccgagggggagttcatcttcctgcggctgaatgtgctgcgggagtacctggagcgggagctgaccatggccagcctgcccttcacctttgatgtggagaggagcattgatgactgggtgttcatgtgcttctttgtgggcaatgacttcctgccccacctgcccagcctggagatcagagaaaatgccatcgaccggctggtgaacatctacaagaatgtggtgcacaagacaggaggctacctgacagaaagtggctacgtgaacctgcagagggtgcagatgatcatgctggccgtgggggaggtggaggacagcatcttcaagaagaggaaggatgatgaagattccttcagaagacggcagaaggagaagaggaagaggatgaagagggaccagcctgccttcaccccatctggcatcctgacccctcatgccctgggcagcaggaacagccctggcagccaggtggccagcaacccccggcaggccgcctatgagatgaggatgcagaacaacagcagccccagcatcagccccaacaccagcttcaccagtgatggcagccccagccccctgggcggcatcaagaggaaggcagaagattctgattctgagcctgagcctgaggacaacgtgcggctgtgggaggccggctggaagcagcgctactacaagaacaagtttgatgtggatgctgctgatgagaagttccggaggaaggtggtgcagagctatgtggagggcctgtgctgggtgctgcgctactactaccagggctgtgcctcctggaagtggtactaccccttccactacgccccctttgccagtgactttgagggcattgctgacatgcccagcgactttgagaagggcaccaagcccttcaagcccctggagcagctgatgggcgtcttccctgctgccagcggcaacttcctgcccccatcctggaggaagctgatgtctgaccctgacagcagcatcatcgacttctacccagaagattttgccatcgacctgaatggcaagaagtatgcctggcagggcgtggccctgctgccctttgtggatgagcggcggctgcgggccgccctggaggaggtgtacccagacctgaccccagaggagaccaggaggaacagcctgggcggagatgtgctgtttgtgggcaagcaccaccccctgcatgacttcatcctggagctgtaccagacaggcagcacagagcctgtggaggtgcccccagagctgtgccacggcatccagggcaagttcagcctggatgaggaggccatcctgcctgaccagatcgtgtgcagccctgtgcccatgctgcgggacctgacccagaacacagtggtgtccatcaacttcaaggacccccagtttgctgaggactacatcttcaaggctgtgatgctgcccggggccaggaagccagctgctgtgctgaagcccagcgactgggagaagagcagcaatggccggcagtggaagccccagctgggcttcaacagagacagaagacctgtgcacctggaccaggccgccttccgcaccctgggccacgtgatgccccggggcagcggcaccggcatctacagcaatgctgcccctcctcctgtgacctaccagggcaacctgtaccggcccctgctgcggggccaggcccagatccccaagctgatgagcaacatgaggccccaggacagctggaggggccccccacccctcttccagcagcagagatttgaccggggcgtgggcgctgagcccctgctgccctggaacaggatgctgcagacccagaatgctgccttccagcccaaccagtaccagatgctggccggccctgggggctaccccccaagaagagatgaccggggcggccggcagggctacccccgggagggcaggaagtaccccctgcccccacccagcggccgctacaactggaactag

SEQ ID NO: 141932 - DNA, 1779 bp, synthetic construct
  misc_feature 1..1779: note = Description of Artificial Sequence: Synthetic coding sequence
  source 1..1779: mol_type = other DNA
atggcccctggccagctggccctcttctctgtgtctgacaagacaggcctggtggagtttgccaggaacctgacagccctgggcctgaacctggtggccagcggcggcacagccaaggccctgagagatgctggcctggccgtgagagatgtgtctgagctgaccggcttccctgagatgctgggcggccgggtgaagaccctgcaccctgctgtgcacgccggcatcctggccaggaacatcccagaagataatgctgacatggcccggctggacttcaacctgatccgggtggtggcctgcaacctgtacccctttgtgaagacagtggccagccctggggtgacagtggaggaggccgtggagcagattgacatcggcggcgtgaccctgctgcgggctgctgccaagaaccacgcccgggtgacagtggtgtgtgagccagaagattatgtggtggtgtccacagagatgcagagcagcgagagcaaggacaccagcctggagacccggcggcagctggccctgaaggccttcacccacacagcccagtatgatgaggccatcagtgactacttcaggaagcagtacagcaaaggagtgtcccagatgcccctgcgctatggcatgaacccccaccagaccccagcccagctgtacaccctgcagcccaagctgcccatcaccgtgctgaatggagcccctggcttcatcaacctgtgtgatgccctgaatgcctggcagctggtgaaggagctgaaggaggccctgggcatcccagctgctgccagcttcaagcacgtgtccccagctggagctgctgtgggcatccccctgtctgaagatgaggccaaggtgtgcatggtgtatgacctgtacaagaccctgacccccatctctgctgcctatgcccgggcccggggagctgacaggatgagcagctttggagactttgtggccctgagtgatgtgtgtgatgtgcccacagccaagatcatcagccgggaggtgtctgatggcatcatcgcccctggctatgaggaggaggccctgaccatcctgagcaagaagaagaatggaaactactgtgtgctgcagatggaccagagctacaagccagatgaaaatgaggtgaggaccctgtttggcctgcacctgagccagaagaggaacaacggggtggtggacaagagcctcttcagcaatgtggtgaccaagaacaaggacctgcctgagagcgccctgcgggacctgattgtggccaccatcgctgtgaagtacacccagagcaacagcgtgtgctacgccaagaatggccaggtgattggcatcggggccggccagcagagccgcatccactgcacccggctggccggggacaaggccaactactggtggctgcggcaccacccccaggtgctgtccatgaagttcaagacaggagtgaagagagctgagatcagcaatgccatcgaccagtatgtgacaggcaccatcggagaagatgaagatctcatcaagtggaaggccctgtttgaggaggtgcctgagctgctgacagaggccgagaagaaggagtgggtggagaagctgacagaggtgtccatcagcagtgatgccttcttccccttccgggacaacgtggaccgggccaagagaagtggagtggcctacatcgccgcccccagcggcagcgctgctgacaaggtggtgattgaggcctgtgatgagctgggcatcatcctggcccacaccaacctgcggctcttccaccactag

SEQ ID NO: 141933 - DNA, 1602 bp, synthetic construct
  misc_feature 1..1602: note = Description of Artificial Sequence: Synthetic coding sequence
  source 1..1602: mol_type = other DNA
atgctgggcggccgggtgaagaccctgcaccctgctgtgcatgctggcatcctggccaggaacatccctgaggacaatgctgacatggcccggctggacttcaacctgatccgggtggtggcctgcaacctgtacccctttgtgaagacagtggccagccctggggtgacagtggaggaggccgtggagcagattgatattggaggagtgaccctgctgcgggccgccgccaagaaccacgcccgggtgacagtggtgtgtgagcctgaggactatgtggtggtgtccacagagatgcagagcagcgagagcaaggacaccagcctggagacccggcggcagctggccctgaaggccttcacccacacagcccagtatgatgaggccatcagtgactacttcaggaagcagtacagcaagggcgtgtcccagatgcccctgcgctatggcatgaacccccaccagaccccagcccagctgtacaccctgcagcccaagctgcccatcaccgtgctgaatggagcccctggcttcatcaacctgtgtgatgccctgaatgcctggcagctggtgaaggagctgaaggaggccctgggcatcccagctgctgccagcttcaagcacgtgtccccagctggagctgctgtgggcatccccctgtctgaagatgaggccaaggtgtgcatggtgtatgacctgtacaagaccctgacccccatctctgctgcctatgcccgggcccggggagctgacaggatgagcagctttggagactttgtggccctgagtgatgtgtgtgatgtgcccacagccaagatcatcagccgggaggtgtctgatggcatcatcgcccctggctatgaggaggaggccctgaccatcctgagcaagaagaagaatggaaactactgtgtgctgcagatggaccagagctacaagccagatgaaaatgaggtgaggaccctgtttggcctgcacctgagccagaagagaaataatggagtggtggacaagagcctcttcagcaatgtggtgaccaagaacaaggacctgcctgagagcgccctgcgggacctgattgtggccaccatcgctgtgaagtacacccagagcaacagcgtgtgctacgccaagaatggccaggtgattggaattggagctggccagcagagccgcatccactgcacccggctggccggggacaaggccaactactggtggctgcggcaccacccccaggtgctgtccatgaagttcaagacaggagtgaagagagctgagatcagcaatgccatcgaccagtatgtgacaggcaccatcggggaggatgaggacctgatcaagtggaaggccctgtttgaggaggtgcctgagctgctgacagaagctgagaagaaggagtgggtggagaagctgacagaggtgtccatcagcagtgatgccttcttccccttccgggacaacgtggaccgggccaagaggtctggagtggcctacatcgccgcccccagcggcagcgctgctgacaaggtggtgattgaggcctgtgatgagctgggcatcatcctggcccacaccaacctgcggctcttccaccactag

SEQ ID NO: 141934 - DNA, 3252 bp, synthetic construct
  misc_feature 1..3252: note = Description of Artificial Sequence: Synthetic coding sequence
  source 1..3252: mol_type = other DNA
atgaagggcacccgggccatcggctctgtgcctgagaggagccctgctggggtggacctgagcctgaccggcctgcccccacctgtgtccagaagacctggcagcgctgccaccaccaagcccatcgtgcgctctgtgtctgtggtgacaggcagcgagcagaagaggaaggtgctggaggccaccggccctgggggcagccaggccatcaacaacctgcggcgcagcaacagcaccacccaggtgtcccagcccaggagcggcagcccccggcccacagagcccacagacttcctgatgctgtttgagggcagccccagcggcaagaagaggcctgccagcctgagcacagcccccagcgagaagggggccacctggaatgtgctggatgaccagccccggggcttcaccctgcccagcaatgcccggagcagcagcgccctggacagccctgctggccccaggaggaaggagtgcaccgtggccctggcccccaacttcaccgccaacaacagaagcaacaagggagctgtgggcaactgtgtgaccaccatggtgcacaaccgctacaccccatctgagcgggccccacccctgaagagcagcaaccagacagcccccagcctgaacaacatcatcaaggccgccacctgtgagggcagcgagagcagcggctttgggaagctgcccaagaatgtgtcctctgccacccacagcgccaggaacaacacaggaggcagcacaggcctgcccaggaggaaggaggtgacagaggaggaggccgagcgcttcatccaccaggtgaaccaggccaccgtgaccatccagcgctggtaccgccaccaggtgcagaggagaggagctggggccgcccggctggagcacctgctgcaggccaagcgggaggagcagaggcagaggtctggagagggcaccctgctggacctgcaccagcagaaggaggccgcccggaggaaggcccgggaggagaaggcccggcaggcccggcgggccgccatccaggagctgcagcagaagagggccctgcgggcccagaaggccagcacagctgagcggggccccccagagaacccccgggagaccagggtgcccggcatgaggcagcctgcccaggagctgagccccacccctgggggcacagcccaccaggccctgaaggccaacaacacaggaggcggcctgcctgctgctggccctggggaccgctgcctgcccaccagtgacagcagccctgagccccagcagcccccagaggacaggacccaggatgtgctggcccaggatgctgctggggacaacctggagatgatggcccccagccggggcagcgccaagagccggggccccctggaggagctgctgcacaccctgcagctgctggagaaggagccagatgtgctgccccggcccaggacccaccaccggggccgctatgcctgggccagcgaggtgaccacagaagatgatgccagcagcctgacagctgacaacctggagaagtttgggaagctgagcgccttccctgagcccccagaagatggcaccctgctgtctgaggccaagctgcagagcatcatgtccttcctggatgagatggagaagagcggccaggaccagctggacagccagcaggagggctgggtgcctgaggccggccctggccccctggagctgggcagcgaggtgtccacctctgtgatgaggctgaagctggaggtggaggagaagaagcaggccatgctgctgctgcagagggccctggcccagcagagggacctgacagccaggagagtgaaggagacagagaaggccctgagccggcagctgcagaggcagcgggagcactatgaggccaccatccagaggcacctggccttcatcgaccagctgattgaggacaagaaggtgctgtctgagaagtgtgaggccgtggtggccgagctgaagcaggaggaccagcgctgcacagagcgggtggcccaggcccaggcccagcacgagctggagatcaagaagctgaaggagctgatgtctgccacagagaaggcccggcgggagaagtggatcagcgagaagaccaagaagatcaaggaggtgacagtgcggggcctggagcctgagatccagaagctgattgcccggcacaagcaggaggtgcggcggctgaagagcctgcatgaagctgagctgctgcagagtgatgagcgggccagccagcgctgcctgcggcaggccgaggagctgcgggagcagctggagcgggagaaggaggccctgggccagcaggagcgggagcgggcccggcagcgcttccagcagcacctggagcaggagcagtgggccctgcagcagcagaggcagaggctgtacagcgaggtggccgaggagcgggagcggctgggccagcaggccgcccggcagagagctgagctggaggagctgcggcagcagctggaggagagcagcagcgccctgacccgggccctgcgggcagagtttgagaagggccgggaggagcaggagaggaggcaccagatggagctgaacaccctgaagcagcagctggagctggagcggcaggcctgggaggccggccgcaccaggaaggaggaggcctggctgctgaaccgggagcaggagctgcgggaggagatcaggaagggccgggacaaggagattgagctggtgatccaccggctggaggccgacatggccctggccaaggaggagagcgagaaggctgctgagagccgcatcaagaggctgcgggacaagtatgaagctgagctgtctgagctggagcagagcgagaggaagctgcaggagcgctgcagcgagctgaagggccagctgggggaggccgagggggagaacctgcggctgcagggcctggtgcggcagaaggagcgggccctggaggatgcccaggccgtgaatgagcagctgagcagcgagaggagcaacctggcccaggtgatccggcaggagtttgaagatcggctggccgccagcgaggaggagacccggcaggccaaggccgagctggccaccctgcaggcccggcagcagctggagctggaggaggtgcaccggcgggtgaagacagccctggccaggaaggaggaggccgtgagcagcctgcggacccagcacgaggccgctgtgaagagagctgaccacctggaggagctgctggagcagcaccggcggcccacccccagcaccaagtag

SEQ ID NO: 141935 - DNA, 3135 bp, synthetic construct
  misc_feature 1..3135: note = Description of Artificial Sequence: Synthetic coding sequence
  source 1..3135: mol_type = other DNA
atgaagggcacccgggccatcggctctgtgcctgagaggagccctgctggggtggacctgagcctgaccggcctgcccccacctgtgtccagaagacctggcagcgctgccaccaccaagcccatcgtgcgctctgtgtctgtggtgacaggcagcgagcagaagaggaaggtgctggaggccaccggccctgggggcagccaggccatcaacaacctgcggcgcagcaacagcaccacccaggtgtcccagcccaggagcggcagcccccggcccacagagcccacagacttcctgatgctgtttgagggcagccccagcggcaagaagaggcctgccagcctgagcacagcccccagcgagaagggggccacctggaatgtgctggatgaccagccccggggcttcaccctgcccagcaatgcccggagcagcagcgccctggacagccctgctggccccaggaggaaggagtgcaccgtggccctggcccccaacttcaccgccaacaacagaagcaacaagggagctgtgggcaactgtgtgaccaccatggtgcacaaccgctacaccccatctgagcgggccccacccctgaagagcagcaaccagacagcccccagcctgaacaacatcatcaaggccgccacctgtgagggcagcgagagcagcggctttgggaagctgcccaagaatgtgtcctctgccacccacagcgccaggaacaacacaggaggcagcacaggcctgcccaggaggaaggaggtgacagaggaggaggccgagcgcttcatccaccaggtgaaccaggccaccgtgaccatccagcgctggtaccgccaccaggtgcagaggagaggagctggggccgcccggctggagcacctgctgcaggccaagcgggaggagcagaggcagaggtctggagagggcaccctgctggacctgcaccagcagaaggaggccgcccggaggaaggcccgggaggagaaggcccggcaggcccggcgggccgccatccaggagctgcagcagaagagggccctgcgggcccagaaggccagcacagctgagcggggccccccagagaacccccgggagaccagggtgcccggcatgaggcagcctgcccaggagctgagccccacccctgggggcacagcccaccaggccctgaaggccaacaacacaggaggcggcctgcctgctgctggccctggggaccgctgcctgcccaccagtgacagcagccctgagccccagcagcccccagaggacaggacccaggatgtgctggcccaggatgctgctggggacaacctggagatgatggcccccagccggggcagcgccaagagccggggccccctggaggagctgctgcacaccctgcagctgctggagaaggagccagatgtgctgccccggcccaggacccaccaccggggccgctatgcctgggcctctgaagaagatgatgccagcagcctgacagctgacaacctggagaagtttgggaagctgagcgccttccctgagcccccagaagatggcaccctgctgtctgaggccaagctgcagagcatcatgtccttcctggatgagatggagaagagcggccaggaccagctggacagccagcaggagggctgggtgcctgaggccggccctggccccctggagctgggcagcgaggtgtccacctctgtgatgaggctgaagctggaggtggaggagaagaagcaggccatgctgctgctgcagagggccctggcccagcagagggacctgacagcccggcgggtgaaggagacagagaaggccctgagccggcagctgcagaggcagcgggagcactatgaggccaccatccagaggcacctggccttcatcgaccagctgattgaggacaagaaggtgctgtctgagaagtgtgaggccgtggtggccgagctgaagcaggaggaccagcgctgcacagagcgggtggcccaggcccaggcccagcacgagctggagatcaagaagctgaaggagctgatgtctgccacagagaaggcccggcgggagaagtggatcagcgagaagaccaagaagatcaaggaggtgacagtgcggggcctggagcctgagatccagaagctgattgcccggcacaagcaggaggtgcggcggctgaagagcctgcacgaggccgagctgctgcagagtgatgagcgggccagccagcgctgcctgcggcaggccgaggagctgcgggagcagctggagcgggagaaggaggccctgggccagcaggagcgggagcgggcccggcagaggcagagagctgagctggaggagctgcggcagcagctggaggagagcagcagcgccctgacccgggccctgcgggcagagtttgagaagggccgggaggagcaggagcggcggcaccagatggagctgaacaccctgaagcagcagctggagctggagcggcaggcctgggaggccggccgcaccaggaaggaggaggcctggctgctgaaccgggagcaggagctgcgggaggagatcaggaagggccgggacaaggagattgagctggtgatccaccggctggaggccgacatggccctggccaaggaggagagcgagaaggctgctgagagccgcatcaagaggctgcgggacaagtatgaggccgagctgtctgagctggagcagagcgagaggaagctgcaggagcgctgcagcgagctgaagggccagctgggggaggccgagggggagaacctgcggctgcagggcctggtgcggcagaaggagcgggccctggaggatgcccaggccgtgaatgagcagctgagcagcgagaggagcaacctggcccaggtgatccggcaggagtttgaggaccggctggccgccagcgaggaggagacccggcaggccaaggccgagctggccaccctgcaggcccggcagcagctggagctggaggaggtgcacagaagagtgaagacagccctggccaggaaggaggaggccgtgagcagcctgcggacccagcatgaagctgctgtgaagagagctgaccacctggaggagctgctggagcagcacagaagacccacccccagcaccaagtag

SEQ ID NO: 141936 - DNA, 3243 bp, synthetic construct
  misc_feature 1..3243: note = Description of Artificial Sequence: Synthetic coding sequence
  source 1..3243: mol_type = other DNA
atgaagggcacccgggccatcggctctgtgcctgagaggagccctgctggggtggacctgagcctgaccggcctgcccccacctgtgtccagaagacctggcagcgctgccaccaccaagcccatcgtgcgctctgtgtctgtggtgacaggcagcgagcagaagaggaaggtgctggaggccaccggccctgggggcagccaggccatcaacaacctgcggcgcagcaacagcaccacccaggtgtcccagcccaggagcggcagcccccggcccacagagcccacagacttcctgatgctgtttgagggcagccccagcggcaagaagaggcctgccagcctgagcacagcccccagcgagaagggggccacctggaatgtgctggatgaccagccccggggcttcaccctgcccagcaatgcccggagcagcagcgccctggacagccctgctggccccaggaggaaggagtgcaccgtggccctggcccccaacttcaccgccaacaacagaagcaacaagggagctgtgggcaactgtgtgaccaccatggtgcacaaccgctacaccccatctgagcgggccccacccctgaagagcagcaaccagacagcccccagcctgaacaacatcatcaaggccgccacctgtgagggcagcgagagcagcggctttgggaagctgcccaagaatgtgtcctctgccacccacagcgccaggaacaacacaggaggcagcacaggcctgcccaggaggaaggaggtgacagaggaggaggccgagcgcttcatccaccaggtgaaccaggccaccgtgaccatccagcgctggtaccgccaccaggtgcagaggagaggagctggggccgcccggctggagcacctgctgcaggccaagcgggaggagcagaggcagaggtctggagagggcaccctgctggacctgcaccagcagaaggaggccgcccggaggaaggcccgggaggagaaggcccggcaggcccggcgggccgccatccaggagctgcagcagaagagggccctgcgggcccagaaggccagcacagctgagcggggccccccagagaacccccgggagaccagggtgcccggcatgaggcagcctgcccaggagctgagccccacccctgggggcacagcccaccaggccctgaaggccaacaacacaggaggcggcctgcctgctgctggccctggggaccgctgcctgcccaccagtgacagcagccctgagccccagcagcccccagaggacaggacccaggatgtgctggcccaggatgctgctggggacaacctggagatgatggcccccagccggggcagcgccaagagccggggccccctggaggagctgctgcacaccctgcagctgctggagaaggagccagatgtgctgccccggcccaggacccaccaccggggccgctatgcctgggcctctgaagaagatgatgccagcagcctgacagctgacaacctggagaagtttgggaagctgagcgccttccctgagcccccagaagatggcaccctgctgtctgaggccaagctgcagagcatcatgtccttcctggatgagatggagaagagcggccaggaccagctggacagccagcaggagggctgggtgcctgaggccggccctggccccctggagctgggcagcgaggtgtccacctctgtgatgaggctgaagctggaggtggaggagaagaagcaggccatgctgctgctgcagagggccctggcccagcagagggacctgacagcccggcgggtgaaggagacagagaaggccctgagccggcagctgcagaggcagcgggagcactatgaggccaccatccagaggcacctggccttcatcgaccagctgattgaggacaagaaggtgctgtctgagaagtgtgaggccgtggtggccgagctgaagcaggaggaccagcgctgcacagagcgggtggcccaggcccaggcccagcacgagctggagatcaagaagctgaaggagctgatgtctgccacagagaaggcccggcgggagaagtggatcagcgagaagaccaagaagatcaaggaggtgacagtgcggggcctggagcctgagatccagaagctgattgcccggcacaagcaggaggtgcggcggctgaagagcctgcacgaggccgagctgctgcagagtgatgagcgggccagccagcgctgcctgcggcaggccgaggagctgcgggagcagctggagcgggagaaggaggccctgggccagcaggagcgggagcgggcccggcagcgcttccagcagcacctggagcaggagcagtgggccctgcagcagcagaggcagaggctgtacagcgaggtggccgaggagcgggagcggctgggccagcaggccgcccggcagagagctgagctggaggagctgcggcagcagctggaggagagcagcagcgccctgacccgggccctgcgggcagagtttgagaagggccgggaggagcaggagcggcggcaccagatggagctgaacaccctgaagcagcagctggagctggagcggcaggcctgggaggccggccgcaccaggaaggaggaggcctggctgctgaaccgggagcaggagctgcgggaggagatcaggaagggccgggacaaggagattgagctggtgatccaccggctggaggccgacatggccctggccaaggaggagagcgagaaggctgctgagagccgcatcaagaggctgcgggacaagtatgaggccgagctgtctgagctggagcagagcgagaggaagctgcaggagcgctgcagcgagctgaagggccagctgggggaggccgagggggagaacctgcggctgcagggcctggtgcggcagaaggagcgggccctggaggatgcccaggccgtgaatgagcagctgagcagcgagaggagcaacctggcccaggtgatccggcaggagtttgaggaccggctggccgccagcgaggaggagacccggcaggccaaggccgagctggccaccctgcaggcccggcagcagctggagctggaggaggtgcacagaagagtgaagacagccctggccaggaaggaggaggccgtgagcagcctgcggacccagcatgaagctgctgtgaagagagctgaccacctggaggagctgctggagcagcacagaagacccacccccagcaccaagtag

SEQ ID NO: 141937 - DNA, 699 bp, synthetic construct
  misc_feature 1..699: note = Description of Artificial Sequence: Synthetic coding sequence
  source 1..699: mol_type = other DNA
atggatgccctggtggaggatgacatctgcatcctgaaccacgagaaggcccacaagagggacacagtgacccctgtgtccatctacagcggagatgagagcgtggccagccactttgccctggtgacagcctatgaggacatcaagaagaggctgaaggacagcgagaaggagaacagcctgctgaagaagaggatccgcttcctggaggagaagctgattgccaggtttgaggaggagaccagctctgtgggccgggagcaggtgaacaaggcctaccacgcctaccgggaggtgtgcatcgaccgggacaacctgaagagcaagctggacaagatgaacaaggacaacagcgagagcctgaaggtgctgaatgagcagctgcagagcaaggaggtggagctgctgcagctgaggacagaggtggagacccagcaggtgatgaggaacctgaacccccccagcagcaactgggaggtggagaagctgagctgtgacctgaagatccacggcctggagcaggagctggagctgatgaggaaggagtgcagcgacctgaagattgagctgcagaaggccaagcagacagacccctaccaggaggacaacctgaagagccgggacctgcagaagctgagcatcagccgggtgtctgtggcccagcccggggtgcagtggagaaatcatggaattgcctag

SEQ ID NO: 141938 - DNA, 648 bp, synthetic construct
  misc_feature 1..648: note = Description of Artificial Sequence: Synthetic coding sequence
  source 1..648: mol_type = other DNA
atggatgccctggtggaggatgacatctgcatcctgaaccacgagaaggcccacaagagggacacagtgacccctgtgtccatctacagcggagatgagagcgtggccagccactttgccctggtgacagcctatgaggacatcaagaagaggctgaaggacagcgagaaggagaacagcctgctgaagaagaggatccgcttcctggaggagaagctgattgccaggtttgaggaggagaccagctctgtgggccgggagcaggtgaacaaggcctaccacgcctaccgggaggtgtgcatcgaccgggacaacctgaagagcaagctggacaagatgaacaaggacaacagcgagagcctgaaggtgctgaatgagcagctgcagagcaaggaggtggagctgctgcagctgaggacagaggtggagacccagcaggtgatgaggaacctgaacccccccagcagcaactgggaggtggagaagctgagctgtgacctgaagatccacggcctggagcaggagctggagctgatgaggaaggagtgcagcgacctgaagattgagctgcagaaggccaagcagacagacccctaccaggaggacaacctgaagagccgggacctgcagaagctgagcatctcctag

SEQ ID NO: 141939 - DNA, 288 bp, synthetic construct
  misc_feature 1..288: note = Description of Artificial Sequence: Synthetic coding sequence
  source 1..288: mol_type = other DNA
atggatgccctggtggaggatgacatctgcatcctgaaccacgagaaggcccacaagagggacacagtgacccctgtgtccatctacagcggagatgagagcgtggccagccactttgccctggtgacagcctatgaggacatcaagaagaggctgaaggacagcgagaaggagaacagcctgctgaagaagaggatccgcttcctggaggagaagctgattgccaggtttgaggaggagaccagctctgtgggccgggagcaggtgaacaaggcctaccacgcctag

SEQ ID NO: 141940 - DNA, 732 bp, synthetic construct
  misc_feature 1..732: note = Description of Artificial Sequence: Synthetic coding sequence
  source 1..732: mol_type = other DNA
atggatgccctggtggaggatgacatctgcatcctgaaccacgagaaggcccacaagagggacacagtgacccctgtgtccatctacagcggagatgagagcgtggccagccactttgccctggtgacagcctatgaggacatcaagaagaggctgaaggacagcgagaaggagaacagcctgctgaagaagaggatccgcttcctggaggagaagctgattgccaggtttgaggaggagaccagctctgtgggccgggagcaggtgaacaaggcctaccacgcctaccgggaggtgtgcatcgaccgggacaacctgaagagcaagctggacaagatgaacaaggacaacagcgagagcctgaaggtgctgaatgagcagctgcagagcaaggaggtggagctgctgcagctgaggacagaggtggagacccagcaggtgatgaggaacctgaacccccccagcagcaactgggaggtggagaagctgagctgtgacctgaagatccacggcctggagcaggagctggagctgatgaggaaggagtgcagcgacctgaagattgagctgcagaaggccaagcagacagacccctaccaggaggacaacctgaagagccgggacctgcagaagctgagcatcagccggcagagcatctgcagcacagcctggagcgctgtggcccagagctgggacagcatgaactttgaggactgcagcctgtttgcctag

SEQ ID NO: 141941 - DNA, 732 bp, synthetic construct; identical to SEQ ID NO: 141940
  misc_feature 1..732: note = Description of Artificial Sequence: Synthetic coding sequence
  source 1..732: mol_type = other DNA

SEQ ID NO: 141942 - DNA, 1179 bp, synthetic construct
  misc_feature 1..1179: note = Description of Artificial Sequence: Synthetic coding sequence
  source 1..1179: mol_type = other DNA
atggatgccctggtggaggatgacatctgcatcctgaaccacgagaaggcccacaagagggacacagtgacccctgtgtccatctacagcggagatgagagcgtggccagccactttgccctggtgacagcctatgaggacatcaagaagaggctgaaggacagcgagaaggagaacagcctgctgaagaagaggatccgcttcctggaggagaagctgattgccaggtttgaggaggagaccagctctgtgggccgggagcaggtgaacaaggcctaccacgcctaccgggaggtgtgcatcgaccgggacaacctgaagagcaagctggacaagatgaacaaggacaacagcgagagcctgaaggtgctgaatgagcagctgcagagcaaggaggtggagctgctgcagctgaggacagaggtggagacccagcaggtgatgaggaacctgaacccccccagcagcaactgggaggtggagaagctgagctgtgacctgaagatccacggcctggagcaggagctggagctgatgaggaaggagtgcagcgacctgaagattgagctgcagaaggccaagcagacagacccctaccaggaggacaacctgaagagccgggacctgcagaagctgagcatcagcagtgacaacatgcagcacgcctactgggagctgaagcgggagatgagcaacctgcacctggtgacccaggtgcaggccgagctgctgaggaagctgaagaccagcacagccatcaagaaggcctgtgcccctgtgggctgcagcgaggacctgggccgggacagcaccaagctgcacctgatgaacttcaccgccacctacaccaggcacccccccctgctgcccaacgggaaggccctgtgccacaccaccagcagccccctgcctggagatgtgaaggtgctgtctgagaaggccatcctgcagagctggacagacaatgaaagaagcatccccaatgatggcacctgcttccaggagcacagcagctatggaagaaacagcctggaggacaacagctgggtgttccccagcccccccaagagcagcgagacagccttcggggagaccaagaccaagaccctgcccctgcccaacctgccccccctgcactacctggaccagcacaaccagaactgcctgtacaagaactag

SEQ ID NO: 141943 - DNA, 1269 bp, synthetic construct
  misc_feature 1..1269: note = Description of Artificial Sequence: Synthetic coding sequence
  source 1..1269: mol_type = other DNA
atggatgtgctgagccctggccagggcaacaacaccaccagccccccagccccctttgaaacaggaggcaacaccaccggcatcagtgatgtgacagtgtcctaccaggtgatcaccagcctgctgctgggcaccctcatcttctgtgctgtgctgggcaatgcctgtgtggtggccgccatcgccctggagaggagcctgcagaatgtggccaactacctgattggcagcctggccgtgacagacctgatggtgtctgtgctggtgctgcccatggccgccctgtaccaggtgctgaacaagtggaccctgggccaggtgacctgtgacctcttcatcgccctggatgtgctgtgctgcaccagcagcatcctgcacctgtgtgccatcgccctggaccgctactgggccatcacagaccccatcgactatgtgaacaagaggaccccaagaagagctgctgccctgatcagcctgacctggctgattggcttcctgatcagcatcccccccatgctgggctggaggaccccagaagatagaagtgaccctgatgcctgcaccatcagcaaggaccacggctacaccatctacagcacctttggagccttctacatccccctgctgctgatgctggtgctgtatggccgcatcttccgggccgcccgcttccgcatcaggaagacagtgaagaaggtggagaagacaggagctgacaccaggcatggagccagccctgccccccagcccaagaagtctgtgaatggagagagcggcagcaggaactggaggctgggcgtggagagcaaggccggcggggccctgtgtgccaacggggctgtgcggcagggagatgatggagctgccctggaggtgattgaggtgcaccgggtgggcaacagcaaggagcacctgcccctgcccagcgaggccggccccaccccctgtgccccagccagctttgagaggaagaatgaaagaaatgctgaggccaagaggaagatggccctggcccgggagaggaagacagtgaagaccctgggcatcatcatgggcaccttcatcctgtgctggctgcccttcttcatcgtggccctggtgctgcccttctgtgagagcagctgccacatgcccaccctgctgggcgccatcatcaactggctgggctacagcaacagcctgctgaaccctgtgatctatgcctacttcaacaaggacttccagaatgccttcaagaagatcatcaagtgcaagttctgccggcagtag

SEQ ID NO: 141944 - DNA, 129 bp, synthetic construct
  misc_feature 1..129: note = Description of Artificial Sequence: Synthetic coding sequence
  source 1..129: mol_type = other DNA
atggatgtgctgagccctggccagggcaacaacaccaccagccccccagccccctttgaaacaggaggcaacaccaccggcatcagtgatgtgacagtgtcctaccaggtgatcaccagcctgctgtag

SEQ ID NO: 141945 - DNA, 1173 bp, synthetic construct
  misc_feature 1..1173: note = Description of Artificial Sequence: Synthetic coding sequence
  source 1..1173: mol_type = other DNA
atggaggagcccggggcccagtgtgcccctcctcctcctgctggcagcgagacctgggtgccccaggccaacctgagcagcgcccccagccagaactgcagcgccaaggactacatctaccaggacagcatcagcctgccctggaaggtgctgctggtgatgctgctggccctgatcaccctggccaccaccctgagcaatgcctttgtgattgccaccgtgtaccgcaccaggaagctgcacaccccagccaactacctgattgccagcctggccgtgacagacctgctggtgtccatcctggtgatgcccatcagcaccatgtacacagtgacaggccgctggaccctgggccaggtggtgtgtgacttctggctgagcagtgacatcacctgctgcacagccagcatcctgcacctgtgtgtgattgccctggaccgctactgggccatcacagatgctgtggagtacagcgccaagaggacccccaagagagctgctgtgatgattgccctggtgtgggtgttcagcatcagcatcagcctgccccccttcttctggaggcaggccaaggccgaggaggaggtgtctgaatgtgtggtgaacacagaccacatcctgtacacagtgtacagcacagtgggcgccttctacttccccaccctgctgctgattgccctgtatggccgcatctacgtggaggcccggagccgcatcctgaagcagacccccaacagaacaggcaagaggctgacccgggcccagctgatcacagacagccctggcagcaccagctctgtgaccagcatcaacagccgggtgcctgatgtgcccagcgagagcggcagccctgtgtatgtgaaccaggtgaaggtgcgggtgtctgatgccctgctggagaagaagaagctgatggccgcccgggagaggaaggccaccaagaccctgggcatcatcctgggcgccttcatcgtgtgctggctgcccttcttcatcatcagcctggtgatgcccatctgcaaggatgcctgctggttccacctggccatctttgacttcttcacctggctgggctacctgaacagcctcatcaaccccatcatctacaccatgagcaatgaagacttcaagcaggccttccacaagctgatccgcttcaagtgcaccagctag

SEQ ID NO: 141946 - DNA, 1134 bp, synthetic construct
  misc_feature 1..1134: note = Description of Artificial Sequence: Synthetic coding sequence
  source 1..1134: mol_type = other DNA
atgagccccctgaaccagagcgctgagggcctgccccaggaggccagcaacagaagcctgaatgccacagagaccagcgaggcctgggaccccaggaccctgcaggccctgaagatcagcctggccgtggtgctgagcgtcatcaccctggccaccgtgctgagcaatgcctttgtgctgaccaccatcctgctgaccaggaagctgcacaccccagccaactacctgattggcagcctggccaccacagacctgctggtgtccatcctggtgatgcccatcagcatcgcctacaccatcacccacacctggaactttggccagatcctgtgtgacatctggctgagcagtgacatcacctgctgcacagccagcatcctgcacctgtgtgtgattgccctggaccgctactgggccatcacagatgccctggagtacagcaagagaagaacagctggccatgctgccaccatgattgccatcgtgtgggccatcagcatctgcatcagcatccccccactcttctggaggcaggccaaggcccaggaggagatgtctgactgcctggtgaacaccagccagatctcctacaccatctacagcacctgtggggccttctacatccccagcgtgctgctgatcatcctgtatggccgcatctacagagctgccaggaaccgcatcctgaacccccccagcctgtatggcaagcgcttcaccacagcccacctgatcaccggcagcgctggcagcagcctgtgcagcctgaacagcagcctgcacgagggccacagccacagcgctggcagccccctcttcttcaaccacgtgaagatcaagctggccgacagcgccctggagaggaagaggatctctgctgcccgggagaggaaggccaccaagatcctgggcatcatcctgggcgccttcatcatctgctggctgcccttctttgtggtgtccctggtgctgcccatctgccgggacagctgctggatccacccagccctgtttgacttcttcacctggctgggctacctgaacagcctcatcaaccccatcatctacacagtgttcaatgaggagttccggcaggccttccagaagatcgtgcccttcaggaaggccagctag

SEQ ID NO: 141947 - DNA, 1134 bp, synthetic construct; identical to SEQ ID NO: 141946
  misc_feature 1..1134: note = Description of Artificial Sequence: Synthetic coding sequence
  source 1..1134: mol_type = other DNA

SEQ ID NO: 141948 - DNA, 1098 bp, synthetic construct
  misc_feature 1..1098: note = Description of Artificial Sequence: Synthetic coding sequence
  source 1..1098: mol_type = other DNA
atgaacatcaccaactgcaccacagaggcctccatggccatccggcccaagaccatcacagagaagatgctgatctgcatgaccctggtggtgatcaccaccctgaccaccctgctgaacctggccgtcatcatggccatcggcaccaccaagaagctgcaccagcctgccaactacctgatctgcagcctggccgtgacagacctgctggtggccgtgctggtgatgcccctgagcatcatctacatcgtgatggaccgctggaagctgggctacttcctgtgtgaggtgtggctgtctgtggacatgacctgctgcacctgcagcatcctgcacctgtgtgtgattgccctggaccgctactgggccatcaccaatgccatcgagtatgccaggaagaggacagccaagagagctgccctgatgatcctgactgtgtggaccatcagcatcttcatctccatgccacccctcttctggaggagccaccggcggctgagccccccacccagccagtgcaccatccagcacgaccacgtgatctacaccatctacagcaccctgggcgccttctacatccccctgaccctcatcctgatcctgtactaccgcatctaccacgccgccaagagcctgtaccagaagaggggcagcagccgccacctgagcaacagaagcacagacagccagaacagctttgccagctgcaagctgacccagaccttctgtgtgtctgacttcagcaccagtgaccccaccacagaatttgagaagttccacgccagcatccgcatccccccatttgacaatgacctggaccaccctggagagcggcagcagatcagcagcacccgggagaggaaggccgcccgcatcctgggcctcatcctgggcgccttcatcctgtcctggctgcccttcttcatcaaggagctgattgtgggcctgagcatctacacagtgtcctctgaggtggccgacttcctgacctggctgggctacgtgaacagcctcatcaaccccctgctgtacaccagcttcaatgaagacttcaagctggccttcaagaagctgatccgctgccgggagcacacctag

SEQ ID NO: 141949 - DNA, 1098 bp, synthetic construct; identical to SEQ ID NO: 141948
  misc_feature 1..1098: note = Description of Artificial Sequence: Synthetic coding sequence
  source 1..1098: mol_type = other DNA

SEQ ID NO: 141950 - DNA, 1101 bp, synthetic construct
  misc_feature 1..1101: note = Description of Artificial Sequence: Synthetic coding sequence
  source 1..1101: mol_type = other DNA
atggacttcctgaacagcagtgaccagaacctgaccagcgaggagctgctgaacaggatgcccagcaagatcctggtgtccctgaccctgagcggcctggccctgatgaccaccaccatcaacagcctggtgattgctgccatcatcgtgaccaggaagctgcaccacccagccaactacctgatctgcagcctggccgtgacagacttcctggtggccgtgctggtgatgcccttcagcatcgtgtacatcgtgcgggagagctggatcatgggccaggtggtgtgtgacatctggctgtctgtggacatcacctgctgcacctgcagcatcctgcacctgagcgccatcgccctggaccgctaccgggccatcacagatgctgtggagtatgccaggaagaggacccccaagcacgccggcatcatgatcaccatcgtgtggatcatctctgtgttcatctccatgcctcctctcttctggaggcaccagggcaccagcagagatgatgagtgcatcatcaagcatgaccacatcgtgtccaccatctacagcacctttggagccttctacatccccctggccctgatcctgatcctgtactacaagatctacagagctgccaagaccctgtaccacaagaggcaggccagccgcatcgccaaggaggaggtgaatggccaggtgctgctggagagcggggagaagagcaccaagtctgtgtccaccagctatgtgctggagaagagcctgagtgaccccagcacagactttgacaagatccacagcacagtgcgcagcctgcggtctgagttcaagcatgagaagtcctggaggcggcagaagatcagcggcacccgggagaggaaggccgccaccaccctgggcctcatcctgggcgccttcgtcatctgctggctgcccttctttgtgaaggagctggtggtgaatgtgtgtgacaagtgcaagatcagcgaggagatgagcaacttcctggcctggctgggctacctgaacagcctcatcaaccccctcatctacaccatcttcaatgaagacttcaagaaggccttccagaagctggtgcgctgccgctgctag

SEQ ID NO: 141951 - DNA, 1416 bp, synthetic construct
  misc_feature 1..1416: note = Description of Artificial Sequence: Synthetic coding sequence
  source 1..1416: mol_type = other DNA
atggacatcctgtgtgaggagaacaccagcctgagcagcaccaccaacagcctgatgcagctgaatgatgacacccggctgtacagcaatgacttcaacagcggggaggccaacaccagtgatgccttcaactggacagtggacagcgagaacagaaccaacctgagctgtgagggctgcctgagccccagctgcctgagcctgctgcacctgcaggagaagaactggagcgccctgctgacagctgtggtgatcatcctgaccatcgccggcaacatcctggtgatcatggctgtgtccctggagaagaagctgcagaatgccaccaactacttcctgatgagcctggccatcgctgacatgctgctgggcttcctggtgatgcctgtgtccatgctgaccatcctgtatggctaccgctggcccctgcccagcaagctgtgtgctgtgtggatctacctggatgtgctcttcagcacagccagcatcatgcacctgtgtgccatcagcctggaccgctacgtggccatccagaaccccatccaccacagccgcttcaacagcaggaccaaggccttcctgaagatcatcgctgtgtggaccatctctgtgggcatctccatgcccatccctgtgtttggcctgcaggatgacagcaaggtgttcaaggagggcagctgcctgctggctgatgacaactttgtgctgattggcagctttgtgtccttcttcatccccctgaccatcatggtgatcacctacttcctgaccatcaagagcctgcagaaggaggccaccctgtgtgtgtctgacctgggcacccgggccaagctggccagcttctccttcctgccccagagcagcctgagcagcgagaagctgttccagaggagcatccaccgggagcccggcagctacacaggaagaaggaccatgcagagcatcagcaatgagcagaaggcctgcaaggtgctgggcatcgtgttcttcctgtttgtggtgatgtggtgccccttcttcatcaccaacatcatggccgtcatctgcaaggagagctgcaatgaagatgtgattggagccctgctgaatgtgtttgtgtggattggctacctgagcagcgctgtgaaccccctggtgtacaccctcttcaacaagacctacagaagtgccttcagccgctacatccagtgccagtacaaggagaacaagaagcccctgcagctgatcctggtgaacaccatcccagccctggcctacaagagcagccagctgcagatgggccagaagaagaacagcaagcaggatgccaagaccacagacaatgactgcagcatggtggccctgggcaagcagcacagcgaggaggccagcaaggacaacagtgatggagtgaatgagaaggtgtcctgtgtgtag

SEQ ID NO: 141952 - DNA, 1416 bp, synthetic construct; identical to SEQ ID NO: 141951
  misc_feature 1..1416: note = Description of Artificial Sequence: Synthetic coding sequence
  source 1..1416: mol_type = other DNA

SEQ ID NO: 141953 - DNA, 1164 bp, synthetic construct
  misc_feature 1..1164: note = Description of Artificial Sequence: Synthetic coding sequence
  source 1..1164: mol_type = other DNA
atgcagttcctgaagagcgccaagcagaagcccaactactaccacatcatgctggtggaggaccaggaggagggcaccctgcaccagttcaactactgtgagcgctgcagcgagagccagaacaacaagtgcatcagctgtgtggaccctgaggacaagtggtaccgctggcccctgcccagcaagctgtgtgctgtgtggatctacctggatgtgctcttcagcacagccagcatcatgcacctgtgtgccatcagcctggaccgctacgtggccatccagaaccccatccaccacagccgcttcaacagcaggaccaaggccttcctgaagatcatcgctgtgtggaccatctctgtgggcatctccatgcccatccctgtgtttggcctgcaggatgacagcaaggtgttcaaggagggcagctgcctgctggctgatgacaactttgtgctgattggcagctttgtgtccttcttcatccccctgaccatcatggtgatcacctacttcctgaccatcaagagcctgcagaaggaggccaccctgtgtgtgtctgacctgggcacccgggccaagctggccagcttctccttcctgccccagagcagcctgagcagcgagaagctgttccagaggagcatccaccgggagcccggcagctacacaggaagaaggaccatgcagagcatcagcaatgagcagaaggcctgcaaggtgctgggcatcgtgttcttcctgtttgtggtgatgtggtgccccttcttcatcaccaacatcatggccgtcatctgcaaggagagctgcaatgaagatgtgattggagccctgctgaatgtgtttgtgtggattggctacctgagcagcgctgtgaaccccctggtgtacaccctcttcaacaagacctacagaagtgccttcagccgctacatccagtgccagtacaaggagaacaagaagcccctgcagctgatcctggtgaacaccatcccagccctggcctacaagagcagccagctgcagatgggccagaagaagaacagcaagcaggatgccaagaccacagacaatgactgcagcatggtggccctgggcaagcagcacagcgaggaggccagcaaggacaacagtgatggagtgaatgagaaggtgtcctgtgtgtag

SEQ ID NO: 141954 - DNA, 1446 bp, synthetic construct
  misc_feature 1..1446: note = Description of Artificial Sequence: Synthetic coding sequence
  source 1..1446: mol_type = other DNA
atggccctgagctacagagtgtctgagctgcagagcaccatccctgagcacatcctgcagagcacctttgtgcacgtgatcagcagcaactggagcggcctgcagacagagagcatccctgaggagatgaagcagatcgtggaggagcagggcaacaagctgcactgggccgccctgctgatcctgatggtgatcatccccaccatcggcggcaacaccctggtgatcctggccgtgtccctggagaagaagctgcagtatgccaccaactacttcctgatgagcctggccgtggccgacctgctggtgggcctgtttgtgatgcccatcgccctgctgaccatcatgtttgaggccatgtggcccctgcccctggtgctgtgcccagcctggctgttcctggatgtgctcttcagcacagccagcatcatgcacctgtgtgccatctctgtggaccgctacatcgccatcaagaagcccatccaggccaaccagtacaacagccgggccacagccttcatcaagatcaccgtggtgtggctgatcagcatcggcatcgccatccctgtgcccatcaagggcattgaaacagatgtggacaaccccaacaacatcacctgtgtgctgaccaaggagagatttggagacttcatgctgtttggcagcctggccgccttcttcacccccctggccatcatgattgtgacctacttcctgaccatccacgccctgcagaagaaggcctacctggtgaagaacaagccaccccagaggctgacctggctgactgtgtccaccgtcttccagagagatgagaccccctgcagcagccctgagaaggtggccatgctggatggcagcaggaaggacaaggccctgcccaacagcggagatgagaccctgatgaggaggaccagcaccatcggcaagaagtctgtgcagaccatcagcaatgagcagagggccagcaaggtgctgggcatcgtgttcttcctgttcctgctgatgtggtgccccttcttcatcaccaacatcaccctggtgctgtgtgacagctgcaaccagaccaccctgcagatgctgctggagatctttgtgtggattggctacgtgtcctctggagtgaaccccctggtgtacaccctcttcaacaagaccttcagagatgccttcggccgctacatcacctgcaactaccgggccaccaagtctgtgaagaccctgaggaagaggagcagcaagatctacttcaggaaccccatggccgagaacagcaagttcttcaagaagcacggcatcagaaatggcatcaacccagccatgtaccagagccccatgaggctgcggagcagcaccatccagagcagcagcatcatcctgctggacaccctgctgctgacagaaaatgaaggagacaagacagaggagcaggtgtcctatgtgtag

SEQ ID NO: 141955 - DNA, 195 bp, synthetic construct
  misc_feature 1..195: note = Description of Artificial Sequence: Synthetic coding sequence
  source 1..195: mol_type = other DNA
atggtgatcatccccaccatcggcggcaacaccctggtgatcctggccgtgtccctggagaagaagctgcagtatgccaccaactacttcctgatgagcctggccgtggccgacctgctggtgggcctgtttgtgatgcccatcgccctgctgaccatcatgtttggaattgccatccctgtgcccatcaagtag

SEQ ID NO: 141956 - DNA, 1377 bp, synthetic construct
  misc_feature 1..1377: note = Description of Artificial Sequence: Synthetic coding sequence
  source 1..1377: mol_type = other DNA
atggtgaacctgagaaatgctgtgcacagcttcctggtgcacctgattggcctgctggtgtggcagtgtgacatctctgtgtcccctgtggccgccatcgtgacagacatcttcaacaccagtgatggcggccgcttcaagttcccagatggagtgcagaactggccagccctgagcatcgtcatcatcatcatcatgaccatcggcggcaacatcctggtgatcatggctgtgtccatggagaagaagctgcacaatgccaccaactacttcctgatgagcctggccatcgctgacatgctggtgggcctgctggtgatgcccctgagcctgctggccatcctgtatgactatgtgtggcccctgccccgctacctgtgccctgtgtggatcagcctggatgtgctcttcagcacagccagcatcatgcacctgtgtgccatcagcctggacagatatgtggccatccggaaccccatcgagcacagccgcttcaacagcaggaccaaggccatcatgaagatcgccatcgtgtgggccatcagcattggagtgtctgtgcccatccctgtgattggcctgagagatgaggagaaggtgtttgtgaacaacaccacctgtgtgctgaatgaccccaactttgtgctgattggcagctttgtggccttcttcatccccctgaccatcatggtgatcacctactgcctgaccatctacgtgctgcggcggcaggccctgatgctgctgcacggccacacagaggagcccccaggcctgagcctggacttcctgaagtgctgcaagaggaacacagctgaggaggagaacagcgccaaccccaaccaggaccagaatgcccggcggaggaagaagaaggagcggcggccccggggcaccatgcaggccatcaacaatgaaaggaaggccagcaaggtgctgggcatcgtgttctttgtgttcctgatcatgtggtgccccttcttcatcaccaacatcctgtctgtgctgtgtgagaagagctgcaaccagaagctgatggagaagctgctgaatgtgtttgtgtggattggctacgtgtgcagcggcatcaaccccctggtgtacaccctcttcaacaagatctaccgccgggccttcagcaactacctgcgctgcaactacaaggtggagaagaagccccctgtgcggcagatcccccgggtggccgccacagccctgagcggccgggagctgaatgtgaacatctaccgccacaccaatgagcccgtcatcgagaaggccagtgacaatgagcccggcatcgagatgcaggtggagaacctggagctgcctgtgaaccccagctctgtggtgtctgagcgcatcagctctgtgtag

SEQ ID NO: 141957 - DNA, 747 bp, synthetic construct
  misc_feature 1..747: note = Description of Artificial Sequence: Synthetic coding sequence
  source 1..747: mol_type = other DNA
atggtgaacctgagaaatgctgtgcacagcttcctggtgcacctgattggcctgctggtgtggcagtgtgacatctctgtgtcccctgtggccgccatcgtgacagacatcttcaacaccagtgatggcggccgcttcaagttcccagatggagtgcagaactggccagccctgagcatcgtcatcatcatcatcatgaccatcggcggcaacatcctggtgatcatggctgtgtccatggagaagaagctgcacaatgccaccaactacttcctgatgagcctggccatcgctgacatgctggtgggcctgctggtgatgcccctgagcctgctggccatcctgtatgactatgtgtggcccctgccccgctacctgtgccctgtgtggatcagcctggatgtgctcttcagcacagccagcatcatgcacctgtgtgccatcagcctggaccgctgcatcagcagctacccctgtgactggacagagggcagaagaaaaggagtgcgggagcagcatgatgtgcgggcccagaggcccaagttccgcagctactgggtgctgcggagcttcctgcacacagcagatgattatggagactatgtgctgcctgaccacctgcggagcgcccccaccagctttgatgtgacagcccggccccaccggggcacagcctggaccaagagcggcttccctgaggtgctgcaggaggagtatggccggggccgggagctgtgcaagccctag

SEQ ID NO: 141958 - DNA, 1377 bp, synthetic construct; identical to SEQ ID NO: 141956
  misc_feature 1..1377: note = Description of Artificial Sequence: Synthetic coding sequence
  source 1..1377: mol_type = other DNA

SEQ ID NO: 141959 - DNA, 840 bp, synthetic construct
  misc_feature 1..840: note = Description of Artificial Sequence: Synthetic coding sequence
  source 1..840: mol_type = other DNA
atggcctccatgagcatcgtgaaggccaccagcaacaccatcagccagtgtggctggagcgccagcgccaactggacccccagcatcagccccagcatggacagaggagagaggagccccagcgccctgagccccacccaggtggccatcagaagacgctgccggcccagcccctacgtggtgaacttcctggtgcccagcggcatcctgattgccattgatgccctgtccttctacctgcccctggagagcggcaactgtgcccccttcaagatgacagtgctgctgggctacagcgtcttcctgctgatgatgaatgacctgctgcctgccaccagcaccagcagccacgccagcctggtgcggccccaccccagccgggaccagaagaggggcgtgtactttgccctgtgcctgagcctgatggtgggcagcctgctggagaccatcttcatcacccacctgctgcacgtggccaccacccagcccctgcccctgccccgctggctgcacagcctgctgctgcactgcaccggccagggccgctgctgccccacagccccccagaagggcaacaagggccctggcctgacccccacccacctgcccggggtgaaggagcctgaggtgtctgctggccagatgcctggccctggagaggccgagctgaccggcggcagcgagtggacccgggcccagcgggagcacgaggcccagaagcagcacagcgtggagctgtgggtgcagttcagccacgccatggatgccctgctcttccggctgtacctgctcttcatggccagcagcatcatcaccgtcatctgcctgtggaacacctag

SEQ ID NO: 141960 - DNA, 1365 bp, synthetic construct
  misc_feature 1..1365: note = Description of Artificial Sequence: Synthetic coding sequence
  source 1..1365: mol_type = other DNA
atgcagaagcacagccctggccccccagccctggccctgctgagccagagcctgctgaccactggaaatggagacaccctcatcatcaactgccccggcttcggccagcaccgggtggaccctgctgccttccaggccgtgtttgacaggaaggccatcggccctgtgaccaactacagcgtggccacccacgtgaacatctccttcaccctgagcgccatctggaactgctacagccgcatccacaccttcaactgccaccacgcccggccctggcacaaccagtttgtgcagtggaacccagatgaatgtggcggcatcaagaagagcggcatggccacagagaacctgtggctgagtgatgtgttcatcgaggagagcgtggaccagaccccagctggcctgatggcctccatgagcatcgtgaaggccaccagcaacaccatcagccagtgtggctggagcgccagcgccaactggacccccagcatcagccccagcatggaccgggcccgggcctggaggaggatgagccgctccttccagatccaccacaggaccagcttccgcacccggcgggagtgggtgctgctgggcatccagaagaggaccatcaaggtgacagtggccaccaaccagtatgagcaggccatcttccacgtggccatcagaagacgctgccggcccagcccctacgtggtgaacttcctggtgcccagcggcatcctgattgccattgatgccctgtccttctacctgcccctggagagcggcaactgtgcccccttcaagatgacagtgctgctgggctacagcgtcttcctgctgatgatgaatgacctgctgcctgccaccagcaccagcagccacgccagcctggtggcccccctggccctgatgcagacccccctgcctgctggggtgtactttgccctgtgcctgagcctgatggtgggcagcctgctggagaccatcttcatcacccacctgctgcacgtggccaccacccagcccctgcccctgccccgctggctgcacagcctgctgctgcactgcaccggccagggccgctgctgccccacagccccccagaagggcaacaagggccctggcctgacccccacccacctgcccggggtgaaggagcctgaggtgtctgctggccagatgcctggccctggagaggccgagctgactggaggcagcgagtggacccgggcccagcgggagcacgaggcccagaagcagcacagcgtggagctgtgggtgcagttcagccacgccatggatgccctgctcttccggctgtacctgctcttcatggccagcagcatcatcaccgtcatctgcctgtggaacacctag

SEQ ID NO: 141961 - DNA, 1215 bp, synthetic construct
  misc_feature 1..1215: note = Description of Artificial Sequence: Synthetic coding sequence
  source 1..1215: mol_type = other DNA
atggagcggggctggttccacggcaagggcttcctgctgggcttcatcctgcacctgctgctgcaggacagccacctgcagctggtgaccagcttcctgtggctgaacatgtggaacccagatgaatgtggcggcatcaagaagagcggcatggccacagagaacctgtggctgagtgatgtgttcatcgaggagagcgtggaccagaccccagctggcctgatggcctccatgagcatcgtgaaggccaccagcaacaccatcagccagtgtggctggagcgccagcgccaactggacccccagcatcagccccagcatggacagaggagagaggagccccagcgccctgagccccacccaggtgacccgggcctggaggaggatgagccgctccttccagatccaccacaggaccagcttccgcacccggcgggagtgggtgctgctgggcatccagaagaggaccatcaaggtgacagtggccaccaaccagtatgagcaggccatcttccacgtggccatcagaagacgctgccggcccagcccctacgtggtgaacttcctggtgcccagcggcatcctgattgccattgatgccctgtccttctacctgcccctggagagcggcaactgtgcccccttcaagatgacagtgctgctgggctacagcgtcttcctgctgatgatgaatgacctgctgcctgccaccagcaccagcagccacgccagcctggtgcggccccaccccagccgggaccagaagaggggcgtgtactttgccctgtgcctgagcctgatggtgggcagcctgctggagaccatcttcatcacccacctgctgcacgtggccaccacccagcccctgcccctgccccgctggctgcacagcctgctgctgcactgcaccggccagggccgctgctgccccacagccccccagaagggcaacaagggccctggcctgacccccacccacctgcccggggtgaaggagcctgaggtgtctgctggccagatgcctggccctggagaggccgagctgactggaggcagcgagtggacccgggcccagcgggagcacgaggcccagaagcagcacagcgtggagctgtgggtgcagttcagccacgccatggatgccctgctcttccggctgtacctgctcttcatggccagcagcatcatcaccgtcatctgcctgtggaacacctag

SEQ ID NO: 141962 - DNA, 702 bp, synthetic construct
  misc_feature 1..702: note = Description of Artificial Sequence: Synthetic coding sequence
  source 1..702: mol_type = other DNA
atggtggccatcagaagacgctgccggcccagcccctacgtggtgaacttcctggtgcccagcggcatcctgattgccattgatgccctgtccttctacctgcccctggagagcggcaactgtgcccccttcaagatgacagtgctgctgggctacagcgtcttcctgctgatgatgaatgacctgctgcctgccaccagcaccagcagccacgccagcctggtgcggccccaccccagccgggaccagaagaggggcgtgtactttgccctgtgcctgagcctgatggtgggcagcctgctggagaccatcttcatcacccacctgctgcacgtggccaccacccagcccctgcccctgccccgctggctgcacagcctgctgctgcactgcaccggccagggccgctgctgccccacagccccccagaagggcaacaagggccctggcctgacccccacccacctgcccggggtgaaggagcctgaggtgtctgctggccagatgcctggccctggagaggccgagctgaccggcggcagcgagtggacccgggcccagcgggagcacgaggcccagaagcagcacagcgtggagctgtgggtgcagttcagccacgccatggatgccctgctcttccggctgtacctgctcttcatggccagcagcatcatcaccgtcatctgcctgtggaacacctag

SEQ ID NO: 141963 - DNA, 1344 bp, synthetic construct
  misc_feature 1..1344: note = Description of Artificial Sequence: Synthetic coding sequence
  source 1..1344: mol_type = other DNA
atggagggcggctggccagcccggcagagcgccctgctgtgcctgactgtgtccctgctgctgcagggcagaggagatgccttcaccatcaactgcagcggctttgaccagcacggcgtggaccctgctgtgttccaggccgtgtttgacaggaaggccttccggcccttcaccaactacagcatccccaccagggtgaacatctccttcaccctgagcgccatcctgggcgtggatgcccagctgcagctgctgaccagcttcctgtggatggacctggtgtgggacaaccccttcatcaactggaaccccaaggaatgtgtgggcatcaacaagctgactgtgctggccgagaacctgtggctgcctgacatcttcatcgtggagagcatggatgtggaccagacccccagcggcctgacagcctacatcagcagcgagggccgcatcaagtatgacaagcccatgagggtgaccagcatctgcaacctggacatcttctacttcccctttgaccagcagaactgcaccttcaccttcagcagcttcctgtacacagtggacagcatgctgctgggcatggacaaggaggtgtgggagatcacagacaccagcaggaaggtgatccagacccagggcgagtgggagctgctgggcatcaacaaggccacccccaagatgtccatgggcaacaacctgtatgaccagatcatgttctacgtggccatcagaagaagacccagcctgtacatcatcaacctgctggtgcccagcagcttcctggtggccattgatgccctgtccttctacctgcctgctgagagcgagaacagagcccccttcaagatcaccctgctgctgggctacaacgtgttcctgctgatgatgaatgacctgctgcctgccagcggcacccccctcatctctgtgtactttgccctgtgcctgagcctgatggtggtgtccctgctggagaccgtcttcatcacctacctgctgcacgtggccaccacccagcccccacccatgccccgctggctgcacagcctgctgctgcactgcaccagccctggccgctgctgccccacagccccccagaagggcaacaagggcctgggcctgaccctgacccacctgcccggccccaaggagcctggagagctggccggcaagaagctgggcccccgggagacagagccagatggcggcagcggctggaccaagacccagctgatggagctgtgggtgcagttcagccacgccatggacaccctgctcttccggctgtacctgctcttcatggccagcagcatcctgaccgtcatcgtgctgtggaacacctag

SEQ ID NO: 141964 - DNA, 1416 bp, synthetic construct
  misc_feature 1..1416: note = Description of Artificial Sequence: Synthetic coding sequence
  source 1..1416: mol_type = other DNA
atgctggccttcatcctgagccgggccacccccaggcctgccctgggccccctgagctaccgggagcaccgggtggccctgctgcacctgacccacagcatgagcaccaccggccggggcgtgaccttcaccatcaactgcagcggcttcggccagcacggggctgaccccacagccctgaacagcgtcttcaacaggaagcccttccggcctgtgaccaacatctctgtgcccacccaggtgaacatcagctttgccatgtctgccatcctggatgtgaatgagcagctgcacctgctgagcagcttcctgtggctggagatggtgtgggacaaccccttcatctcctggaacccagaagaatgtgagggcatcaccaagatgtccatggccgccaagaacctgtggctgcctgacatcttcatcatcgagctgatggatgtggacaagacccccaagggcctgacagcctacgtgtccaatgaaggccgcatccgctacaagaagcccatgaaggtggacagcatctgcaacctggacatcttctacttcccctttgaccagcagaactgcaccctgaccttcagcagcttcctgtacacagtggacagcatgctgctggacatggagaaggaggtgtgggagatcacagatgccagcaggaacatcctgcagacccatggagagtgggagctgctgggcctgagcaaggccacagccaagctgagcagaggaggcaacctgtatgaccagatcgtgttctacgtggccatcagaagaagacccagcctgtatgtgatcaacctgctggtgcccagcggcttcctggtggccattgatgccctgtccttctacctgcctgtgaagagcggcaacagagtgcccttcaagatcaccctgctgctgggctacaacgtgttcctgctgatgatgtctgacctgctgcccaccagcggcacccccctgattggagtgtactttgccctgtgcctgagcctgatggtgggcagcctgctggagaccatcttcatcacccacctgctgcacgtggccaccacccagcccccacccctgccccgctggctgcacagcctgctgctgcactgcaacagccctggccgctgctgccccacagccccccagaaggaaaataaaggacctggcctgacccccacccacctgcccggggtgaaggagcctgaggtgtctgctggccagatgcctggccctgctgaggccgagctgaccggcggcagcgagtggacccgggcccagcgggagcacgaggcccagaagcagcacagcgtggagctgtggctgcagttcagccacgccatggatgccatgctgttccggctgtacctgctcttcatggccagcagcatcatcaccgtcatctgcctgtggaacacctag

SEQ ID NO: 141965 - DNA, 1371 bp, synthetic construct
  misc_feature 1..1371: note = Description of Artificial Sequence: Synthetic coding sequence
  source 1..1371: mol_type = other DNA
atggagggctcctggttccacaggaagcgcttctccttctacctgctgctgggcttcctgctgcagggccggggcgtgaccttcaccatcaactgcagcggcttcggccagcacggggctgaccccacagccctgaacagcgtcttcaacaggaagcccttccggcctgtgaccaacatctctgtgcccacccaggtgaacatcagctttgccatgtctgccatcctggatgtgaatgagcagctgcacctgctgagcagcttcctgtggctggagatggtgtgggacaaccccttcatctcctggaaccctgaggagtgtgagggcatcaccaagatgtccatggccgccaagaacctgtggctgcctgacatcttcatcatcgagctgatggatgtggacaagacccccaagggcctgacagcctacgtgtccaatgaaggccgcatccgctacaagaagcccatgaaggtggacagcatctgcaacctggacatcttctacttcccctttgaccagcagaactgcaccctgaccttcagcagcttcctgtacacagtggacagcatgctgctggacatggagaaggaggtgtgggagatcacagatgccagcaggaacatcctgcagacccacggggagtgggagctgctgggcctgagcaaggccacagccaagctgagccggggcggcaacctgtatgaccagatcgtgttctacgtggccatcagaagaagacccagcctgtatgtgatcaacctgctggtgcccagcggcttcctggtggccattgatgccctgtccttctacctgcctgtgaagagcggcaacagagtgcccttcaagatcaccctgctgctgggctacaacgtgttcctgctgatgatgtctgacctgctgcccaccagcggcacccccctcatcggcgtgtactttgccctgtgcctgagcctgatggtgggcagcctgctggagaccatcttcatcacccacctgctgcacgtggccaccacccagcccccacccctgccccgctggctgcacagcctgctgctgcactgcaacagccctggccgctgctgccccacagccccccagaaggagaacaagggccctggcctgacccccacccacctgcccggggtgaaggagcctgaggtgtctgctggccagatgcctggccctgctgaggccgagctgactggaggcagcgagtggacccgggcccagcgggagcacgaggcccagaagcagcacagcgtggagctgtggctgcagttcagccacgccatggatgccatgctgttccggctgtacctgctcttcatggccagcagcatcatcaccgtcatctgcctgtggaacacctag

SEQ ID NO: 141966 - DNA, 1326 bp, synthetic construct
  misc_feature 1..1326: note = Description of Artificial Sequence: Synthetic coding sequence
  source 1..1326: mol_type = other DNA
atggagggctcctggttccacaggaagcgcttctccttctacctgctgctgggcttcctgctgcagggccggggcgtgaccttcaccatcaactgcagcggcttcggccagcacggggctgaccccacagccctgaacagcgtcttcaacaggaagcccttccggcctgtgaccaacatctctgtgcccacccaggtgaacatcagctttgccatgtctgccatcctggatgtggtgtgggacaaccccttcatctcctggaacccagaagaatgtgagggcatcaccaagatgtccatggccgccaagaacctgtggctgcctgacatcttcatcatcgagctgatggatgtggacaagacccccaagggcctgacagcctacgtgtccaatgaaggccgcatccgctacaagaagcccatgaaggtggacagcatctgcaacctggacatcttctacttcccctttgaccagcagaactgcaccctgaccttcagcagcttcctgtacacagtggacagcatgctgctggacatggagaaggaggtgtgggagatcacagatgccagcaggaacatcctgcagacccatggagagtgggagctgctgggcctgagcaaggccacagccaagctgagcagaggaggcaacctgtatgaccagatcgtgttctacgtggccatcagaagaagacccagcctgtatgtgatcaacctgctggtgcccagcggcttcctggtggccattgatgccctgtccttctacctgcctgtgaagagcggcaacagagtgcccttcaagatcaccctgctgctgggctacaacgtgttcctgctgatgatgtctgacctgctgcccaccagcggcacccccctgattggagtgtactttgccctgtgcctgagcctgatggtgggcagcctgctggagaccatcttcatcacccacctgctgcacgtggccaccacccagcccccacccctgccccgctggctgcacagcctgctgctgcactgcaacagccctggccgctgctgccccacagccccccagaaggaaaataaaggacctggcctgacccccacccacctgcccggggtgaaggagcctgaggtgtctgctggccagatgcctggccctgctgaggccgagctgaccggcggcagcgagtggacccgggcccagcgggagcacgaggcccagaagcagcacagcgtggagctgtggctgcagttcagccacgccatggatgccatgctgttccggctgtacctgctcttcatggccagcagcatcatcaccgtcatctgcctgtggaacacctag

SEQ ID NO: 141967 - DNA, 1371 bp, synthetic construct
  misc_feature 1..1371: note = Description of Artificial Sequence: Synthetic coding sequence
  source 1..1371: mol_type = other DNA
atgctggccttcatcctgagccgggccacccccaggcctgccctgggccccctgagctaccgggagcaccgggtggccctgctgcacctgacccacagcatgagcaccaccggccggggcgtgaccttcaccatcaactgcagcggcttcggccagcacggggctgaccccacagccctgaacagcgtcttcaacaggaagcccttccggcctgtgaccaacatctctgtgcccacccaggtgaacatcagctttgccatgtctgccatcctggatgtggtgtgggacaaccccttcatctcctggaaccctgaggagtgtgagggcatcaccaagatgtccatggccgccaagaacctgtggctgcctgacatcttcatcatcgagctgatggatgtggacaagacccccaagggcctgacagcctacgtgtccaatgaaggccgcatccgctacaagaagcccatgaaggtggacagcatctgcaacctggacatcttctacttcccctttgaccagcagaactgcaccctgaccttcagcagcttcctgtacacagtggacagcatgctgctggacatggagaaggaggtgtgggagatcacagatgccagcaggaacatcctgcagacccacggggagtgggagctgctgggcctgagcaaggccacagccaagctgagccggggcggcaacctgtatgaccagatcgtgttctacgtggccatcagaagaagacccagcctgtatgtgatcaacctgctggtgcccagcggcttcctggtggccattgatgccctgtccttctacctgcctgtgaagagcggcaacagagtgcccttcaagatcaccctgctgctgggctacaacgtgttcctgctgatgatgtctgacctgctgcccaccagcggcacccccctcatcggcgtgtactttgccctgtgcctgagcctgatggtgggcagcctgctggagaccatcttcatcacccacctgctgcacgtggccaccacccagcccccacccctgccccgctggctgcacagcctgctgctgcactgcaacagccctggccgctgctgccccacagccccccagaaggagaacaagggccctggcctgacccccacccacctgcccggggtgaaggagcctgaggtgtctgctggccagatgcctggccctgctgaggccgagctgactggaggcagcgagtggacccgggcccagcgggagcacgaggcccagaagcagcacagcgtggagctgtggctgcagttcagccacgccatggatgccatgctgttccggctgtacctgctcttcatggccagcagcatcatcaccgtcatctgcctgtggaacacctag

SEQ ID NO: 141968 - DNA, 1326 bp, synthetic construct
  misc_feature 1..1326: note = Description of Artificial Sequence: Synthetic coding sequence
  source 1..1326: mol_type = other DNA
atgctgagctctgtgatggcccccctgtgggcctgcatcctggtggccgccggcatcctggccacagacacccaccacccccaggacagcgccctgtaccacctgagcaagcagctgctgcagaagtaccacaaggaggtgcggcctgtgtacaactggaccaaggccaccaccgtgtacctggacctgtttgtgcacgccatcctggatgtggatgctgagaaccagatcctgaagacctctgtgtggtaccaggaggtgtggaatgatgagttcctgtcctggaacagctccatgtttgatgagatccgggagatcagcctgcccctgagcgccatctgggccccagacatcatcatcaatgaatttgtggacatcgagcgctacccagacctgccctacgtgtatgtgaacagcagcggcaccatcgagaactacaagcccatccaggtggtgtctgcctgcagcctggagacctacgccttcccctttgatgtgcagaactgcagcctgaccttcaagagcatcctgcacacagtggaggatgtggacctggccttcctgcggagccctgaggacatccagcacgacaagaaggccttcctgaatgattctgagtgggagctgctgtctgtgagcagcacctacagcatcctgcagagcagcgctgggggctttgcccagatccagttcaacgtggtgatgaggaggcaccccctggtgtatgtggtgtccctgctgatccccagcatcttcctgatgctggtggacctgggcagcttctacctgccccccaactgccgggccagaattgtgttcaagacctctgtgctggtgggctacaccgtcttccgggtgaacatgagcaaccaggtgcccaggtctgtgggcagcacccccctcatcggccacttcttcaccatctgcatggccttcctggtgctgagcctggccaagagcatcgtgctggtgaagttcctgcatgatgagcagagaggaggccaggagcagcccttcctgtgcctgcggggggacacagatgctgaccggccccgggtggagccccgggcccagagagctgtggtgacagagagcagcctgtatggagagcacctggcccagcccggcaccctgaaggaggtgtggagccagctgcagagcatcagcaactacctgcagacccaggaccagacagaccagcaggaggccgagtggctggtgctgctgagcagatttgaccggctgctcttccagagctacctgttcatgctgggcatctacaccatcaccctgtgcagcctgtgggccctgtggggcggcgtgtag

SEQ ID NO: 141969 - DNA, 1293 bp, synthetic construct
  misc_feature 1..1293: note = Description of Artificial Sequence: Synthetic coding sequence
  source 1..1293: mol_type = other DNA
atgattgtgtacttccctggcatcctggccacagacacccaccacccccaggacagcgccctgtaccacctgagcaagcagctgctgcagaagtaccacaaggaggtgcggcctgtgtacaactggaccaaggccaccaccgtgtacctggacctgtttgtgcacgccatcctggatgtggatgctgagaaccagatcctgaagacctctgtgtggtaccaggaggtgtggaatgatgagttcctgtcctggaacagctccatgtttgatgagatccgggagatcagcctgcccctgagcgccatctgggccccagacatcatcatcaatgaatttgtggacatcgagcgctacccagacctgccctacgtgtatgtgaacagcagcggcaccatcgagaactacaagcccatccaggtggtgtctgcctgcagcctggagacctacgccttcccctttgatgtgcagaactgcagcctgaccttcaagagcatcctgcacacagtggaggatgtggacctggccttcctgcggagccctgaggacatccagcacgacaagaaggccttcctgaatgacagcgagtgggagctgctgtctgtgagcagcacctacagcatcctgcagagcagcgctgggggctttgcccagatccagttcaacgtggtgatgagaagacaccccctggtgtatgtggtgtccctgctgatccccagcatcttcctgatgctggtggacctgggcagcttctacctgccccccaactgccgggcccgcatcgtgttcaagacctctgtgctggtgggctacacagtgttccgggtgaacatgagcaaccaggtgcccaggtctgtgggcagcacccccctgattggccacttcttcaccatctgcatggccttcctggtgctgagcctggccaagagcatcgtgctggtgaagttcctgcatgatgagcagaggggcggccaggagcagcccttcctgtgcctgcggggggacacagatgctgaccggccccgggtggagccccgggcccagagagctgtggtgacagagagcagcctgtatggagagcacctggcccagcccggcaccctgaaggaggtgtggagccagctgcagagcatcagcaactacctgcagacccaggaccagacagaccagcaggaggccgagtggctggtgctgctgagcagatttgaccggctgctcttccagagctacctgttcatgctgggcatctacaccatcaccctgtgcagcctgtgggccctgtggggcggcgtgtag

SEQ ID NO: 141970 - DNA, 528 bp, synthetic construct
  misc_feature 1..528: note = Description of Artificial Sequence: Synthetic coding sequence
  source 1..528: mol_type = other DNA
tgagctgagaaccagatcctgaagacctctgtgtggtaccaggaggtgtggaatgatgagttcctgtcctggaacagctccatgtttgatgagatccgggagatcagcctgcccctgagcgccatctgggccccagacatcatcatcaatgaatttgtggacatcgagcgctacccagacctgccctacgtgtatgtgaacagcagcggcaccatcgagaactacaagcccatccaggtggtgtctgcctgcagcctggagacctacgccttcccctttgatgtgcagaactgcagcctgaccttcaagagcatcctgcacacagtggaggatgtggacctggccttcctgcggagccctgaggacatccagcacgacaagaaggccttcctgaatgacagcgagtgggagctgctgtctgtgagcagcacctacagcatcctgcagagcagcgctgggggctttgcccagatccagttcaacggcaccagcagccccagcgcctggcccagctggttcagcgcctag

SEQ ID NO: 141971 - DNA, 1449 bp, synthetic construct
  misc_feature 1..1449: note = Description of Artificial Sequence: Synthetic coding sequence
  source 1..1449: mol_type = other DNA
atgctggccttcatcctgagccgggccacccccaggcctgccctgggccccctgagctaccgggagcaccgggtggccctgctgcacctgacccacagcatgagcaccaccggccggggcgtgaccttcaccatcaactgcagcggcttcggccagcacggggctgaccccacagccctgaacagcgtcttcaacaggaagcccttccggcctgtgaccaacatctctgtgcccacccaggtgaacatcagctttgccatgtctgccatcctggatgtggtgtgggacaaccccttcatctcctggaaccctgaggagtgtgagggcatcaccaagatgtccatggccgccaagaacctgtggctgcctgacatcttcatcatcgagctgtgtgtgtccagagctggccagcgggaggtgcccagccctggcagccaccgggaccacagcctgcccctgggccccctgatggatgtggacaagacccccaagggcctgacagcctacgtgtccaatgaaggccgcatccgctacaagaagcccatgaaggtggacagcatctgcaacctggacatcttctacttcccctttgaccagcagaactgcaccctgaccttcagcagcttcctgtacacagtggacagcatgctgctggacatggagaaggaggtgtgggagatcacagatgccagcaggaacatcctgcagacccacggggagtgggagctgctgggcctgagcaaggccacagccaagctgagccggggcggcaacctgtatgaccagatcgtgttctacgtggccatcagaagaagacccagcctgtatgtgatcaacctgctggtgcccagcggcttcctggtggccattgatgccctgtccttctacctgcctgtgaagagcggcaacagagtgcccttcaagatcaccctgctgctgggctacaacgtgttcctgctgatgatgtctgacctgctgcccaccagcggcacccccctcatcggcgtgtactttgccctgtgcctgagcctgatggtgggcagcctgctggagaccatcttcatcacccacctgctgcacgtggccaccacccagcccccacccctgccccgctggctgcacagcctgctgctgcactgcaacagccctggccgctgctgccccacagccccccagaaggagaacaagggccctggcctgacccccacccacctgcccggggtgaaggagcctgaggtgtctgctggccagatgcctggccctgctgaggccgagctgactggaggcagcgagtggacccgggcccagcgggagcacgaggcccagaagcagcacagcgtggagctgtggctgcagttcagccacgccatggatgccatgctgttccggctgtacctgctcttcatggccagcagcatcatcaccgtcatctgcctgtggaacacctag

SEQ ID NO: 141972 - DNA, 1137 bp, synthetic construct
  misc_feature 1..1137: note = Description of Artificial Sequence: Synthetic coding sequence
  source 1..1137: mol_type = other DNA
atggacaagctggatgccaacgtgagcagcgaggagggcttcggctctgtggagaaggtggtgctgctgaccttcctgagcaccgtcatcctgatggccatcctgggcaacctgctggtgatggtggccgtgtgctgggaccggcagctgaggaagatcaagaccaactacttcatcgtgtccctggcctttgctgacctgctggtgtctgtgctggtgatgccctttggagccatcgagctggtgcaggacatctggatctacggggaggtgttctgcctggtgaggaccagcctggatgtgctgctgaccacagccagcatcttccacctgtgctgcatcagcctggaccgctactatgccatctgctgccagcccctggtgtacagaaacaagatgacccccctgcgcatcgccctgatgctgggcggctgctgggtgatccccaccttcatctccttcctgcccatcatgcagggctggaacaacatcggcatcatcgacctgattgagaagaggaagttcaaccagaacagcaacagcacctactgtgtgttcatggtgaacaagccctatgccatcacctgcagcgtggtggccttctacatccccttcctgctgatggtgctggcctactaccgcatctacgtgacagccaaggagcacgcccaccagatccagatgctgcagagagctggggccagcagcgagagccggccccagagcgctgaccagcacagcacccacaggatgaggacagagaccaaggccgccaagaccctgtgcatcatcatgggctgcttctgcctgtgctgggcccccttctttgtgaccaacatcgtggaccccttcatcgactacacagtgcccggccaggtgtggacagccttcctgtggctgggctacatcaacagcggcctgaaccccttcctgtatgccttcctgaacaagagcttccggcgggccttcctgatcatcctgtgctgtgatgatgagcgctacagaagacccagcatcctgggccagacagtgccctgcagcaccaccaccatcaatggcagcacccacgtgctgagcggctgcagccctgtgagcagcttcctgctgctcttctgcaacagacctgtgcctgtgtag

SEQ ID NO: 141973 - DNA, 1164 bp, synthetic construct
  misc_feature 1..1164: note = Description of Artificial Sequence: Synthetic coding sequence
  source 1..1164: mol_type = other DNA
atggacaagctggatgccaacgtgagcagcgaggagggcttcggctctgtggagaaggtggtgctgctgaccttcctgagcaccgtcatcctgatggccatcctgggcaacctgctggtgatggtggccgtgtgctgggaccggcagctgaggaagatcaagaccaactacttcatcgtgtccctggcctttgctgacctgctggtgtctgtgctggtgatgccctttggagccatcgagctggtgcaggacatctggatctacggggaggtgttctgcctggtgaggaccagcctggatgtgctgctgaccacagccagcatcttccacctgtgctgcatcagcctggaccgctactatgccatctgctgccagcccctggtgtacagaaacaagatgacccccctgcgcatcgccctgatgctgggcggctgctgggtgatccccaccttcatctccttcctgcccatcatgcagggctggaacaacatcggcatcatcgacctgattgagaagaggaagttcaaccagaacagcaacagcacctactgtgtgttcatggtgaacaagccctatgccatcacctgcagcgtggtggccttctacatccccttcctgctgatggtgctggcctactaccgcatctacgtgacagccaaggagcacgcccaccagatccagatgctgcagagagctggggccagcagcgagagccggccccagagcgctgaccagcacagcacccacaggatgaggacagagaccaaggccgccaagaccctgtgcatcatcatgggctgcttctgcctgtgctgggcccccttctttgtgaccaacatcgtggaccccttcatcgactacacagtgcccggccaggtgtggacagccttcctgtggctgggctacatcaacagcggcctgaaccccttcctgtatgccttcctgaacaagagcttccggcgggccttcctgatcatcctgtgctgtgatgatgagcgctacagaagacccagcatcctgggccagacagtgccctgcagcaccaccaccatcaatggcagcacccacgtgctgcgctacacagtgctgcaccggggccaccaccaggagctggagaagctgcccatccacaatgaccctgagagcctggagagctgcttctag

SEQ ID NO: 141974 - DNA, 1287 bp, synthetic construct
  misc_feature 1..1287: note = Description of Artificial Sequence: Synthetic coding sequence
  source 1..1287: mol_type = other DNA
atggacaagctggatgccaacgtgagcagcgaggagggcttcggctctgtggagaaggtggtgctgctgaccttcctgagcaccgtcatcctgatggccatcctgggcaacctgctggtgatggtggccgtgtgctgggaccggcagctgaggaagatcaagaccaactacttcatcgtgtccctggcctttgctgacctgctggtgtctgtgctggtgatgccctttggagccatcgagctggtgcaggacatctggatctacggggaggtgttctgcctggtgaggaccagcctggatgtgctgctgaccacagccagcatcttccacctgtgctgcatcagcctggaccgctactatgccatctgctgccagcccctggtgtacagaaacaagatgacccccctgcgcatcgccctgatgctgggcggctgctgggtgatccccaccttcatctccttcctgcccatcatgcagggctggaacaacatcggcatcatcgacctgattgagaagaggaagttcaaccagaacagcaacagcacctactgtgtgttcatggtgaacaagccctatgccatcacctgcagcgtggtggccttctacatccccttcctgctgatggtgctggcctactaccgcatctacgtgacagccaaggagcacgcccaccagatccagatgctgcagagagctggggccagcagcgagagccggccccagagcgctgaccagcacagcacccacaggatgaggacagagaccaaggccgccaagaccctgtgcatcatcatgggctgcttctgcctgtgctgggcccccttctttgtgaccaacatcgtggaccccttcatcgactacacagtgcccggccaggtgtggacagccttcctgtggctgggctacatcaacagcggcctgaaccccttcctgtatgccttcctgaacaagagcttccggcgggccttcctgatcatcctgtgctgtgatgatgagcgctacagaagacccagcatcctgggccagacagtgccctgcagcaccaccaccatcaatggcagcacccacgtgctgaggacagacttcctgtttgaccgggacatcctggcccgctactggaccaagccagcccgggccggccccttcagcggcaccctgagcatccgctgcctgacagccaggaagcctgtgctgggagatgctgtggagtgtggcggccagtgggagagccagtgccaccccccagccaccagccccctggtggccgcccagcccagcgacacctag

SEQ ID NO: 141975 - DNA, 1209 bp, synthetic construct
  misc_feature 1..1209: note = Description of Artificial Sequence: Synthetic coding sequence
  source 1..1209: mol_type = other DNA
atggacaagctggatgccaacgtgagcagcgaggagggcttcggctctgtggagaaggtggtgctgctgaccttcctgagcaccgtcatcctgatggccatcctgggcaacctgctggtgatggtggccgtgtgctgggaccggcagctgaggaagatcaagaccaactacttcatcgtgtccctggcctttgctgacctgctggtgtctgtgctggtgatgccctttggagccatcgagctggtgcaggacatctggatctacggggaggtgttctgcctggtgaggaccagcctggatgtgctgctgaccacagccagcatcttccacctgtgctgcatcagcctggaccgctactatgccatctgctgccagcccctggtgtacagaaacaagatgacccccctgcgcatcgccctgatgctgggcggctgctgggtgatccccaccttcatctccttcctgcccatcatgcagggctggaacaacatcggcatcatcgacctggagaggagcctgaaccagggcctgggccaggacttccacgccatcgagaagaggaagttcaaccagaacagcaacagcacctactgtgtgttcatggtgaacaagccctatgccatcacctgcagcgtggtggccttctacatccccttcctgctgatggtgctggcctactaccgcatctacgtgacagccaaggagcacgcccaccagatccagatgctgcagagagctggggccagcagcgagagccggccccagagcgctgaccagcacagcacccacaggatgaggacagagaccaaggccgccaagaccctgtgcatcatcatgggctgcttctgcctgtgctgggcccccttctttgtgaccaacatcgtggaccccttcatcgactacacagtgcccggccaggtgtggacagccttcctgtggctgggctacatcaacagcggcctgaaccccttcctgtatgccttcctgaacaagagcttccggcgggccttcctgatcatcctgtgctgtgatgatgagcgctacagaagacccagcatcctgggccagacagtgccctgcagcaccaccaccatcaatggcagcacccacgtgctgagagatgctgtggagtgtggcggccagtgggagagccagtgccaccccccagccaccagccccctggtggccgcccagcccagcgacacctag

SEQ ID NO: 141976 - DNA, 1167 bp, synthetic construct
  misc_feature 1..1167: note = Description of Artificial Sequence: Synthetic coding sequence
  source 1..1167: mol_type = other DNA
atggacaagctggatgccaacgtgagcagcgaggagggcttcggctctgtggagaaggtggtgctgctgaccttcctgagcaccgtcatcctgatggccatcctgggcaacctgctggtgatggtggccgtgtgctgggaccggcagctgaggaagatcaagaccaactacttcatcgtgtccctggcctttgctgacctgctggtgtctgtgctggtgatgccctttggagccatcgagctggtgcaggacatctggatctacggggaggtgttctgcctggtgaggaccagcctggatgtgctgctgaccacagccagcatcttccacctgtgctgcatcagcctggaccgctactatgccatctgctgccagcccctggtgtacagaaacaagatgacccccctgcgcatcgccctgatgctgggcggctgctgggtgatccccaccttcatctccttcctgcccatcatgcagggctggaacaacatcggcatcatcgacctgattgagaagaggaagttcaaccagaacagcaacagcacctactgtgtgttcatggtgaacaagccctatgccatcacctgcagcgtggtggccttctacatccccttcctgctgatggtgctggcctactaccgcatctacgtgacagccaaggagcacgcccaccagatccagatgctgcagagagctggggccagcagcgagagccggccccagagcgctgaccagcacagcacccacaggatgaggacagagaccaaggccgccaagaccctgtgcatcatcatgggctgcttctgcctgtgctgggcccccttctttgtgaccaacatcgtggaccccttcatcgactacacagtgcccggccaggtgtggacagccttcctgtggctgggctacatcaacagcggcctgaaccccttcctgtatgccttcctgaacaagagcttccggcgggccttcctgatcatcctgtgctgtgatgatgagcgctacagaagacccagcatcctgggccagacagtgccctgcagcaccaccaccatcaatggcagcacccacgtgctgagagatgctgtggagtgtggcggccagtgggagagccagtgccaccccccagccaccagccccctggtggccgcccagcccagcgacacctag

SEQ ID NO: 141977 - DNA, 1083 bp, synthetic construct
  misc_feature 1..1083: note = Description of Artificial Sequence: Synthetic coding sequence
  source 1..1083: mol_type = other DNA
atggacaagctggatgccaacgtgagcagcgaggagggcttcggctctgtggagaaggtggtgctgctgaccttcctgagcaccgtcatcctgatggccatcctgggcaacctgctggtgatggtggccgtgtgctgggaccggcagctgaggaagatcaagaccaactacttcatcgtgtccctggcctttgctgacctgctggtgtctgtgctggtgatgccctttggagccatcgagctggtgcaggacatctggatctacggggaggtgttctgcctggtgaggaccagcctggatgtgctgctgaccacagccagcatcttccacctgtgctgcatcagcctggaccgctactatgccatctgctgccagcccctggtgtacagaaacaagatgacccccctgcgcatcgccctgatgctgggcggctgctgggtgatccccaccttcatctccttcctgcccatcatgcagggctggaacaacatcggcatcatcgacctgattgagaagaggaagttcaaccagaacagcaacagcacctactgtgtgttcatggtgaacaagccctatgccatcacctgcagcgtggtggccttctacatccccttcctgctgatggtgctggcctactaccgcatctacgtgacagccaaggagcacgcccaccagatccagatgctgcagagagctggggccagcagcgagagccggccccagagcgctgaccagcacagcacccacaggatgaggacagagaccaaggccgccaagaccctgtgcatcatcatgggctgcttctgcctgtgctgggcccccttctttgtgaccaacatcgtggaccccttcatcgactacacagtgcccggccaggtgtggacagccttcctgtggctgggctacatcaacagcggcctgaaccccttcctgtatgccttcctgaacaagagcttccggcgggccttcctgatcatcctgtgctgtgatgatgagcgctacagaagacccagcatcctgggccagacagtgccctgcagcaccaccaccatcaatggcagcacccacgtgctgcgcttctag

SEQ ID NO: 141978 - DNA, 1236 bp, synthetic construct
  misc_feature 1..1236: note = Description of Artificial Sequence: Synthetic coding sequence
  source 1..1236: mol_type = other DNA
atggacaagctggatgccaacgtgagcagcgaggagggcttcggctctgtggagaaggtggtgctgctgaccttcctgagcaccgtcatcctgatggccatcctgggcaacctgctggtgatggtggccgtgtgctgggaccggcagctgaggaagatcaagaccaactacttcatcgtgtccctggcctttgctgacctgctggtgtctgtgctggtgatgccctttggagccatcgagctggtgcaggacatctggatctacggggaggtgttctgcctggtgaggaccagcctggatgtgctgctgaccacagccagcatcttccacctgtgctgcatcagcctggaccgctactatgccatctgctgccagcccctggtgtacagaaacaagatgacccccctgcgcatcgccctgatgctgggcggctgctgggtgatccccaccttcatctccttcctgcccatcatgcagggctggaacaacatcggcatcatcgacctgattgagaagaggaagttcaaccagaacagcaacagcacctactgtgtgttcatggtgaacaagccctatgccatcacctgcagcgtggtggccttctacatccccttcctgctgatggtgctggcctactaccgcatctacgtgacagccaaggagcacgcccaccagatccagatgctgcagagagctggggccagcagcgagagccggccccagagcgctgaccagcacagcacccacaggatgaggacagagaccaaggccgccaagaccctgtgcatcatcatgggctgcttctgcctgtgctgggcccccttctttgtgaccaacatcgtggaccccttcatcgactacacagtgcccggccaggtgtggacagccttcctgtggctgggctacatcaacagcggcctgaaccccttcctgtatgccttcctgaacaagagcttccggcgggccttcctgatcatcctgtgctgtgatgatgagcgctacagaagacccagcatcctgggccagacagtgccctgcagcaccaccaccatcaatggcagcacccacgtgctgagcagcggcacagaaacagacaggaagaagctgtggaacaaggaggagaagattgaccagaccatccagatgcccaagaggaagaggaagaagaaggccagcctgtcctatgaggacctgatcctgctgggcaggaagagctgcttccgggagggcaagtag

SEQ ID NO: 141979 - DNA, 1164 bp, synthetic construct; identical to SEQ ID NO: 141973
  misc_feature 1..1164: note = Description of Artificial Sequence: Synthetic coding sequence
  source 1..1164: mol_type = other DNA

SEQ ID NO: 141980 - DNA, 1137 bp, synthetic construct; identical to SEQ ID NO: 141972
  misc_feature 1..1137: note = Description of Artificial Sequence: Synthetic coding sequence
  source 1..1137: mol_type = other DNA

SEQ ID NO: 141981 - DNA, 1137 bp, synthetic construct; identical to SEQ ID NO: 141972
  misc_feature 1..1137: note = Description of Artificial Sequence: Synthetic coding sequence
  source 1..1137: mol_type = other DNA

SEQ ID NO: 141982 - DNA, 1074 bp, synthetic construct
  misc_feature 1..1074: note = Description of Artificial Sequence: Synthetic coding sequence
  source 1..1074: mol_type = other DNA
atggacctgcctgtgaacctgaccagcttcagcctgagcacccccagccccctggagaccaaccacagcctgggcaaggatgacctgcggcccagcagccccctgctgtctgtgtttggagtgctgatcctgaccctgctgggcttcctggtggccgccacctttgcctggaacctgctggtgctggccaccatcctgcgggtgaggaccttccaccgggtgccccacaacctggtggcctccatggctgtgtctgatgtgctggtggccgccctggtgatgcccctgagcctggtgcatgagctgtctggaagacgctggcagctgggccgccgcctgtgccagctgtggatcgcctgtgatgtgctgtgctgcacagccagcatctggaatgtgacagccatcgccctggaccgctactggagcatcaccaggcacatggagtacaccctgcggaccaggaaatgtgtgtccaatgtgatgattgccctgacctgggccctgtctgctgtgatcagcctggcccccctgctgtttggctggggcgagacctacagcgagggcagcgaggagtgccaggtgtcccgggagcccagctatgctgtgttcagcacagtgggcgccttctacctgcccctgtgtgtggtgctgtttgtgtactggaagatctacaaggccgccaagttccgggtgggcagcaggaagaccaacagcgtgagccccatcagcgaggccgtggaggtgaaggacagcgccaagcagccccagatggtgttcaccgtgagacatgccaccgtgaccttccagcctgagggggacacctggagggagcagaaggagcagagagctgccctgatggtgggcatcctgattggagtgtttgtgctgtgctggatccccttcttcctgacagagctgatcagccccctgtgcagctgtgacatcccagccatctggaagagcatcttcctgtggctgggctacagcaacagcttcttcaaccccctcatctacacagccttcaacaagaactacaacagcgccttcaagaacttcttcagccggcagcactag

SEQ ID NO: 141983 - DNA, 1323 bp, synthetic construct
  misc_feature 1..1323: note = Description of Artificial Sequence: Synthetic coding sequence
  source 1..1323: mol_type = other DNA
atggtgcctgagcccggccccacagccaacagcaccccagcctggggcgccggccccccatctgcccctgggggcagcggctgggtggccgccgccctgtgtgtggtgattgccctgacagctgctgccaacagcctgctgattgccctgatctgcacccagcctgccctgaggaacaccagcaacttcttcctggtgtccctcttcaccagtgacctgatggtgggcctggtggtgatgcccccagccatgctgaatgccctgtatggccgctgggtgctggcccggggcctgtgcctgctgtggacagcctttgatgtgatgtgctgcagcgccagcatcctgaacctgtgcctgatcagcctggaccgctacctgctgatcctgagccccctgcgctacaagctgaggatgacccccctgcgggccctggccctggtgctgggcgcctggagcctggccgccctggccagcttcctgcccctgctgctgggctggcatgagctgggccacgcccggccccctgtgcccggccagtgccgcctgctggccagcctgccctttgtgctggtggccagcggcctgaccttcttcctgcccagcggggccatctgcttcacctactgccgcatcctgctggccgccaggaagcaggccgtgcaggtggccagcctgaccaccggcatggccagccaggccagcgagaccctgcaggtgcccaggacccccaggcctggggtggagagcgctgacagccggcggctggccaccaagcacagcaggaaggccctgaaggccagcctgaccctgggcatcctgctgggcatgttctttgtgacctggctgcccttctttgtggccaacatcgtgcaggccgtgtgtgactgcatcagccctggcctgtttgatgtgctgacctggctgggctactgcaacagcaccatgaaccccatcatctaccccctcttcatgagggacttcaagagggccctgggccgcttcctgccctgcccccgctgcccccgggagcggcaggccagcctggccagccccagcctgcggaccagccacagcggcccccggcccggcctgagcctgcagcaggtgctgcccctgcccctgcccccagacagcgacagcgacagtgatgctggcagcggcggcagcagcggcctgcggctgacagcccagctgctgctgcctggagaggccacccaggacccccccctgcccaccagggctgctgctgctgtgaacttcttcaacattgatcctgctgagcctgagctgcggccccaccccctgggcatccccaccaactag

SEQ ID NO: 141984 - DNA, 1338 bp, synthetic construct
  misc_feature 1..1338: note = Description of Artificial Sequence: Synthetic coding sequence
  source 1..1338: mol_type = other DNA
atgatggatgtgaacagcagcggccgcccagacctgtatggccacctgcggagcttcctgctgcctgaggtgggccggggcctgcctgacctgagcccagatggcggcgctgaccctgtggccggctcctgggccccccacctgctgtctgaggtgacagccagccctgcccccacctgggatgcccccccagacaatgccagcggctgtggggagcagatcaactacggccgggtggagaaggtggtgattggcagcatcctgaccctcatcaccctgctgaccatcgccggcaactgcctggtggtgatctctgtgtgctttgtgaagaagctgcggcagcccagcaactacctgattgtgtccctggccctggccgacctgtctgtggccgtggccgtgatgccctttgtgtctgtgacagacctgattggaggcaagtggatcttcggccacttcttctgcaatgtgttcatcgccatggatgtgatgtgctgcacagccagcatcatgaccctgtgtgtgatcagcattgaccgctacctgggcatcacccggcccctgacctaccctgtgcggcagaatggcaagtgcatggccaagatgatcctgtctgtgtggctgctgagcgccagcatcaccctgccccccctgtttggctgggcccagaatgtgaatgatgacaaggtgtgcctgatcagccaggactttggctacaccatctacagcacagctgtggccttctacatccccatgtctgtgatgctgttcatgtactaccagatctacaaggccgccaggaagtctgctgccaagcacaagtttcctggcttcccccgggtggagccagattctgtgattgccctgaatggcatcgtgaagctgcagaaggaggtggaggagtgtgccaacctgagccggctgctgaagcatgagaggaagaacatcagcatcttcaagcgggagcagaaggccgccaccaccctgggcatcatcgtgggcgccttcaccgtgtgctggctgcccttcttcctgctgagcacagcccggcccttcatctgtggcaccagctgcagctgcatccccctgtgggtggagaggaccttcctgtggctgggctacgccaacagcctcatcaaccccttcatctatgccttcttcaacagagacctgcggaccacctaccgcagcctgctgcagtgccagtacagaaacatcaacaggaagctgtctgctgctggcatgcatgaggccctgaagctggccgagaggcctgagaggcctgagtttgtgctgcagaatgctgactactgcaggaagaagggccatgacagctag

SEQ ID NO: 141985 - DNA, 1440 bp, synthetic construct
  misc_feature 1..1440: note = Description of Artificial Sequence: Synthetic coding sequence
  source 1..1440: mol_type = other DNA
atgatggatgtgaacagcagcggccgcccagacctgtatggccacctgcggagcttcctgctgcctgaggtgggccggggcctgcctgacctgagcccagatggcggcgctgaccctgtggccggctcctgggccccccacctgctgtctgaggtgacagccagccctgcccccacctgggatgcccccccagacaatgccagcggctgtggggagcagatcaactacggccgggtggagaaggtggtgattggcagcatcctgaccctcatcaccctgctgaccatcgccggcaactgcctggtggtgatctctgtgtgctttgtgaagaagctgcggcagcccagcaactacctgattgtgtccctggccctggccgacctgtctgtggccgtggccgtgatgccctttgtgtctgtgacagacctgattggaggcaagtggatcttcggccacttcttctgcaatgtgttcatcgccatggatgtgatgtgctgcacagccagcatcatgaccctgtgtgtgatcagcattgaccgctacctgggcatcacccggcccctgacctaccctgtgcggcagaatggcaagtgcatggccaagatgatcctgtctgtgtggctgctgagcgccagcatcaccctgccccccctgtttggctgggcccagaatgtgaatgatgacaaggtgtgcctgatcagccaggactttggctacaccatctacagcacagctgtggccttctacatccccatgtctgtgatgctgttcatgtactaccagatctacaaggccgccaggaagtctgctgccaagcacaagtttcctggcttcccccgggtggagccagattctgtgattgccctgaatggcatcgtgaagctgcagaaggaggtggaggagtgtgccaacctgagccggctgctgaagcatgagaggaagaacatcagcatcttcaagcgggagcagaaggccgccaccaccctgggcatcatcgtgggcgccttcaccgtgtgctggctgcccttcttcctgctgagcacagcccggcccttcatctgtggcaccagctgcagctgcatccccctgtgggtggagaggaccttcctgtggctgggctacgccaacagcctcatcaaccccttcatctatgccttcttcaacagagacctgcggaccacctaccgcagcctgctgcagtgccagtacagaaacatcaacaggaagctgtctgctgctggcatgcatgaggccctgaagctggccgagaggcctgagaggcctgagtttgtgctgcgggcctgcaccaggagagtgctgctgcggcctgagaagaggcctcctgtgtctgtgtgggtgctgcagagcccagaccaccacaactggctggccgacaagatgctgaccaccgtggagaagaaggtgatgattcatgactag

SEQ ID NO: 141986 - DNA, 1299 bp, synthetic construct
  misc_feature 1..1299: note = Description of Artificial Sequence: Synthetic coding sequence
  source 1..1299: mol_type = other DNA
atgatggatgtgaacagcagcggccgcccagacctgtatggccacctgcggagcttcctgctgcctgaggtgggccggggcctgcctgacctgagcccagatggcggcgctgaccctgtggccggctcctgggccccccacctgctgtctgaggtgacagccagccctgcccccacctgggatgcccccccagacaatgccagcggctgtggggagcagatcaactacggccgggtggagaaggtggtgattggcagcatcctgaccctcatcaccctgctgaccatcgccggcaactgcctggtggtgatctctgtgtgctttgtgaagaagctgcggcagcccagcaactacctgattgtgtccctggccctggccgacctgtctgtggccgtggccgtgatgccctttgtgtctgtgacagacctgattggaggcaagtggatcttcggccacttcttctgcaatgtgttcatcgccatggatgtgatgtgctgcacagccagcatcatgaccctgtgtgtgatcagcattgaccgctacctgggcatcacccggcccctgacctaccctgtgcggcagaatggcaagtgcatggccaagatgatcctgtctgtgtggctgctgagcgccagcatcaccctgccccccctgtttggctgggcccagaatgtgaatgatgacaaggtgtgcctgatcagccaggactttggctacaccatctacagcacagctgtggccttctacatccccatgtctgtgatgctgttcatgtactaccagatctacaaggccgccaggaagtctgctgccaagcacaagtttcctggcttcccccgggtggagccagattctgtgattgccctgaatggcatcgtgaagctgcagaaggaggtggaggagtgtgccaacctgagccggctgctgaagcatgagaggaagaacatcagcatcttcaagcgggagcagaaggccgccaccaccctgggcatcatcgtgggcgccttcaccgtgtgctggctgcccttcttcctgctgagcacagcccggcccttcatctgtggcaccagctgcagctgcatccccctgtgggtggagaggaccttcctgtggctgggctacgccaacagcctcatcaaccccttcatctatgccttcttcaacagagacctgcggaccacctaccgcagcctgctgcagtgccagtacagaaacatcaacaggaagctgtctgctgctggcatgcatgaggccctgaagctggccgagaggcctgagaggcctgagtttgtgctgtag

SEQ ID NO: 141987 - DNA, 1440 bp, synthetic construct
  misc_feature 1..1440: note = Description of Artificial Sequence: Synthetic coding sequence
  source 1..1440: mol_type = other DNA
atgatggatgtgaacagcagcggccgcccagacctgtatggccacctgcggagcttcctgctgcctgaggtgggccggggcctgcctgacctgagcccagatggcggcgctgaccctgtggccggctcctgggccccccacctgctgtctgaggtgacagccagccctgcccccacctgggatgcccccccagacaatgccagcggctgtggggagcagatcaactacggccgggtggagaaggtggtgattggcagcatcctgaccctcatcaccctgctgaccatcgccggcaactgcctggtggtgatctctgtgtgctttgtgaagaagctgcggcagcccagcaactacctgattgtgtccctggccctggccgacctgtctgtggccgtggccgtgatgccctttgtgtctgtgacagacctgattggaggcaagtggatcttcggccacttcttctgcaatgtgttcatcgccatggatgtgatgtgctgcacagccagcatcatgaccctgtgtgtgatcagcattgaccgctacctgggcatcacccggcccctgacctaccctgtgcggcagaatggcaagtgcatggccaagatgatcctgtctgtgtggctgctgagcgccagcatcaccctgccccccctgtttggctgggcccagaatgtgaatgatgacaaggtgtgcctgatcagccaggactttggctacaccatctacagcacagctgtggccttctacatccccatgtctgtgatgctgttcatgtactaccagatctacaaggccgccaggaagtctgctgccaagcacaagtttcctggcttcccccgggtggagccagattctgtgattgccctgaatggcatcgtgaagctgcagaaggaggtggaggagtgtgccaacctgagccggctgctgaagcatgagaggaagaacatcagcatcttcaagcgggagcagaaggccgccaccaccctgggcatcatcgtgggcgccttcaccgtgtgctggctgcccttcttcctgctgagcacagcccggcccttcatctgtggcaccagctgcagctgcatccccctgtgggtggagaggaccttcctgtggctgggctacgccaacagcctcatcaaccccttcatctatgccttcttcaacagagacctgcggaccacctaccgcagcctgctgcagtgccagtacagaaacatcaacaggaagctgtctgctgctggcatgcatgaggccctgaagctggccgagaggcctgagaggcctgagtttgtgctgatcaccaggaccagcggcgtgcaccaggccctggagaacttcccctggggcaatgaggtgaaccgctggaggaagagctgtgagtacttctgcacagacaagatgctgaccaccgtggagaagaaggtgatgattcatgactag

SEQ ID NO: 141988 - DNA, 2460 bp, synthetic construct
  misc_feature 1..2460: note = Description of Artificial Sequence: Synthetic coding sequence
  source 1..2460: mol_type = other DNA
ggcatgctggatggccccagcgccatgacccgcttctgcaacctgattgccagcgagccagacatcgccaaggtgcccctgtgcatcgacagcagcaactttgctgtgattgaagctggcctgaagtgctgccagggcaaatgtattgtgaacagcatcagcctgaaggagggggaggccacagaaacagacaccaagatccgggtgtgcacccgggcctaccacctgctggtgaagaagctgggcttcaaccccaatgacatcatctttgaccccaacatcctgaccatcggcaccggcatggaggagcacaacctgtatgccatcaacttcatccacgccaccaaggtgatcaaggagaccctgcccggggcccgcatcagcggcggcctgagcaacctgtccttctccttccggggcatggaggccatccgggaggccatgcatggagtcttcctgtaccacgccatcaagagcggcatggacatgggcatcgtgaatgccggcaacctgcctgtgtatgatgacatccacaaggagctgctgcagctgtgtgaggacctgatctggaacaaggaccctgaggccacagagaagctgctgcgctatgcccagacccagggcactggaggcaagaaggtgatccagacagatgagtggagaaatggacctgtggaggagcggctggagtatgccctggtgaagggcatcgagaagcacatcatcgaggacacagaggaggcccggctgaaccagaagaagtacccccggcccctgaacatcatcgagggccccctgatgaatggcatgaagatcgtgggggacctgtttggagctgggaagatgttcctgccccaggtgatcaagagcgcccgggtgatgaagaaggctgtgggccacctgatccccttcatggagaaggagcgggaggagaccagggtgctgaatggcaccgtggaggaggaggacccctaccagggcaccatcgtgctggccaccgtgaagggagatgtgcatgacatcggcaagaacatcgtgggcgtggtgctgggctgcaacaacttccgggtcatcgacctgggcgtgatgaccccctgtgacaagatcctgaaggccgccctggaccacaaggctgacatcatcggcctgagcggcctcatcacccccagcctggatgagatgatctttgtggccaaggagatggagcggctggccatccgcatccccctgctgattggaggagccaccaccagcaagacccacacagctgtgaagatcgccccccgctacagcgcccctgtgatccacgtgctggatgccagcaagtctgtggtggtgtgcagccagctgctggatgagaacctgaaggatgagtactttgaggagatcatggaggagtatgaggacatccggcaggaccactatgagagcctgaaggagcggcgctacctgcccctgagccaggccaggaagagcggcttccagatggactggctgtctgagccccaccctgtgaagcccaccttcatcggcacccaggtgtttgaggactatgacctgcagaagctggtggactacatcgactggaagcccttctttgatgtgtggcagctgcggggcaagtaccccaacagaggcttccccaagatcttcaatgacaagacagtgggcggggaggccaggaaggtgtatgatgatgcccacaacatgctgaacaccctcatcagccagaagaagctgcgggcccggggcgtggtgggcttctggccagcccagagcatccaggatgacatccacctgtatgcagaggccgctgtgccccaggccgctgagcccatcgccaccttctacggcctgcggcagcaggccgagaaggacagcgccagcacagagccctactactgcctgagtgacttcatcgcccccctgcacagcggcatccgggactacctgggcctgtttgctgtggcctgctttggagtggaggagctgagcaaggcctatgaagatgatggagatgactacagcagcatcatggtgaaggccctgggggaccggctggccgaggcctttgctgaggagctgcacgagcgggtgcggcgggagctgtgggcctactgcggcagcgagcagctggatgtggccgacctgcggcggctgcgctacaagggcatccggcctgcccctggctaccccagccagcctgaccacacagagaagctgaccatgtggaggctggccgacatcgagcagagcacaggcatccggctgacagagagcctggccatggccccagccagcgctgtgtctggcctgtacttcagcaacctgaagagcaagtactttgctgtgggcaagatcagcaaggaccaggtggaggactatgccctgaggaagaacatctctgtggccgaggtggagaagtggctgggccccatcctgggctatgacacagactag

SEQ ID NO: 141989 - DNA, 3798 bp, synthetic construct
  misc_feature 1..3798: note = Description of Artificial Sequence: Synthetic coding sequence
  source 1..3798: mol_type = other DNA
atgagccctgccctgcaggacctgagccagcctgagggcctgaagaagaccctgagagatgagatcaatgccatcctgcagaagaggatcatggtgctggatggcggcatgggcaccatgatccagcgggagaagctgaatgaggagcacttccggggccaggagttcaaggaccacgcccggcccctgaagggcaacaatgacatcctgagcatcacccagccagatgtgatctaccagatccacaaggagtacctgctggccggggctgacatcatcgagaccaacaccttcagcagcaccagcatcgcccaggccgactatggcctggagcacctggcctacaggatgaacatgtgcagcgctggggtggccaggaaggctgctgaggaggtgaccctgcagacaggcatcaagagatttgtggccggggccctgggccccaccaacaagaccctgtctgtgagccccagcgtggagaggccagactacagaaacatcacctttgatgagctggtggaggcctaccaggagcaggccaagggcctgctggatggaggagtggacatcctgctgattgagaccatctttgacacagccaatgccaaggccgccctgtttgccctgcagaacctgtttgaggagaagtatgccccccggcccatcttcatcagcggcaccatcgtggacaagagcggccgcaccctgagcggccagacaggagagggcttcgtcatctctgtgagccacggggagcccctgtgcatcggcctgaactgtgccctgggcgctgctgagatgaggcccttcatcgagatcatcggcaagtgcaccacagcctacgtgctgtgctacccaaatgccggcctgcccaacaccttcggggactatgatgagacccccagcatgatggccaagcacctgaaggactttgccatggatggcctggtgaacatcgtgggcggctgctgcggcagcaccccagaccacatccgggagattgctgaggccgtgaagaactgcaagccccgggtgcccccagccacagcctttgagggccacatgctgctgagcggcctggagcccttcagaattggcccctacaccaactttgtgaacatcggggagcgctgcaatgtggccggcagcaggaagtttgccaagctgatcatggccggcaactatgaggaggccctgtgtgtggccaaggtgcaggtggagatgggcgcccaggtgctggatgtgaacatggatgatggcatgctggatggccccagcgccatgacccgcttctgcaacctgattgccagcgagccagacatcgccaaggtgcccctgtgcatcgacagcagcaactttgctgtgattgaggccggcctgaagtgctgccagggcaagtgcatcgtgaacagcatcagcctgaaggagggggaggatgacttcctggagaaggccaggaagatcaagaagtatggagctgccatggtggtgatggcctttgatgaggagggccaggccacagaaacagacaccaagatccgggtgtgcacccgggcctaccacctgctggtgaagaagctgggcttcaaccccaatgacatcatctttgaccccaacatcctgaccatcggcaccggcatggaggagcacaacctgtatgccatcaacttcatccacgccaccaaggtgatcaaggagaccctgcccggggcccgcatcagcggcggcctgagcaacctgtccttctccttccggggcatggaggccatccgggaggccatgcatggagtcttcctgtaccacgccatcaagagcggcatggacatgggcatcgtgaatgccggcaacctgcctgtgtatgatgacatccacaaggagctgctgcagctgtgtgaggacctgatctggaacaaggaccctgaggccacagagaagctgctgcgctatgcccagacccagggcactggaggcaagaaggtgatccagacagatgagtggagaaatggacctgtggaggagcggctggagtatgccctggtgaagggcatcgagaagcacatcatcgaggacacagaggaggcccggctgaaccagaagaagtacccccggcccctgaacatcatcgagggccccctgatgaatggcatgaagatcgtgggggacctgtttggagctgggaagatgttcctgccccaggtgatcaagagcgcccgggtgatgaagaaggctgtgggccacctgatccccttcatggagaaggagcgggaggagaccagggtgctgaatggcaccgtggaggaggaggacccctaccagggcaccatcgtgctggccaccgtgaagggagatgtgcatgacatcggcaagaacatcgtgggcgtggtgctgggctgcaacaacttccgggtcatcgacctgggcgtgatgaccccctgtgacaagatcctgaaggccgccctggaccacaaggctgacatcatcggcctgagcggcctcatcacccccagcctggatgagatgatctttgtggccaaggagatggagcggctggccatccgcatccccctgctgattggaggagccaccaccagcaagacccacacagctgtgaagatcgccccccgctacagcgcccctgtgatccacgtgctggatgccagcaagtctgtggtggtgtgcagccagctgctggatgagaacctgaaggatgagtactttgaggagatcatggaggagtatgaggacatccggcaggaccactatgagagcctgaaggagcggcgctacctgcccctgagccaggccaggaagagcggcttccagatggactggctgtctgagccccaccctgtgaagcccaccttcatcggcacccaggtgtttgaggactatgacctgcagaagctggtggactacatcgactggaagcccttctttgatgtgtggcagctgcggggcaagtaccccaacagaggcttccccaagatcttcaatgacaagacagtgggcggggaggccaggaaggtgtatgatgatgcccacaacatgctgaacaccctcatcagccagaagaagctgcgggcccggggcgtggtgggcttctggccagcccagagcatccaggatgacatccacctgtatgcagaggccgctgtgccccaggccgctgagcccatcgccaccttctacggcctgcggcagcaggccgagaaggacagcgccagcacagagccctactactgcctgagtgacttcatcgcccccctgcacagcggcatccgggactacctgggcctgtttgctgtggcctgctttggagtggaggagctgagcaaggcctatgaagatgatggagatgactacagcagcatcatggtgaaggccctgggggaccggctggccgaggcctttgctgaggagctgcacgagcgggtgcggcgggagctgtgggcctactgcggcagcgagcagctggatgtggccgacctgcggcggctgcgctacaagggcatccggcctgcccctggctaccccagccagcctgaccacacagagaagctgaccatgtggaggctggccgacatcgagcagagcacaggcatccggctgacagagagcctggccatggccccagccagcgctgtgtctggcctgtacttcagcaacctgaagagcaagtactttgctgtgggcaagatcagcaaggaccaggtggaggactatgccctgaggaagaacatctctgtggccgaggtggagaagtggctgggccccatcctgggctatgacacagactag

SEQ ID NO: 141990 - DNA, 3357 bp, synthetic construct
  misc_feature 1..3357: note = Description of Artificial Sequence: Synthetic coding sequence
  source 1..3357: mol_type = other DNA
atgagccctgccctgcaggacctgagccagcctgagggcctgaagaagaccctgagagatgagatcaatgccatcctgcagaagaggatcatggtgctggatggcggcatgggcaccatgatccagcgggagaagctgaatgaggagcacttccggggccaggagttcaaggaccacgcccggcccctgaagggcaacaatgacatcctgagcatcacccagccagatgtgatctaccagatccacaaggagtacctgctggccggggctgacatcatcgagaccaacaccttcagcagcaccagcatcgcccaggccgactatggcctggagcacctggcctacaggatgaacatgtgcagcgctggggtggccaggaaggctgctgaggaggtgaccctgcagacaggcatcaagagatttgtggccggggccctgggccccaccaacaagaccctgtctgtgagccccagcgtggagaggccagactacagaaacatcacctttgatgagctggtggaggcctaccaggagcaggccaagggcctgctggatggaggagtggacatcctgctgattgagaccatctttgacacagccaatgccaaggccgccctgtttgccctgcagaacctgtttgaggagaagtatgccccccggcccatcttcatcagcggcaccatcgtggacaagagcggccgcaccctgagcggccagacaggagagggcttcgtcatctctgtgagccacggggagcccctgtgcatcggcctgaactgtgccctgggcgctgctgagatgaggcccttcatcgagatcatcggcaagtgcaccacagcctacgtgctgtgctacccaaatgccggcctgcccaacaccttcggggactatgatgagacccccagcatgatggccaagcacctgaaggactttgccatggatggcctggtgaacatcgtgggcggctgctgcggcagcaccccagaccacatccgggagattgctgaggccgtgaagaactgcaagccccgggtgcccccagccacagcctttgagggccacatgctgctgagcggcctggagcccttcagaattggcccctacaccaactttgtgaacatcggggagcgctgcaatgtggccggcagcaggaagtttgccaagctgatcatggccggcaactatgaggaggccctgtgtgtggccaaggtgcaggtggagatgggcgcccaggtgctggatgtgaacatggatgatggcatgctggatggccccagcgccatgacccgcttctgcaacctgattgccagcgagccagacatcgccaaggtgcccctgtgcatcgacagcagcaactttgctgtgattgaggccggcctgaagtgctgccagggcaagtgcatcgtgaacagcatcagcctgaaggagggggaggatgacttcctggagaaggccaggaagatcaagaagtatggagctgccatggtggtgatggcctttgatgaggagggccagacccagggcactggaggcaagaaggtgatccagacagatgagtggagaaatggacctgtggaggagcggctggagtatgccctggtgaagggcatcgagaagcacatcatcgaggacacagaggaggcccggctgaaccagaagaagtacccccggcccctgaacatcatcgagggccccctgatgaatggcatgaagatcgtgggggacctgtttggagctgggaagatgttcctgccccaggtgatcaagagcgcccgggtgatgaagaaggctgtgggccacctgatccccttcatggagaaggagcgggaggagaccagggtgctgaatggcaccgtggaggaggaggacccctaccagggcaccatcgtgctggccaccgtgaagggagatgtgcatgacatcggcaagaacatcgtgggcgtggtgctgggctgcaacaacttccgggtcatcgacctgggcgtgatgaccccctgtgacaagatcctgaaggccgccctggaccacaaggctgacatcatcggcctgagcggcctcatcacccccagcctggatgagatgatctttgtggccaaggagatggagcggctggccatccgcatccccctgctgattggaggagccaccaccagcaagacccacacagctgtgaagatcgccccccgctacagcgcccctgtgatccacgtgctggatgccagcaagtctgtggtggtgtgcagccagctgctggatgagaacctgaaggatgagtactttgaggagatcatggaggagtatgaggacatccggcaggaccactatgagagcctgaaggagcggcgctacctgcccctgagccaggccaggaagagcggcttccagatggactggctgtctgagccccaccctgtgaagcccaccttcatcggcacccaggtgtttgaggactatgacctgcagaagctggtggactacatcgactggaagcccttctttgatgtgtggcagctgcggggcaagtaccccaacagaggcttccccaagatcttcaatgacaagacagtgggcggggaggccaggaaggtgtatgatgatgcccacaacatgctgaacaccctcatcagccagaagaagctgcgggcccggggcgtggtgggcttctggccagcccagagcatccaggatgacatccacctgtatgcagaggccgctgtgccccaggccgctgagcccatcgccaccttctacggcctgcggcagcaggccgagaaggacagcgccagcacagagccctactactgcctgagtgacttcatcgcccccctgcacagcggcatccgggactacctgggcctgtttgctgtggcctgctttggagtggaggagctgagcaaggcctatgaagatgatggagatgactacagcagcatcatggtgaaggccctgggggaccggctggccgaggcctttgctgaggagctgcacgagcgggtgcggcgggagctgtgggcctactgcggcagcgagcagctggatgtggccgacctgcggcggctgcgctacaagggcatccggcctgcccctggctaccccagccagcctgaccacacagagaagctgaccatgtggaggctggccgacatcgagcagagcacaggcatccggctgacagagagcctggccatggccccagccagcgctgtgtctggcctgtacttcagcaacctgaagagcaagtactttgctgtgggcaagatcagcaaggaccaggtggaggactatgccctgaggaagaacatctctgtggccgaggtggagaagtgcatgtctgtgtacaggaagatcggggagtag

SEQ ID NO: 141991 - DNA, 690 bp, synthetic construct
  misc_feature 1..690: note = Description of Artificial Sequence: Synthetic coding sequence
  source 1..690: mol_type = other DNA
atgtctgctggcctgcgggccggctgccacgtggtgctgctgtgccgcttcagcctgggcagcttctctgtgcccagccgggacagcgccagcggccgggcctgcctggccgcccggcccacccccaggacaggccgggtgcctgggaagaaggcccgggccccagctgtggccgcccccagccctgagcggggcccccgggccctgcgggccttcggcgtgcgcagccccccagccacccgggccaatggaagacggcagaagacccgggccctgtgtggccgcctggcctggcgctggctggcctggcccctggccgtggtgacctgtggggagcacgtgttttctgctgcccccagcgcccagggcggggacagcaccacctgccaccccaggagcaagacctgcagaaatcctgagtacctgctggccggggctgacatcatcgagaccaacaccttcagcagcaccagcatcgcccaggccgactatggcctggagcacctggcctacaggatgaacatgtgcagcgctggggtggccaggaaggctgctgaggaggtgaccctgcagacaggcatcaagagatttgtggccggggccctgggccccaccaacaagaccctgtctgtgagccccagcgtggagaggccagactacagaaacatcaacctgcctgtgggcagctag

SEQ ID NO: 141992 - DNA, 3645 bp, synthetic construct
  misc_feature 1..3645: note = Description of Artificial Sequence: Synthetic coding sequence
  source 1..3645: mol_type = other DNA
atgagccctgccctgcaggacctgagccagcctgagggcctgaagaagaccctgagagatgagatcaatgccatcctgcagaagaggatcatggtgctggatggcggcatgggcaccatgatccagcgggagaagctgaatgaggagcacttccggggccaggagttcaaggaccacgcccggcccctgaagggcaacaatgacatcctgagcatcacccagccagatgtgatctaccagatccacaaggagtacctgctggccggggctgacatcatcgagaccaacaccttcagcagcaccagcatcgcccaggccgactatggcctggagcacctggcctacaggatgaacatgtgcagcgctggggtggccaggaaggctgctgaggaggtgaccctgcagacaggcatcaagagatttgtggccggggccctgggccccaccaacaagaccctgtctgtgagccccagcgtggagaggccagactacagaaacatcacctttgatgagctggtggaggcctaccaggagcaggccaagggcctgctggatggaggagtggacatcctgctgattgagaccatctttgacacagccaatgccaaggccgccctgtttgccctgcagaacctgtttgaggagaagtatgccccccggcccatcttcatcagcggcaccatcgtggacaagagcggccgcaccctgagcggccagacaggagagggcttcgtcatctctgtgagccacggggagcccctgtgcatcggcctgaactgtgccctgggcgctgctgagatgaggcccttcatcgagatcatcggcaagtgcaccacagcctacgtgctgtgctacccaaatgccggcctgcccaacaccttcggggactatgatgagacccccagcatgatggccaagcacctgaaggactttgccatggatggcctggtgaacatcgtgggcggctgctgcggcagcaccccagaccacatccgggagattgctgaggccgtgaagaactgcaagccccgggtgcccccagccacagcctttgagggccacatgctgctgagcggcctggagcccttcagaattggcccctacaccaactttgtgaacatcggggagcgctgcaatgtggccggcagcaggaagtttgccaagctgatcatggccggcaactatgaggaggccctgtgtgtggccaaggtgcaggtggagatgggcgcccaggtgctggatgtgaacatggatgatggcatgctggatggccccagcgccatgacccgcttctgcaacctgattgccagcgagccagacatcgccaaggtgcccctgtgcatcgacagcagcaactttgctgtgattgaggccggcctgaagtgctgccagggcaagtgcatcgtgaacagcatcagcctgaaggagggggaggatgacttcctggagaaggccaggaagatcaagaagtatggagctgccatggtggtgatggcctttgatgaggagggccaggccacagaaacagacaccaagatccgggtgtgcacccgggcctaccacctgctggtgaagaagctgggcttcaaccccaatgacatcatctttgaccccaacatcctgaccatcggcaccggcatggaggagcacaacctgtatgccatcaacttcatccacgccaccaaggtgatcaaggagaccctgcccggggcccgcatcagcggcggcctgagcaacctgtccttctccttccggggcatggaggccatccgggaggccatgcatggagtcttcctgtaccacgccatcaagagcggcatggacatgggcatcgtgaatgccggcaacctgcctgtgtatgatgacatccacaaggagctgctgcagctgtgtgaggacctgatctggaacaaggaccctgaggccacagagaagctgctgcgctatgcccagacccagggcactggaggcaagaaggtgatccagacagatgagtggagaaatggacctgtggaggagcggctggagtatgccctggtgaaggtgatcaagagcgcccgggtgatgaagaaggctgtgggccacctgatccccttcatggagaaggagcgggaggagaccagggtgctgaatggaacagtggaggaggaggacccctaccagggcaccatcgtgctggccaccgtgaagggagatgtgcatgacatcggcaagaacatcgtgggcgtggtgctgggctgcaacaacttccgggtgattgacctgggcgtgatgaccccctgtgacaagatcctgaaggccgccctggaccacaaggctgacatcatcggcctgagcggcctcatcacccccagcctggatgagatgatctttgtggccaaggagatggagcggctggccatccgcatccccctgctgattggaggagccaccaccagcaagacccacacagctgtgaagatcgccccccgctacagcgcccctgtgattcatgtgctggatgccagcaagtctgtggtggtgtgcagccagctgctggatgagaacctgaaggatgagtactttgaggagatcatggaggagtatgaggacatccggcaggaccactatgagagcctgaaggagcggcgctacctgcccctgagccaggccaggaagagcggcttccagatggactggctgtctgagccccaccctgtgaagcccaccttcatcggcacccaggtgtttgaagattatgacctgcagaagctggtggactacatcgactggaagcccttctttgatgtgtggcagctgcggggcaagtaccccaacagaggcttccccaagatcttcaatgacaagacagtgggcggggaggccaggaaggtgtatgatgatgcccacaacatgctgaacaccctcatcagccagaagaagctgcgggcccggggcgtggtgggcttctggccagcccagagcatccaggatgacatccacctgtatgcagaggccgctgtgccccaggccgctgagcccatcgccaccttctacggcctgcggcagcaggccgagaaggacagcgccagcacagagccctactactgcctgagtgacttcatcgcccccctgcacagcggcatccgggactacctgggcctgtttgctgtggcctgcttcggcgtggaggagctgagcaaggcctatgaagatgatggagatgactacagcagcatcatggtgaaggccctgggggaccggctggccgaggcctttgctgaggagctgcacgagcgggtgagaagagagctgtgggcctactgcggcagcgagcagctggatgtggccgacctgcggcggctgcgctacaagggcatccggcctgcccctggctaccccagccagcctgaccacacagagaagctgaccatgtggaggctggccgacatcgagcagagcacaggcatccggctgacagagagcctggccatggccccagccagcgctgtgtctggcctgtacttcagcaacctgaagagcaagtactttgctgtgggcaagatcagcaaggaccaggtggaggactatgccctgaggaagaacatctctgtggccgaggtggagaagtggctgggccccatcctgggctatgacacagactag

SEQ ID NO: 141993 - DNA, 2178 bp, synthetic construct
  misc_feature 1..2178: note = Description of Artificial Sequence: Synthetic coding sequence
  source 1..2178: mol_type = other DNA
atgggcgccgcctctgtgcgggccggggcccggctggtggaggtggccctgtgcagcttcaccgtgacctgcctggaggtgatgaggcgcttcctgctgctgtatgccacccagcagggccaggccaaggccatcgccgaggagatctgtgagcaggccgtggtgcacggcttctctgctgacctgcactgcatcagcgagagtgacaagtatgacctgaagacagaaacagcccccctggtggtggtggtgtccaccactggaactggagaccccccagacacagccaggaagtttgtgaaggagatccagaaccagaccctgcctgtggacttctttgcccacctgcgctatggcctgctgggcctgggggacagcgagtacacctacttctgcaatggaggcaagatcatcgacaagaggctgcaggagctgggcgcccggcacttctatgacaccggccacgcagatgactgtgtgggcctggagctggtggtggagccctggattgctggcctgtggccagccctgaggaagcacttccgcagcagccggggccaggaggagatcagcggggccctgcctgtggccagccctgccagcagcaggacagacctggtgaagtctgagctgctgcacatcgagagccaggtggagctgctgcgctttgatgacagcggcaggaaggacagcgaggtgctgaagcagaatgctgtgaacagcaaccagagcaatgtggtgattgaagattttgagagcagcctgaccaggtctgtgccccccctgagccaggccagcctgaacatccctggcctgcccccagagtacctgcaggtgcacctgcaggagagcctgggccaggaggagagccaggtgtctgtgaccagcgctgaccctgtgttccaggtgcccatcagcaaggctgtgcagctgaccaccaatgatgccatcaagaccaccctgctggtggagctggacatcagcaacacagacttctcctaccagcctggagatgccttcagcgtcatctgccccaacagcgacagcgaggtgcagagcctgctgcagaggctgcagctggaggacaagcgggagcactgtgtgctgctgaagatcaaggctgacaccaagaagaagggggccaccctgccccagcacatcccagctggctgcagcctgcagttcatcttcacctggtgcctggagatccgggccatccccaagaaggccttcctgcgggccctggtggactacaccagtgacagcgctgagaagaggcggctgcaggagctgtgcagcaagcagggcgctgctgactacagcagatttgtgagagatgcctgtgcctgcctgctggacctgctgctggccttccccagctgccagccccccctgagcctgctgctggagcacctgcccaagctgcagccccggccctacagctgtgccagcagcagcctcttccaccctgggaagctgcactttgtgttcaacatcgtggagttcctgagcacagccaccacagaggtgctgaggaaaggagtgtgcaccggctggctggccctgctggtggcctctgtgctgcagcccaacatccacgccagccatgaagattctgggaaggccctggcccccaagatcagcatcagccccaggaccaccaacagcttccacctgcctgatgaccccagcatccccatcatcatggtgggccctggcaccggcatcgcccccttcatcggcttcctgcagcaccgggagaagctgcaggagcagcacccagatggcaactttggagccatgtggctgttcttcggctgccgccacaaggaccgggactacctgttcaggaaggagctgcggcacttcctgaagcacggcatcctgacccacctgaaggtgtccttcagcagagatgcccctgtgggggaggaggaggccccagccaagtatgtgcaggacaacatccagctgcacggccagcaggtggcccgcatcctgctgcaggagaatggccacatctacgtgtgtggagatgccaagaacatggccaaggatgtgcatgatgccctggtgcagatcatcagcaaggaggtgggcgtggagaagctggaggccatgaagaccctggccaccctgaaggaggagaagcgctacctgcaggacatctggagctag

SEQ ID NO: 141994 - DNA, 177 bp, synthetic construct
  misc_feature 1..177: note = Description of Artificial Sequence: Synthetic coding sequence
  source 1..177: mol_type = other DNA
atgaggcgcttcctgctgctgtatgccacccagcagggccaggccaaggccatcgccgaggagatctgtgagcaggccgtggtgcacggcttctctgctgacctgcactgcatcagcgagagtgacaaggtgtctgtcatccagaacacccccacctttgccatgggcggccgctag

SEQ ID NO: 141995 - DNA, 2097 bp, synthetic construct
  misc_feature 1..2097: note = Description of Artificial Sequence: Synthetic coding sequence
  source 1..2097: mol_type = other DNA
atgaggcgcttcctgctgctgtatgccacccagcagggccaggccaaggccatcgccgaggagatctgtgagcaggccgtggtgcacggcttctctgctgacctgcactgcatcagcgagagtgacaagtatgacctgaagacagaaacagcccccctggtggtggtggtgtccaccaccggcaccggggaccccccagacacagccaggaagtttgtgaaggagatccagaaccagaccctgcctgtggacttctttgcccacctgcgctatggcctgctgggcctgggggacagcgagtacacctacttctgcaatggaggcaagatcatcgacaagaggctgcaggagctgggcgcccggcacttctatgacaccggccatgctgatgactgtgtgggcctggagctggtggtggagccctggattgctggcctgtggccagccctgaggaagcacttccgcagcagccggggccaggaggagatcagcggggccctgcctgtggccagccctgccagcagcaggacagacctggtgaagtctgagctgctgcacatcgagagccaggtggagctgctgcgctttgatgattctggcaggaaggacagcgaggtgctgaagcagaatgctgtgaacagcaaccagagcaatgtggtgattgaggactttgagagcagcctgaccaggtctgtgccccccctgagccaggccagcctgaacatccctggcctgcccccagagtacctgcaggtgcacctgcaggagagcctgggccaggaggagagccaggtgtctgtgaccagcgctgaccccgtcttccaggtgcccatcagcaaggctgtgcagctgaccaccaatgatgccatcaagaccaccctgctggtggagctggacatcagcaacacagacttctcctaccagcctggagatgccttcagcgtcatctgccccaacagcgacagcgaggtgcagagcctgctgcagaggctgcagctggaggacaagcgggagcactgtgtgctgctgaagatcaaggctgacaccaagaagaagggggccaccctgccccagcacatcccagctggctgcagcctgcagttcatcttcacctggtgcctggagatccgggccatccccaagaaggccttcctgcgggccctggtggactacaccagtgacagcgctgagaagaggcggctgcaggagctgtgcagcaagcagggcgctgctgactacagcagatttgtgagagatgcctgtgcctgcctgctggacctgctgctggccttccccagctgccagccccccctgagcctgctgctggagcacctgcccaagctgcagccccggccctacagctgtgccagcagcagcctcttccaccctgggaagctgcactttgtgttcaacatcgtggagttcctgagcacagccaccacagaggtgctgaggaagggcgtgtgcaccggctggctggccctgctggtggcctctgtgctgcagcccaacatccacgccagccatgaggacagcggcaaggccctggcccccaagatcagcatcagccccaggaccaccaacagcttccacctgcctgatgaccccagcatccccatcatcatggtgggccctggcactggaattgcccccttcatcggcttcctgcagcaccgggagaagctgcaggagcagcacccagatggcaactttggagccatgtggctgttcttcggctgccgccacaaggaccgggactacctgttcaggaaggagctgcggcacttcctgaagcacggcatcctgacccacctgaaggtgtccttcagcagagatgcccctgtgggggaggaggaggccccagccaagtatgtgcaggacaacatccagctgcacggccagcaggtggcccgcatcctgctgcaggagaatggccacatctacgtgtgtggagatgccaagaacatggccaaggatgtgcatgatgccctggtgcagatcatcagcaaggaggtgggcgtggagaagctggaggccatgaagaccctggccaccctgaaggaggagaagcgctacctgcaggacatctggagctag

SEQ ID NO: 141996 - DNA, 471 bp, synthetic construct
  misc_feature 1..471: note = Description of Artificial Sequence: Synthetic coding sequence
  source 1..471: mol_type = other DNA
atgaggcgcttcctgctgctgtatgccacccagcagggccaggccaaggccatcgccgaggagatctgtgagcaggccgtggtgcacggcttctctgctgacctgcactgcatcagcgagagtgacaagtatgacctgaagacagaaacagcccccctggtggtggtggtgtccaccaccggcaccggggaccccccagacacagccaggaagtttgtgaaggagatccagaaccagaccctgcctgtggacttctttgcccacctgcgctatggcctgctgggcctgggggacagcgagtacacctacttctgcaatggaggcaagatcatcgacaagaggctgcaggagctgggcgcccggcacttctatgacaccggccatgctgatgactgtgtgggcctggagctggtggtggagccctggattgctggcctgtggccagccctgaggaagcacttccgctcctag

SEQ ID NO: 141997 - DNA, 126 bp, synthetic construct
  misc_feature 1..126: note = Description of Artificial Sequence: Synthetic coding sequence
  source 1..126: mol_type = other DNA
atgaggcgcttcctgctgctgtatgccacccagcagggccaggccaaggccatcgccgaggagatctgtgagcaggccgtggtgcacggcttctctgctgacctgcactgcatcagcgagagctag

SEQ ID NO: 141998 - DNA, 339 bp, synthetic construct
  misc_feature 1..339: note = Description of Artificial Sequence: Synthetic coding sequence
  source 1..339: mol_type = other DNA
atgaggcgcttcctgctgctgtatgccacccagcagggccaggccaaggccatcgccgaggagatctgtgagcaggccgtggtgcacggcttctctgctgacctgcactgcatcagcgagagtgacaagtatgacctgaagacagaaacagcccccctggtggtggtggtgtccaccaccggcaccggggaccccccagacacagccaggaagtttgtgaaggagatccagaaccagaccctgcctgtggacttctttgcccacctgcgctatggcctgctgggcctgggggacagcgagtacacctacttctgcaatggaggcaagatcattgattag

SEQ ID NO: 141999 - DNA, 249 bp, synthetic construct
  misc_feature 1..249: note = Description of Artificial Sequence: Synthetic coding sequence
  source 1..249: mol_type = other DNA
atgctgtgggaccctgccctgccccggctggccgtgtatgccagctgcctcttcttcagctgcctggatgcccacgagggccctgtgcacggcccccggggccgcggggagggcggccggggcagcgagcggcagagggtgcggcctgggggcggcggcggggccggctctgtgcacatccacctggaggaggaggatggagctgaggaccaggaccacagagatgaggactggatcaccaagaagtag

SEQ ID NO: 142000 - DNA, 1647 bp, synthetic construct
  misc_feature 1..1647: note = Description of Artificial Sequence: Synthetic coding sequence
  source 1..1647: mol_type = other DNA
atgaccatggctgctgctgctgtggtggcccggggagctggggcccgggccgccacagctgctgccctgcggggcggctgcggcacagctgcccggggccggccctgtgccggccctgcccggcccctgtgcacagcccctggaacagccccagacatgaagcgctacctgtgggagcgctaccgggaggccaagaggagcacagaggagctggtgcccagcatcatgagcaacctgctgaacccagatgccatcttcagcaacaatgagatgagcctgagtgacatcgagatctacggctttgattatgactacaccctggtgttctacagcaagcacctgcacaccctcatcttcaatgctgcccgggacctgctgatcaatgagcaccgctacccagctgagatcagaaaatatgaatatgaccccaactttgccatccggggcctgcactatgatgtgcagagagctgtgctgatgaagattgatgccttccactacatccagctgggcaccgtgtaccggggcctgtctgtggtgcctgatgaggaggtgattgagatgtatgagggcagccacgtgcccctggagcagatgtctgacttctacggcaagagcagccacggcaacaccatgaagcagttcatggacatcttcagcctgcctgagatgaccctgctgagctgtgtgaatgagtacttcctgaagaacaacattgattatgagcctgtgcacctgtacaaggatgtgaaggacagcatcagagatgtgcacatcaagggcatcatgtaccgggccattgaagctgacatcgagaagtacatctgctacgccgagcagaccagggctgtgctggccaagctggccgaccacggcaagaagatgttcctgatcaccaacagccccagcagctttgtggacaagggcatgagctacatcgtgggcaaggactggagggacctgtttgatgtggtgattgtgcaggccgagaagcccaacttcttcaatgacaagagaagacccttcaggaagatgaatgagaagggcgtgctgctgtgggacaagatccacaagctgcagaagggccagatctacaagcagggcaacctgtatgagttcctgaagctgaccggctggaggggcagccgggtgctgtactttggagaccacatctacagcgacctggccgacctgaccctgaagcacggctggaggactggagccatcatccctgagctgcggtctgagctgaagatcatgaacacagagcagtacatccagaccatgacctggctgcagaccctgaccggcctgctggagcagatgcaggtgcacagagatgctgagagccagctggtgctgcaggagtggaagaaggagaggaaggagatgagggagatgaccaagagcttcttcaatgcccagtttggcagcctcttcagaacagaccagaaccccacctacttcctgcggcggctgagcagatttgctgacatctacatggccagcctgagctgcctgctgaactatgatgtgagccacaccttctaccccaggaggacccccctgcagcacgagctgcctgcctggagcgagcggccccccaccttcggcacccccctgctgcaggaggcccaggccaagtag

SEQ ID NO: 142001 - DNA, 1686 bp, synthetic construct
  misc_feature 1..1686: note = Description of Artificial Sequence: Synthetic coding sequence
  source 1..1686: mol_type = other DNA
atgagcacctcctggagcgaccggctgcagaatgctgctgacatgcctgccaacatggacaagcacgccctgaagaagtaccgccgggaggcctaccaccgggtgtttgtgaacagaagcctggccatggagaagatcaagtgctttggatttgacatggactacaccctggccgtgtacaagagcccagaatatgagagcctgggctttgagctgactgtggagcggctggtgtccatcggctacccccaggagctgctgagctttgcctatgacagcaccttccccacccggggcctggtgtttgacaccctgtatggcaacctgctgaaggtggatgcctacggcaacctgctggtgtgtgcccacggcttcaacttcatccggggccctgagacccgggagcagtaccccaacaagttcatccagagagatgacacagagcgcttctacatcctgaacaccctcttcaacctgcctgagacctacctgctggcctgcctggtggacttcttcaccaactgcccccgctacaccagctgtgaaacaggcttcaaggatggagacctcttcatgagctaccgctccatgttccaggatgtgagagatgctgtggactgggtgcactacaagggcagcctgaaggagaagacagtggagaacctggagaagtatgtggtgaaggatggcaagctgcccctgctgctgagcaggatgaaggaggtgggcaaggtgttcctggccaccaacagcgactacaagtacacagacaagatcatgacctacctgtttgacttcccccacggccccaagccaggcagcagccaccggccctggcagagctactttgacctgatcctggtggatgccaggaagcccctcttcttcggggagggcaccgtgctgcggcaggtggacaccaagacaggcaagctgaagattggcacctacacaggccccctgcagcacggcatcgtgtacagcggcggcagcagtgacaccatctgtgacctgctgggcgccaagggcaaggacatcctgtacatcggggaccacatctttggagacatcctgaagagcaagaagaggcagggctggaggaccttcctggtgattcctgagctggcccaggagctgcacgtgtggacagacaagagcagcctgtttgaggagctgcagagcctggacatcttcctggccgagctgtacaagcacctggacagcagcagcaatgaaagaccagacatcagcagcatccagaggcgcatcaagaaggtgacccatgacatggacatgtgctacggcatgatgggcagcctcttccgcagcggcagccggcagaccctgtttgccagccaggtgatgagatatgctgacctgtatgctgccagcttcatcaacctgctgtactaccccttctcctacctgttccgggccgcccacgtgctgatgcctcatgagagcacagtggagcacacccacgtggacatcaatgagatggagagccccctggccaccaggaacagaacatctgtggacttcaaggacacagactacaagaggcaccagctgaccaggagcatcagcgagatcaagccacccaacctcttccccctggccccccaggagatcacccactgccatgatgaagatgatgatgaggaggaggaggaggaggaggagtag

SEQ ID NO: 142002 - DNA, 600 bp, synthetic construct
  misc_feature 1..600: note = Description of Artificial Sequence: Synthetic coding sequence
  source 1..600: mol_type = other DNA
atggactacaccctggccgtgtacaagagcccagaatatgagagcctgggctttgagctgactgtggagcggctggtgtccatcggctacccccaggagctgctgagctttgcctatgacagcaccttccccacccggggcctggtgtttgacaccctgtatggcaacctgctgaaggtggatgcctacggcaacctgctggtgtgtgcccacggcttcaacttcatccggggcagccaggtggccgtgcagaagaggcctgagacccgggagcagtaccccaacaagttcatccagagagatgacacagagcgcttctacatcctgaacaccctcttcaacctgcctgagacctacctgctggcctgcctggtggacttcttcaccaactgcccccgctacaccagctgtgaaacaggcttcaaggatggagacctcttcatgagctaccgctccatgttccaggatgtgagagatgctgtggactgggtgcactacaagggcagcctgaaggagaagacagtggagaacctggagaagtatgtggtgaaggacagcaagagcagccgcatccagtacttcctgaaggtgctgtggtag

SEQ ID NO: 142003 - DNA, 1686 bp, synthetic construct; identical to SEQ ID NO: 142001
  misc_feature 1..1686: note = Description of Artificial Sequence: Synthetic coding sequence
  source 1..1686: mol_type = other DNA

SEQ ID NO: 142004 - DNA, 444 bp, synthetic construct
  misc_feature 1..444: note = Description of Artificial Sequence: Synthetic coding sequence
  source 1..444: mol_type = other DNA
gtgctgcggcaggtggacaccaagacaggcaagctgaagattggcacctacacaggccccctgcagcacggcatcgtgtacagcggcggcagcagtgacaccatctgtgacctgctgggcgccaagggcaaggacatcctgtacatcggggaccacatctttggagacatcctgaagagcaagaagaggcagggctggaggaccttcctggtgattcctgagctggcccaggagctgcacgtgtggacagacaagagcagcctgtttgaggagctgcagagcctggacatcttcctggccgagctgtacaagcacctggacagcagcagcaatgaaagaccagacatcagcagcatccagaggcgcatcaagatgcctcatgagagcacagtggagcacacccacgtggacatcaatgagatggagagccccctggccacctag

SEQ ID NO: 142005 - DNA, 1599 bp, synthetic construct
  misc_feature 1..1599: note = Description of Artificial Sequence: Synthetic coding sequence
  source 1..1599: mol_type = other DNA
atgagcaaggagggcgtgtttgtgaacagaagcctggccatggagaagatcaagtgcttcggctttgacatggactacaccctggccgtgtacaagagcccagaatatgagagcctgggctttgagctgactgtggagcggctggtgtccatcggctacccccaggagctgctgagctttgcctatgacagcaccttccccacccggggcctggtgtttgacaccctgtatggcaacctgctgaaggtggatgcctacggcaacctgctggtgtgtgcccacggcttcaacttcatccggggccctgagacccgggagcagtaccccaacaagttcatccagagagatgacacagagcgcttctacatcctgaacaccctcttcaacctgcctgagacctacctgctggcctgcctggtggacttcttcaccaactgcccccgctacaccagctgtgagaccggcttcaaggatggagacctcttcatgagctaccgctccatgttccaggatgtgagagatgctgtggactgggtgcactacaagggcagcctgaaggagaagacagtggagaacctggagaagtatgtggtgaaggatggcaagctgcccctgctgctgagcaggatgaaggaggtgggcaaggtgttcctggccaccaacagcgactacaagtacacagacaagatcatgacctacctgtttgacttcccccacggccccaagccaggcagcagccaccggccctggcagagctactttgacctgatcctggtggatgccaggaagcccctcttctttggagagggcaccgtgctgcggcaggtggacaccaagacaggcaagctgaagattggcacctacacaggccccctgcagcacggcatcgtgtacagcggcggcagcagtgacaccatctgtgacctgctgggcgccaagggcaaggacatcctgtacatcggggaccacatctttggagacatcctgaagagcaagaagaggcagggctggaggaccttcctggtgattcctgagctggcccaggagctgcacgtgtggacagacaagagcagcctgtttgaggagctgcagagcctggacatcttcctggccgagctgtacaagcacctggacagcagcagcaatgaaagaccagacatcagcagcatccagaggcgcatcaagaaggtgacccatgacatggacatgtgctacggcatgatgggcagcctcttccgcagcggcagccggcagaccctgtttgccagccaggtgatgagatatgctgacctgtatgctgccagcttcatcaacctgctgtactaccccttctcctacctgttccgggccgcccacgtgctgatgcctcatgagagcacagtggagcacacccacgtggacatcaatgagatggagagccccctggccaccaggaacagaacatctgtggacttcaaggacacagactacaagaggcaccagctgaccaggagcatcagcgagatcaagccacccaacctcttccccctggccccccaggagatcacccactgccatgatgaagatgatgatgaggaggaggaggaggaggaggagtag

SEQ ID NO: 142006 - DNA, 798 bp, synthetic construct
  misc_feature 1..798: note = Description of Artificial Sequence: Synthetic coding sequence
  source 1..798: mol_type = other DNA
atgagcacctcctggagcgaccggctgcagaatgctgctgacatgcctgccaacatggacaagcacgccctgaagaagtaccgccgggaggcctaccaccgggtgtttgtgaacagaagcctggccatggagaagatcaagtgctttggatttgacatggactacaccctggccgtgtacaagagcccagaatatgagagcctgggctttgagctgactgtggagcggctggtgtccatcggctacccccaggagctgctgagctttgcctatgacagcaccttccccacccggggcctggtgtttgacaccctgtatggcaacctgctgaaggtggatgcctacggcaacctgctggtgtgtgcccacggcttcaacttcatccggggcagccaggtggccgtgcagaagaggcctgagacccgggagcagtaccccaacaagttcatccagagagatgacacagagcgcttctacatcctgaacaccctcttcaacctgcctgagacctacctgctggcctgcctggtggacttcttcaccaactgcccccgctacaccagctgtgaaacaggcttcaaggatggagacctcttcatgagctaccgctccatgttccaggatgtgagagatgctgtggactgggtgcactacaagggcagcctgaaggagaagacagtggagaacctggagaagtatgtggtgaaggatggcaagctgcccctgctgctgagcaggatgaaggaggtgggcaaggtgttcctggccaccaacagcgactacaagtacacagactag

SEQ ID NO: 142007 - DNA, 525 bp, synthetic construct
  misc_feature 1..525: note = Description of Artificial Sequence: Synthetic coding sequence
  source 1..525: mol_type = other DNA
gtgtccatcggctacccccaggagctgctgagctttgcctatgacagcaccttccccacccggggcctggtgtttgacaccctgtatggcaacctgctgaaggtggatgcctacggcaacctgctggtgtgtgcccacggcttcaacttcatccggggcagccaggtggccgtgcagaagaggcctgagacccgggagcagtaccccaacaagttcatccagagagatgacacagagcgcttctacatcctgaacaccctcttcaacctgcctgagacctacctgctggcctgcctggtggacttcttcaccaactgcccccgctacaccagctgtgagaccggcttcaaggatggagacctcttcatgagctaccgctccatgttccaggatgtgagagatgctgtggactgggtgcactacaagggcagcctgaaggagaagacagtggagaacctggagaagtatgtggtgaaggacagcaagagcagccgcatccagtacttcctgaaggtgctgtggtag

SEQ ID NO: 142008 - DNA, 1011 bp, synthetic construct
  misc_feature 1..1011: note = Description of Artificial Sequence: Synthetic coding sequence
  source 1..1011: mol_type = other DNA
atgagggcccccagcatggacagagctgctgtggcccgggtgggcgctgtggccagcgcctctgtgtgtgccctggtggccggcgtggtgctggcccagtacatcttcaccctgaagaggaagacaggcaggaagaccaagatcatcgagatgatgcctgagttccagaagagctctgtgcgcatcaagaaccccaccagggtggaggagatcatctgtggcctcatcaagggcggggccgccaagctgcagatcatcacagactttgacatgaccctgagccgcttctcctacaagggcaagcgctgccccacctgccacaacatcatcgacaactgcaagctggtgacagatgaatgtaggaagaagctgctgcagctgaaggagaagtactatgccatcgaggtggaccctgtgctgactgtggaggagaagtacccctacatggtggagtggtacaccaagagccacggcctgctggtgcagcaggccctgcccaaggccaagctgaaggagatcgtggccgagagtgatgtgatgctgaaggagggctatgagaacttctttgacaagctgcagcagcacagcatccctgtgttcatcttctctgctggcattggagatgtgctggaggaggtgatccggcaggccggcgtgtaccaccccaacgtgaaggtggtgagcaacttcatggactttgatgagaccggggtgctgaagggcttcaagggggagctgatccacgtgttcaacaagcatgatggagccctgaggaacacagagtacttcaaccagctgaaggacaacagcaacatcatcctgctgggggacagccagggcgacctgaggatggctgatggagtggccaacgtggagcacatcctgaagattggctacctgaatgacagagtggatgagctgctggagaagtacatggacagctatgacatcgtgctggtgcaggatgagagcctggaggtggccaacagcatcctgcagaagatcctgtag

SEQ ID NO: 142009 - DNA, 858 bp, synthetic construct
  misc_feature 1..858: note = Description of Artificial Sequence: Synthetic coding sequence
  source 1..858: mol_type = other DNA
atgcctgagttccagaagagctctgtgcgcatcaagaaccccaccagggtggaggagatcatctgtggcctcatcaagggcggggccgccaagctgcagatcatcacagactttgacatgaccctgagccgcttctcctacaagggcaagcgctgccccacctgccacaacatcatcgacaactgcaagctggtgacagatgagtgcaggaagaagctgctgcagctgaaggagaagtactatgccatcgaggtggaccctgtgctgactgtggaggagaagtacccctacatggtggagtggtacaccaagagccacggcctgctggtgcagcaggccctgcccaaggccaagctgaaggagatcgtggccgagagtgatgtgatgctgaaggagggctatgagaacttctttgacaagctgcagcagcacagcatccctgtgttcatcttctctgctggcattggagatgtgctggaggaggtgatccggcaggccggcgtgtaccaccccaacgtgaaggtggtgagcaacttcatggactttgatgaaacaggagtgctgaagggcttcaagggggagctgattcatgtgttcaacaagcatgatggagccctgaggaacacagagtacttcaaccagctgaaggacaacagcaacatcatcctgctgggggacagccagggcgacctgaggatggctgatggagtggccaacgtggagcacatcctgaagattggctacctgaatgacagagtggatgagctgctggagaagtacatggacagctatgacatcgtgctggtgcaggatgagagcctggaggtggccaacagcatcctgcagaagatcctgtag

SEQ ID NO: 142010 - DNA, 894 bp, synthetic construct
  misc_feature 1..894: note = Description of Artificial Sequence: Synthetic coding sequence
  source 1..894: mol_type = other DNA
atgaccaaccaggagagcgctgtgcacgtgaagatgatgcctgagttccagaagagctctgtgcgcatcaagaaccccaccagggtggaggagatcatctgtggcctcatcaagggcggggccgccaagctgcagatcatcacagactttgacatgaccctgagccgcttctcctacaagggcaagcgctgccccacctgccacaacatcatcgacaactgcaagctggtgacagatgagtgcaggaagaagctgctgcagctgaaggagaagtactatgccatcgaggtggaccctgtgctgactgtggaggagaagtacccctacatggtggagtggtacaccaagagccacggcctgctggtgcagcaggccctgcccaaggccaagctgaaggagatcgtggccgagagtgatgtgatgctgaaggagggctatgagaacttctttgacaagctgcagcagcacagcatccctgtgttcatcttctctgctggcattggagatgtgctggaggaggtgatccggcaggccggcgtgtaccaccccaacgtgaaggtggtgagcaacttcatggactttgatgaaacaggagtgctgaagggcttcaagggggagctgattcatgtgttcaacaagcatgatggagccctgaggaacacagagtacttcaaccagctgaaggacaacagcaacatcatcctgctgggggacagccagggcgacctgaggatggctgatggagtggccaacgtggagcacatcctgaagattggctacctgaatgacagagtggatgagctgctggagaagtacatggacagctatgacatcgtgctggtgcaggatgagagcctggaggtggccaacagcatcctgcagaagatcctgtag

SEQ ID NO: 142011 - DNA, 894 bp, synthetic construct; identical to SEQ ID NO: 142010
  misc_feature 1..894: note = Description of Artificial Sequence: Synthetic coding sequence
  source 1..894: mol_type = other DNA

SEQ ID NO: 142012 - DNA, 858 bp, synthetic construct; identical to SEQ ID NO: 142009
  misc_feature 1..858: note = Description of Artificial Sequence: Synthetic coding sequence
  source 1..858: mol_type = other DNA

SEQ ID NO: 142013 - DNA, 129 bp, synthetic construct
  misc_feature 1..129: note = Description of Artificial Sequence: Synthetic coding sequence
  source 1..129: mol_type = other DNA
atgcctgagttccagaagagctctgtgcgcatcaagaaccccaccagggtggaggagatcatctgtggcctcatcaagggcggggccgccaagctgcagatcatcacagactttgacatgaccctgtag

SEQ ID NO: 142014 - DNA, 1725 bp, synthetic construct
  misc_feature 1..1725: note = Description of Artificial Sequence: Synthetic coding sequence
  source 1..1725: mol_type = other DNA
atgtgccccagggctgcccgggccccagccaccctgctgctggccctgggcgctgtgctgtggccagctgctggggcctgggagctgaccatcctgcacaccaatgatgtgcacagccggctggagcagaccagcgaggacagcagcaaatgtgtgaatgccagccgctgcatgggcggcgtggcccggctcttcaccaaggtgcagcagatccggcgggcagagcccaacgtgctgctgctggatgctggggaccagtaccagggcaccatctggttcaccgtgtacaagggagctgaggtggcccacttcatgaatgccctgcgctatgatgccatggccctgggcaaccacgagtttgacaacggggtggagggcctcatcgagcccctgctgaaggaggccaagttccccatcctgagcgccaacatcaaggccaagggccccctggccagccagatcagcggcctgtacctgccctacaaggtgctgcctgtgggagatgaggtggtgggcatcgtgggctacaccagcaaggagacccccttcctgagcaaccctggcaccaacctggtgtttgaagatgagatcacagccctgcagcctgaggtggacaagctgaagaccctgaatgtgaacaagatcatcgccctgggccacagcggctttgagatggacaagctgattgcccagaaggtgcggggcgtggatgtggtggtgggcggccacagcaacaccttcctgtacacaggcaacccccccagcaaggaggtgcctgctgggaagtaccccttcatcgtgaccagtgatgatggcaggaaggtgcctgtggtgcaggcctatgccttcggcaagtacctgggctacctgaagattgaatttgatgaaagaggaaatgtcatcagcagccacggcaaccccatcctgctgaacagcagcatccctgaggaccccagcatcaaggctgacatcaacaagtggaggatcaagctggacaactacagcacccaggagctgggcaagaccatcgtgtacctggatggcagcagccagagctgccgcttccgggagtgcaacatgggcaacctgatctgtgatgccatgatcaacaacaacctgcggcacacagatgagatgttctggaaccacgtgtccatgtgcatcctgaatggaggcggcatccgcagccccattgatgaaagaaataatggcaccatcacctgggagaacctggccgctgtgctgccctttggaggcacctttgacctggtgcagctgaagggcagcaccctgaagaaggcctttgagcacagcgtgcacagatatggccagagcactggagagttcctgcaggtgggcggcatccacgtggtgtatgacctgagcaggaagccaggggacagagtggtgaagctggatgtgctgtgcaccaagtgccgggtgcccagctatgaccccctgaagatggatgaggtgtacaaggtgatcctgcccaacttcctggccaatggaggagatggcttccagatgatcaaggatgagctgctgcggcatgacagcggggaccaggacatcaacgtggtgtccacctacatcagcaagatgaaggtgatctacccagctgtggagggccgcatcaagttcagcacaggcagccactgccacggcagcttcagcctcatcttcctgagcctgtgggccgtcatctttgtgctgtaccagtag

SEQ ID NO: 142015 - DNA, 795 bp, synthetic construct
  misc_feature 1..795: note = Description of Artificial Sequence: Synthetic coding sequence
  source 1..795: mol_type = other DNA
atgtgccccagggctgcccgggccccagccaccctgctgctggccctgggcgctgtgctgtggccagctgctggggcctgggagctgaccatcctgcacaccaatgatgtgcacagccggctggagcagaccagcgaggacagcagcaaatgtgtgaatgccagccgctgcatgggcggcgtggcccggctcttcaccaaggtgcagcagatccggcgggcagagcccaacgtgctgctgctggatgctggggaccagtaccagggcaccatctggttcaccgtgtacaagggagctgaggtggcccacttcatgaatgccctgcgctatgatgccatggccctgggcaaccacgagtttgacaacggggtggagggcctcatcgagcccctgctgaaggaggccaagttccccatcctgagcgccaacatcaaggccaagggccccctggccagccagatcagcggcctgtacctgccctacaaggtgctgcctgtgggagatgaggtggtgggcatcgtgggctacaccagcaaggagacccccttcctgagcaaccctggcaccaacctggtgtttgaagatgagatcacagccctgcagcctgaggtggacaagctgaagaccctgaatgtgaacaagatcatcgccctgggccacagcggctttgagatggacaagctgattgcccagaaggtgcggggcgtggatgtggtggtgggcggccacagcaacaccttcctgtacacaggcaactgcttcaagagaattgcctgggccaggatgagcaggtag

SEQ ID NO: 142016 - DNA, 780 bp, synthetic construct
  misc_feature 1..780: note = Description of Artificial Sequence: Synthetic coding sequence
  source 1..780: mol_type = other DNA
atggacaagctgattgcccagaaggtgcggggcgtggatgtggtggtgggcggccacagcaacaccttcctgtacacaggcaacccccccagcaaggaggtgcctgctgggaagtaccccttcatcgtgaccagtgatgatggcaggaaggtgcctgtggtgcaggcctatgccttcggcaagtacctgggctacctgaagattgaatttgatgaaagaggaaatgtcatcagcagccacggcaaccccatcctgctgaacagcagcatccctgaggaccccagcatcaaggctgacatcaacaagtggaggatcaagctggacaactacagcacccaggagctgggcaagaccatcgtgtacctggatggcagcagccagagctgccgcttccgggagtgcaacatgggcaacctgatctgtgatgccatgatcaacaacaacctgcggcacacagatgagatgttctggaaccacgtgtccatgtgcatcctgaatggaggcggcatccgcagccccattgatgaaagaaataatggcaccatcacctgggagaacctggccgctgtgctgccctttggaggcacctttgacctggtgcagctgaagggcagcaccctgaagaaggcctttgagcacagcgtgcacagatatggccagagcactggagagttcctgcaggtgggggacctgaaggagtgctgccccatctgcatcaaccaggatgacagctggaaggagcagcccacagcccagacctacctgaacacctggttctag

SEQ ID NO: 142017 - DNA, 1575 bp, synthetic construct
  misc_feature 1..1575: note = Description of Artificial Sequence: Synthetic coding sequence
  source 1..1575: mol_type = other DNA
atgtgccccagggctgcccgggccccagccaccctgctgctggccctgggcgctgtgctgtggccagctgctggggcctgggagctgaccatcctgcacaccaatgatgtgcacagccggctggagcagaccagcgaggacagcagcaaatgtgtgaatgccagccgctgcatgggcggcgtggcccggctcttcaccaaggtgcagcagatccggcgggcagagcccaacgtgctgctgctggatgctggggaccagtaccagggcaccatctggttcaccgtgtacaagggagctgaggtggcccacttcatgaatgccctgcgctatgatgccatggccctgggcaaccacgagtttgacaacggggtggagggcctcatcgagcccctgctgaaggaggccaagttccccatcctgagcgccaacatcaaggccaagggccccctggccagccagatcagcggcctgtacctgccctacaaggtgctgcctgtgggagatgaggtggtgggcatcgtgggctacaccagcaaggagacccccttcctgagcaaccctggcaccaacctggtgtttgaagatgagatcacagccctgcagcctgaggtggacaagctgaagaccctgaatgtgaacaagatcatcgccctgggccacagcggctttgagatggacaagctgattgcccagaaggtgcggggcgtggatgtggtggtgggcggccacagcaacaccttcctgtacacaggcaacccccccagcaaggaggtgcctgctgggaagtaccccttcatcgtgaccagtgatgatggcaggaaggtgcctgtggtgcaggcctatgccttcggcaagtacctgggctacctgaagattgaatttgatgaaagaggaaatgtcatcagcagccacggcaaccccatcctgctgaacagcagcatccctgaggaccccagcatcaaggctgacatcaacaagtggaggatcaagctggacaactacagcacccaggagctgggcaagaccatcgtgtacctggatggcagcagccagagctgccgcttccgggagtgcaacatgggcaacctgatctgtgatgccatgatcaacaacaacctgcggcacacagatgagatgttctggaaccacgtgtccatgtgcatcctgaatggaggcggcatccgcagccccattgatgaaagaaataatggcatccacgtggtgtatgacctgagcaggaagccaggggacagagtggtgaagctggatgtgctgtgcaccaagtgccgggtgcccagctatgaccccctgaagatggatgaggtgtacaaggtgatcctgcccaacttcctggccaatggaggagatggcttccagatgatcaaggatgagctgctgcggcatgacagcggggaccaggacatcaacgtggtgtccacctacatcagcaagatgaaggtgatctacccagctgtggagggccgcatcaagttcagcacaggcagccactgccacggcagcttcagcctcatcttcctgagcctgtgggccgtcatctttgtgctgtaccagtag

SEQ ID NO: 142018 - DNA, 693 bp, synthetic construct
  misc_feature 1..693: note = Description of Artificial Sequence: Synthetic coding sequence
  source 1..693: mol_type = other DNA
tgagatgtggtggtgggcggccacagcaacaccttcctgtacacaggcaacccccccagcaaggaggtgcctgctgggaagtaccccttcatcgtgaccagtgatgatggcaggaaggtgcctgtggtgcaggcctatgccttcggcaagtacctgggctacctgaagattgaatttgatgaaagaggaaatgtcatcagcagccacggcaaccccatcctgctgaacagcagcatccctgaggaccccagcatcaaggctgacatcaacaagtggaggatcaagctggacaactacagcacccaggagctgggcaagaccatcgtgtacctggatggcagcagccagagctgccgcttccgggagtgcaacatgggcaacctgatctgtgatgccatgatcaacaacaacctgcggcacacagatgagatgttctggaaccacgtgtccatgtgcatcctgaatggaggcggcatccgcagccccattgatgagaggaacaacggcatccacgtggtgtatgacctgagcaggaagccaggggacagagtggtgaagctggatgtgctgtgcaccaagtgccgggtgcccagctatgaccccctgaagatggatgaggtgtacaaggtgatcctgcccaacttcctggccaatggaggagatggcttccagatgatcaaggatgagctgtag

SEQ ID NO: 142019 - DNA, 540 bp, synthetic construct
  misc_feature 1..540: note = Description of Artificial Sequence: Synthetic coding sequence
  source 1..540: mol_type = other DNA
tgaaaccccatcctgctgaacagcagcatccctgaggaccccagcatcaaggctgacatcaacaagtggaggatcaagctggacaactacagcacccaggagctgggcaagaccatcgtgtacctggatggcagcagccagagctgccgcttccgggagtgcaacatgggcaacctgatctgtgatgccatgatcaacaacaacctgcggcacacagatgagatgttctggaaccacgtgtccatgtgcatcctgaatggaggcggcatccgcagccccattgatgaaagaaataatggcaccatcacctgggagaacctggccgctgtgctgccctttggaggcacctttgacctggtgcagctgaagggcagcaccctgaagaaggcctttgagcacagcgtgcacagatatggccagagcactggagagttcctgcaggtgggggacctgaaggagtgctgccccatctgcatcaaccaggatgacagctggaaggagcagcccacagcccagacctacctgaacacctggttctag

SEQ ID NO: 142020 - DNA, 687 bp, synthetic construct
  misc_feature 1..687: note = Description of Artificial Sequence: Synthetic coding sequence
  source 1..687: mol_type = other DNA
atggtgcgctacagcctggaccctgagaaccccaccaagagctgcaagagccggggcagcaacctgcgggtgcacttcaagaacacccgggagacagcccaggccatcaagggcatgcacatcaggaaggccaccaagtacctgaaggatgtgaccctgcagaagcagtgtgtgcccttccgccgctacaacggcggcgtgggccgctgtgcccaggccaagcagtggggctggacccagggccgctggcccaagaagtctgctgagttcctgctgcacatgctgaagaatgctgagagcaatgctgagctgaagggcctggatgtggacagcctggtgattgagcacatccaggtgaacaaggcccccaagatgagaagaaggacctaccgggcccacggccgcatcaacccctacatgagcagcccctgccacatcgagatgatcctgacagagaaggagcagatcgtgcccaagccagaggaggaggtggcccagaagaagaagctgcggagcagcagcctgggcaagtggtgtgccttcctggtgtcctccttccagttctgcagcggcagcaccaagaacagctggagccacatctacaccctgtggttcccccccagcctggtggtgtatggcctgaggaagcagtacaagaaccccatgatccagaccaaggccaagtag

SEQ ID NO: 142021 - DNA, 816 bp, synthetic construct
  misc_feature 1..816: note = Description of Artificial Sequence: Synthetic coding sequence
  source 1..816: mol_type = other DNA
atgagccctgagatgggagagctgacccagacccggctgcagaagatctggatcccccacagcagcggcagcagccggctgcagaggcggcggggcagcagcatcccccagttcaccaacagccccaccatggtgatcatggtgggcctgcctgcccggggcaagacctacatcagcaccaagctgacccgctacctgaactggattggcacccccaccaaggacaacatggaggccctgcagatcaggaagcagtgtgccctggccgccctgaaggatgtgcacaactacctgagccatgaggagggccacgtggccgtgtttgatgccaccaacaccacccgggagaggaggagcctcatcctgcagtttgccaaggagcacggctacaagggcgtgtgtgaggagatgacctatgaggagatccaggagcactacccagaggagtttgccctgcgggaccaggacaagtaccgctaccgctaccccaagggggagagctatgaggacctggtgcagaggctggagcctgtgatcatggagctggagcggcaggagaatgtgctggtgatctgccaccaggccgtgatgcgctgcctgctggcctacttcctggacaagagcagtgatgagctgccctacctgaagtgccccctgcacacagtgctgaagctgacccctgtggcctacggctgcaaggtggagagcatctacctgaatgtggaggccgtgaacacccaccgggagaagccagaaaatgtggacatcacccgggagcctgaggaggccctggacacagtgcctgcccactactag

SEQ ID NO: 142022 - DNA, 1416 bp, synthetic construct
  misc_feature 1..1416: note = Description of Artificial Sequence: Synthetic coding sequence
  source 1..1416: mol_type = other DNA
atgagccctgagatgggagagctgacccagacccggctgcagaagatctggatcccccacagcagcggcagcagccggctgcagaggcggcggggcagcagcatcccccagttcaccaacagccccaccatggtgatcatggtgggcctgcctgcccggggcaagacctacatcagcaccaagctgacccgctacctgaactggattggcacccccaccaaggtgttcaacctgggccagtaccgccgggaggccgtgtcctacaagaactatgagttcttcctgcctgacaacatggaggccctgcagatcaggaagcagtgtgccctggccgccctgaaggatgtgcacaactacctgagccatgaggagggccacgtggccgtgtttgatgccaccaacaccacccgggagaggaggagcctcatcctgcagtttgccaaggagcacggctacaaggtgttcttcatcgagagcatctgcaatgaccccggcatcatcgccgagaacatccggcaggtgaagctgggcagcccagactacatcgactgtgaccgggagaaggtgctggaggacttcctgaagagaattgagtgctatgaggtgaactaccagcccctggatgaggagctggacagccacctgagctacatcaagatctttgatgtgggcacccgctacatggtgaacagagtgcaggaccacatccagagcaggacagtgtactacctgatgaacatccacgtgacccccaggagcatctacctgtgcagacatggagagagcgagctgaacatccggggccgcatcggcggggacagcggcctgtctgtgcggggcaagcagtatgcctatgccctggccaacttcatccagagccagggcatcagcagcctgaaggtgtggaccagccacatgaagaggaccatccagacagctgaggccctgggcgtgccctatgagcagtggaaggccctgaatgaaattgatgctggggtgtgtgaggagatgacctatgaggagatccaggagcactacccagaggagtttgccctgcgggaccaggacaagtaccgctaccgctaccccaagggggagagctatgaggacctggtgcagaggctggagcctgtgatcatggagctggagcggcaggagaatgtgctggtgatctgccaccaggccgtgatgcgctgcctgctggcctacttcctggacaagagcagtgatgagctgccctacctgaagtgccccctgcacacagtgctgaagctgacccctgtggcctacggctgcaaggtggagagcatctacctgaatgtggaggccgtgaacacccaccgggagaagccagaaaatgtggacatcacccgggagcctgaggaggccctggacacagtgcctgcccactactag

SEQ ID NO: 142023 - DNA, 1221 bp, synthetic construct
  misc_feature 1..1221: note = Description of Artificial Sequence: Synthetic coding sequence
  source 1..1221: mol_type = other DNA
atggaggagaagaccagccgcatcaaggtgttcaacctgggccagtacagaagagaggccgtgtcctacaagaactatgagttcttcctgcctgacaacatggaggccctgcagatcaggaagcagtgtgccctggccgccctgaaggatgtgcacaactacctgagccatgaggagggccacgtggccgtgtttgatgccaccaacaccacccgggagcggcgcagcctcatcctgcagtttgccaaggagcacggctacaaggtgttcttcatcgagagcatctgcaatgaccccggcatcatcgccgagaacatccggcaggtgaagctgggcagcccagactacatcgactgtgaccgggagaaggtgctggaggacttcctgaagagaattgaatgttatgaggtgaactaccagcccctggatgaggagctggacagccacctgagctacatcaagatctttgatgtgggcacccgctacatggtgaacagagtgcaggaccacatccagagcaggacagtgtactacctgatgaacatccacgtgacccccaggagcatctacctgtgccgccacggggagagcgagctgaacatccggggcagaattggaggagacagcggcctgtctgtgcggggcaagcagtatgcctatgccctggccaacttcatccagagccagggcatcagcagcctgaaggtgtggaccagccacatgaagaggaccatccagacagctgaggccctgggcgtgccctatgagcagtggaaggccctgaatgaaattgatgctggggtgtgtgaggagatgacctatgaggagatccaggagcactacccagaggagtttgccctgcgggaccaggacaagtaccgctaccgctaccccaagggggagagctatgaggacctggtgcagaggctggagcccgtcatcatggagctggagcggcaggagaatgtgctggtgatctgccaccaggccgtgatgcgctgcctgctggcctacttcctggacaagagcagtgatgagctgccctacctgaagtgccccctgcacacagtgctgaagctgacccctgtggcctacggctgcaaggtggagagcatctacctgaatgtggaggccgtgaacacccaccgggagaagccagaaaatgtggacatcacccgggagcctgaggaggccctggacacagtgcctgcccactactag

SEQ ID NO: 142024 - DNA, 1416 bp, synthetic construct
  misc_feature 1..1416: note = Description of Artificial Sequence: Synthetic coding sequence
  source 1..1416: mol_type = other DNA
atgtctggggccagcagcagcgagcagaacaacaacagctatgagaccaagacccccaacctgaggatgtctgagaagaagtgctcctgggccagctacatgaccaacagccccaccctgattgtgatgattggcctgcctgcccggggcaagacctacgtgtccaagaagctgacccgctacctgaactggattggagtgcccaccaaggtgttcaacctgggcgtgtaccgccgggaggccgtgaagagctacaagagctatgacttcttcagacatgacaatgaggaggccatgaagatcaggaagcagtgtgccctggtggccctggaggatgtgaaggcctacctgacagaggagaatggccagattgctgtgtttgatgccaccaacaccacccgggagcggcgggacatgatcctgaactttgctgagcagaacagcttcaaggtgttctttgtggagagcgtgtgtgatgatcctgatgtgattgctgccaacatcctggaggtgaaggtgagcagcccagactacccagagaggaaccgggagaatgtgatggaggacttcctgaagagaattgagtgctacaaggtgacctaccggcccctggaccctgacaactatgacaaggacctgtccttcatcaaggtgatcaacgtgggccagcgcttcctggtgaacagagtgcaggactacatccagagcaagatcgtgtactacctgatgaacatccacgtgcagcccaggaccatctacctgtgcagacatggagagagcgagttcaacctgctgggcaagattggaggagacagcggcctgtctgtgcggggcaagcagtttgcccaggccctgaggaagttcctggaggagcaggagatcacagacctgaaggtgtggaccagccagctgaagaggaccatccagacagctgagagcctgggcgtgccctatgagcagtggaagatcctgaatgaaattgatgctggggtgtgtgaggagatgacctacgccgagattgagaagcgctacccagaggagtttgccctgcgggaccaggagaagtacctgtaccgctacccaggaggagagagctaccaggacctggtgcagaggctggagcctgtgatcatggagctggagcggcagggcaatgtgctggtgatcagccaccaggccgtgatgcgctgcctgctggcctacttcctggacaagggagcagatgagctgccctacctgcgctgccccctgcacaccatcttcaagctgacccctgtggcctacggctgcaaggtggagaccatcaagctgaatgtggaggccgtgaacacccaccgggacaagcccacagctgctgagaccaccctggccgtgagaagaagaccttctgctgccagcctgatgctgccctgctag

SEQ ID NO: 142025 - DNA, 1518 bp, synthetic construct
  misc_feature 1..1518: note = Description of Artificial Sequence: Synthetic coding sequence
  source 1..1518: mol_type = other DNA
atgtctggggccagcagcagcgagcagaacaacaacagctatgagaccaagacccccaacctgaggatgtctgagaagaagtgctcctgggccagctacatgaccaacagccccaccctgattgtgatgattggcctgcctgcccggggcaagacctacgtgtccaagaagctgacccgctacctgaactggattggagtgcccaccaaggtgttcaacctgggcgtgtaccgccgggaggccgtgaagagctacaagagctatgacttcttcagacatgacaatgaggaggccatgaagatcaggaagcagtgtgccctggtggccctggaggatgtgaaggcctacctgacagaggagaatggccagattgctgtgtttgatgccaccaacaccacccgggagcggcgggacatgatcctgaactttgctgagcagaacagcttcaaggtgttctttgtggagagcgtgtgtgatgatcctgatgtgattgctgccaacatcctggaggtgaaggtgagcagcccagactacccagagaggaaccgggagaatgtgatggaggacttcctgaagagaattgagtgctacaaggtgacctaccggcccctggaccctgacaactatgacaaggacctgtccttcatcaaggtgatcaacgtgggccagcgcttcctggtgaacagagtgcaggactacatccagagcaagatcgtgtactacctgatgaacatccacgtgcagcccaggaccatctacctgtgcagacatggagagagcgagttcaacctgctgggcaagattggaggagacagcggcctgtctgtgcggggcaagcagtttgcccaggccctgaggaagttcctggaggagcaggagatcacagacctgaaggtgtggaccagccagctgaagaggaccatccagacagctgagagcctgggcgtgccctatgagcagtggaagatcctgaatgaaattgatgctggggtgtgtgaggagatgacctacgccgagattgagaagcgctacccagaggagtttgccctgcgggaccaggagaagtacctgtaccgctacccaggaggagagagctaccaggacctggtgcagaggctggagcctgtgatcatggagctggagcggcagggcaatgtgctggtgatcagccaccaggccgtgatgcgctgcctgctggcctacttcctggacaagggagcagatgagctgccctacctgcgctgccccctgcacaccatcttcaagctgacccctgtggcctacggctgcaaggtggagaccatcaagctgaatgtggaggccgtgaacacccaccgggacaagcccaccaacaacttccccaagaaccagacccctgtgaggatgagaagaaacagcttcacccccctgagcagcagcaacaccatcagaagacccaggaactacagcgtgggcagccggcccctgaagcccctgagccccctgcgggcccaggacatgcaggagggcgctgactag

SEQ ID NO: 142026 - DNA, 1122 bp, synthetic construct
  misc_feature 1..1122: note = Description of Artificial Sequence: Synthetic coding sequence
  source 1..1122: mol_type = other DNA
atgaagatcaggaagcagtgtgccctggtggccctggaggatgtgaaggcctacctgacagaggagaatggccagattgctgtgtttgatgccaccaacaccacccgggagcggcgggacatgatcctgaactttgctgagcagaacagcttcaaggtgttctttgtggagagcgtgtgtgatgatcctgatgtgattgctgccaacatcctggaggtgaaggtgagcagcccagactacccagagaggaaccgggagaatgtgatggaggacttcctgaagagaattgagtgctacaaggtgacctaccggcccctggaccctgacaactatgacaaggacctgtccttcatcaaggtgatcaacgtgggccagcgcttcctggtgaacagagtgcaggactacatccagagcaagatcgtgtactacctgatgaacatccacgtgcagcccaggaccatctacctgtgcagacatggagagagcgagttcaacctgctgggcaagattggaggagacagcggcctgtctgtgcggggcaagcagtttgcccaggccctgaggaagttcctggaggagcaggagatcacagacctgaaggtgtggaccagccagctgaagaggaccatccagacagctgagagcctgggcgtgccctatgagcagtggaagatcctgaatgaaattgatgctggggtgtgtgaggagatgacctacgccgagattgagaagcgctacccagaggagtttgccctgcgggaccaggagaagtacctgtaccgctacccaggaggagagagctaccaggacctggtgcagaggctggagcctgtgatcatggagctggagcggcagggcaatgtgctggtgatcagccaccaggccgtgatgcgctgcctgctggcctacttcctggacaagggagcagatgagctgccctacctgcgctgccccctgcacaccatcttcaagctgacccctgtggcctacggctgcaaggtggagaccatcaagctgaatgtggaggccgtgaacacccaccgggacaagcccacagctgctgagaccaccctggccgtgagaagaagaccttctgctgccagcctgatgctgccctgctag

SEQ ID NO: 142027 - DNA, 795 bp, synthetic construct
  misc_feature 1..795: note = Description of Artificial Sequence: Synthetic coding sequence
  source 1..795: mol_type = other DNA
atggaggacttcctgaagagaattgagtgctacaaggtgacctaccggcccctggaccctgacaactatgacaaggacctgtccttcatcaaggtgatcaacgtgggccagcgcttcctggtgaacagagtgcaggactacatccagagcaagatcgtgtactacctgatgaacatccacgtgcagcccaggaccatctacctgtgcagacatggagagagcgagttcaacctgctgggcaagattggaggagacagcggcctgtctgtgcggggcaagcagtttgcccaggccctgaggaagttcctggaggagcaggagatcacagacctgaaggtgtggaccagccagctgaagaggaccatccagacagctgagagcctgggcgtgccctatgagcagtggaagatcctgaatgaaattgatgctggggtgtgtgaggagatgacctacgccgagattgagaagcgctacccagaggagtttgccctgcgggaccaggagaagtacctgtaccgctacccaggaggagagagctaccaggacctggtgcagaggctggagcctgtgatcatggagctggagcggcagggcaatgtgctggtgatcagccaccaggccgtgatgcgctgcctgctggcctacttcctggacaagggagctggctgcaaggtggagaccatcaagctgaatgtggaggccgtgaacacccaccgggacaagcccacagctgctgagaccaccctggccgtgagaagaagacccagcgctgccagcctgatgctgccctgctag

SEQ ID NO: 142028 - DNA, 1419 bp, synthetic construct
  misc_feature 1..1419: note = Description of Artificial Sequence: Synthetic coding sequence
  source 1..1419: mol_type = other DNA
atgaccaacagccccaccctcatcgtgatgattggcctgcctgcccggggcaagacctacgtgtccaagaagctgacccgctacctgaactggattggagtgcccaccaaggtgttcaacctgggcgtgtacagaagagaggccgtgaagagctacaagagctatgacttcttcagacatgacaatgaggaggccatgaagatcaggaagcagtgtgccctggtggccctggaggatgtgaaggcctacctgacagaagaaaatggccagattgctgtgtttgatgccaccaacaccacccgggagcggcgggacatgatcctgaactttgctgagcagaacagcttcaaggtgttctttgtggagagcgtgtgtgatgatcctgatgtgattgctgccaacatcctggaggtgaaggtgagcagcccagactacccagagaggaacagagaaaatgtgatggaggacttcctgaagagaattgagtgctacaaggtgacctaccggcccctggaccctgacaactatgacaaggacctgtccttcatcaaggtgatcaacgtgggccagcgcttcctggtgaacagagtgcaggactacatccagagcaagatcgtgtactacctgatgaacatccacgtgcagcccaggaccatctacctgtgccgccacggggagagcgagttcaacctgctgggcaagattggaggagacagcggcctgtctgtgcggggcaagcagtttgcccaggccctgaggaagttcctggaggagcaggagatcacagacctgaaggtgtggaccagccagctgaagaggaccatccagacagctgagagcctgggcgtgccctatgagcagtggaagatcctgaatgaaattgatgctggggtgtgtgaggagatgacctatgcagaaattgagaagcgctacccagaggagtttgccctgcgggaccaggagaagtacctgtaccgctacccaggaggagagagctaccaggacctggtgcagaggctggagcccgtcatcatggagctggagcggcagggcaatgtgctggtgatcagccaccaggccgtgatgcgctgcctgctggcctacttcctggacaagggagcagatgagctgccctacctgcgctgccccctgcacaccatcttcaagctgacccctgtggcctacggctgcaaggtggagaccatcaagctgaatgtggaggccgtgaacacccaccgggacaagcccaccaacaacttccccaagaaccagacccctgtgaggatgagaagaaattccttcacccccctgagcagcagcaacaccatccggcggcccaggaactacagcgtgggcagccggcccctgaagcccctgagccccctgcgggcccaggacatgcaggagggcgctgactag

SEQ ID NO: 142029 - DNA, 1542 bp, synthetic construct
  misc_feature 1..1542: note = Description of Artificial Sequence: Synthetic coding sequence
  source 1..1542: mol_type = other DNA
atgcccctggagctgacccagagccgggtgcagaagatctgggtgcctgtggaccaccggcccagcctgcccaggagctgtggccccaagctgaccaacagccccaccgtcatcgtgatggtgggcctgcctgcccggggcaagacctacatcagcaagaagctgacccgctacctgaactggattggagtgcccaccaaggtgttcaacgtgggggagtacagaagagaggccgtgaagcagtacagcagctacaacttcttccggccagacaatgaggaggccatgaaggtgaggaagcagtgtgccctggccgccctgagagatgtgaagagctacctggccaaggagggcggccagattgctgtgtttgatgccaccaacaccacccgggagaggaggcacatgatcctgcactttgccaaggaaaatgacttcaaggccttcttcattgaatctgtgtgtgatgaccccaccgtggtggccagcaacatcatggaggtgaagatcagcagcccagactacaaggactgcaacagcgctgaggccatggatgacttcatgaagaggatcagctgctatgaggccagctaccagcccctggaccctgacaagtgtgaccgggacctgagcctcatcaaggtgattgatgtgggccgccgcttcctggtgaacagagtgcaggaccacatccagagcagaattgtgtactacctgatgaacatccacgtgcagcccaggaccatctacctgtgccgccacggggagaatgagcacaacctgcagggcagaattggaggagacagcggcctgagcagccggggcaagaagtttgccagcgccctgagcaagtttgtggaggagcagaacctgaaggacctgcgggtgtggaccagccagctgaagagcaccatccagacagctgaggccctgcggctgccctatgagcagtggaaggccctgaatgaaattgatgctggggtgtgtgaggagctgacctatgaggagatccgggacacctacccagaggagtatgccctgcgggagcaggacaagtactactaccgctaccccactggagagagctaccaggacctggtgcagaggctggagcccgtcatcatggagctggagcggcaggagaatgtgctggtgatctgccaccaggccgtgctgcgctgcctgctggcctacttcctggacaagtctgctgaggagatgccctacctgaagtgccccctgcacacagtgctgaagctgacccctgtggcctacggctgccgggtggagagcatctacctgaatgtggagagcgtgtgcacccaccgggagaggagtgaagatgccaagaagggccccaaccccctgatgagaagaaattctgtgacccccctggccagccctgagcccaccaagaagccccgcatcaacagctttgaggagcacgtggccagcaccagcgctgccctgcccagctgcctgcccccagaggtgcccacccagctgcccggccagcccctgctgggccaggcctgcctgtag

SEQ ID NO: 142030 - DNA, 1545 bp, synthetic construct
  misc_feature 1..1545: note = Description of Artificial Sequence: Synthetic coding sequence
  source 1..1545: mol_type = other DNA
atgcccctggagctgacccagagccgggtgcagaagatctgggtgcctgtggaccaccggcccagcctgcccaggagctgtggccccaagctgaccaacagccccaccgtcatcgtgatggtgggcctgcctgcccggggcaagacctacatcagcaagaagctgacccgctacctgaactggattggagtgcccaccaaggtgttcaacgtgggggagtacagaagagaggccgtgaagcagtacagcagctacaacttcttccggccagacaatgaggaggccatgaaggtgaggaagcagtgtgccctggccgccctgagagatgtgaagagctacctggccaaggagggcggccagattgctgtgtttgatgccaccaacaccacccgggagaggaggcacatgatcctgcactttgccaaggaaaatgacttcaaggccttcttcattgaatctgtgtgtgatgaccccaccgtggtggccagcaacatcatggaggtgaagatcagcagcccagactacaaggactgcaacagcgctgaggccatggatgacttcatgaagaggatcagctgctatgaggccagctaccagcccctggaccctgacaagtgtgaccgggacctgagcctcatcaaggtgattgatgtgggccgccgcttcctggtgaacagagtgcaggaccacatccagagcagaattgtgtactacctgatgaacatccacgtgcagcccaggaccatctacctgtgccgccacggggagaatgagcacaacctgcagggcagaattggaggagacagcggcctgagcagccggggcaagaagtttgccagcgccctgagcaagtttgtggaggagcagaacctgaaggacctgcgggtgtggaccagccagctgaagagcaccatccagacagctgaggccctgcggctgccctatgagcagtggaaggccctgaatgaaattgatgctggggtgtgtgaggagctgacctatgaggagatccgggacacctacccagaggagtatgccctgcgggagcaggacaagtactactaccgctaccccactggagagagctaccaggacctggtgcagaggctggagcccgtcatcatggagctggagcggcaggagaatgtgctggtgatctgccaccaggccgtgctgcgctgcctgctggcctacttcctggacaagtctgctgaggagatgccctacctgaagtgccccctgcacacagtgctgaagctgacccctgtggcctacggctgccgggtggagagcatctacctgaatgtggagagcgtgtgcacccaccgggagaggagtgaagatgccaagaagggccccaaccccctgatgagaagaaattctgtgacccccctggccagccctgagcccaccaagaagccccgcatcaacagctttgaggagcacgtggccagcaccagcgctgccctgcccagctgcctgcccccagaggtgcccacccagctgcccggccagcccctgctgggccaggcctgcctgacctag

SEQ ID NO: 142031 - DNA, 1545 bp, synthetic construct; identical to SEQ ID NO: 142030
  misc_feature 1..1545: note = Description of Artificial Sequence: Synthetic coding sequence
  source 1..1545: mol_type = other DNA

SEQ ID NO: 142032 - DNA, 1563 bp, synthetic construct
  misc_feature 1..1563: note = Description of Artificial Sequence: Synthetic coding sequence
  source 1..1563: mol_type = other DNA
atgcccctggagctgacccagagccgggtgcagaagatctgggtgcctgtggaccaccggcccagcctgcccaggagctgtggccccaagctgaccaacagccccaccgtcatcgtgatggtgggcctgcctgcccggggcaagacctacatcagcaagaagctgacccgctacctgaactggattggagtgcccaccaaggtgttcaacgtgggggagtacagaagagaggccgtgaagcagtacagcagctacaacttcttccggccagacaatgaggaggccatgaaggtgaggaagcagtgtgccctggccgccctgagagatgtgaagagctacctggccaaggagggcggccagattgctgtgtttgatgccaccaacaccacccgggagaggaggcacatgatcctgcactttgccaaggaaaatgacttcaaggccttcttcattgaatctgtgtgtgatgaccccaccgtggtggccagcaacatcatggaggtgaagatcagcagcccagactacaaggactgcaacagcgctgaggccatggatgacttcatgaagaggatcagctgctatgaggccagctaccagcccctggaccctgacaagtgtgaccgggacctgagcctcatcaaggtgattgatgtgggccgccgcttcctggtgaacagagtgcaggaccacatccagagcagaattgtgtactacctgatgaacatccacgtgcagcccaggaccatctacctgtgccgccacggggagaatgagcacaacctgcagggcagaattggaggagacagcggcctgagcagccggggcaagaagtttgccagcgccctgagcaagtttgtggaggagcagaacctgaaggacctgcgggtgtggaccagccagctgaagagcaccatccagacagctgaggccctgcggctgccctatgagcagtggaaggccctgaatgaaattgatgctggggtgtgtgaggagctgacctatgaggagatccgggacacctacccagaggagtatgccctgcgggagcaggacaagtactactaccgctaccccactggagagagctaccaggacctggtgcagaggctggagcccgtcatcatggagctggagcggcaggagaatgtgctggtgatctgccaccaggccgtgctgcgctgcctgctggcctacttcctggacaagtctgctgaggagatgccctacctgaagtgccccctgcacacagtgctgaagctgacccctgtggcctacggctgccgggtggagagcatctacctgaatgtggagagcgtgtgcacccaccgggagaggagtgaagatgccaagaagggccccaaccccctgatgagaagaaattctgtgacccccctggccagccctgagcccaccaagaagccccgcatcaacagctttgaggagcacgtggccagcaccagcgctgccctgcccagctgcctgcccccagaggtgcccacccagctgcccggccagaacatgaagggcagccgcagcagcgctgacagcagcaggaagcactag

SEQ ID NO: 142033 - DNA, 354 bp, synthetic construct
  misc_feature 1..354: note = Description of Artificial Sequence: Synthetic coding sequence
  source 1..354: mol_type = other DNA
atgccctacctgaagtgccccctgcacacagtgctgaagctgacccctgtggcctacggctgccgggtggagagcatctacctgaatgtggagagcgtgtgcacccaccgggagaggagtgaagatgccaagaagggccccaaccccctgatgagaagaaattctgtgacccccctggccagccctgagcccaccaagaagccccgcatcaacagctttgaggagcacgtggccagcaccagcgctgccctgcccagctgcctgcccccagaggtgcccacccagctgcccggccagcccctgctgggccaggcctgcctgaactggaagggcgtgatgagaaatgctgcctag

SEQ ID NO: 142034 - DNA, 1581 bp, synthetic construct
  misc_feature 1..1581: note = Description of Artificial Sequence: Synthetic coding sequence
  source 1..1581: mol_type = other DNA
atgcccctggagctgacccagagccgggtgcagaagatctgggtgcctgtggaccaccggcccagcctgcccaggagctgtggccccaagctgaccaacagccccaccgtcatcgtgatggtgggcctgcctgcccggggcaagacctacatcagcaagaagctgacccgctacctgaactggattggagtgcccaccaaggtgttcaacgtgggggagtacagaagagaggccgtgaagcagtacagcagctacaacttcttccggccagacaatgaggaggccatgaaggtgaggaagcagtgtgccctggccgccctgagagatgtgaagagctacctggccaaggagggcggccagattgctgtgtttgatgccaccaacaccacccgggagaggaggcacatgatcctgcactttgccaaggaaaatgacttcaaggccttcttcattgaatctgtgtgtgatgaccccaccgtggtggccagcaacatcatggaggtgaagatcagcagcccagactacaaggactgcaacagcgctgaggccatggatgacttcatgaagaggatcagctgctatgaggccagctaccagcccctggaccctgacaagtgtgaccgggacctgagcctcatcaaggtgattgatgtgggccgccgcttcctggtgaacagagtgcaggaccacatccagagcagaattgtgtactacctgatgaacatccacgtgcagcccaggaccatctacctgtgccgccacggggagaatgagcacaacctgcagggcagaattggaggagacagcggcctgagcagccggggcaagaagtttgccagcgccctgagcaagtttgtggaggagcagaacctgaaggacctgcgggtgtggaccagccagctgaagagcaccatccagacagctgaggccctgcggctgccctatgagcagtggaaggccctgaatgaaattgatgctggggtgtgtgaggagctgacctatgaggagatccgggacacctacccagaggagtatgccctgcgggagcaggacaagtactactaccgctaccccactggagagagctaccaggacctggtgcagaggctggagcccgtcatcatggagctggagcggcaggagaatgtgctggtgatctgccaccaggccgtgctgcgctgcctgctggcctacttcctggacaagtctgctgaggagatgccctacctgaagtgccccctgcacacagtgctgaagctgacccctgtggcctacggctgccgggtggagagcatctacctgaatgtggagagcgtgtgcacccaccgggagaggagtgaagatgccaagaagggccccaaccccctgatgagaagaaattctgtgacccccctggccagccctgagcccaccaagaagccccgcatcaacagctttgaggagcacgtggccagcaccagcgctgccctgcccagctgcctgcccccagaggtgcccacccagctgcccggccagcccctgctgggccaggcctgcctgaggacagtgtgccacatcttcagcaagttcagcccctactag

SEQ ID NO: 142035 - DNA, 567 bp, synthetic construct
  misc_feature 1..567: note = Description of Artificial Sequence: Synthetic coding sequence
  source 1..567: mol_type = other DNA
atgaacatccacgtgcagcccaggaccatctacctgtgcagacatggagaaaatgagcacaacctgcagggccgcatcggcggggacagcggcctgagcagccggggcaagaagtttgccagcgccctgagcaagtttgtggaggagcagaacctgaaggacctgcgggtgtggaccagccagctgaagagcaccatccagacagctgaggccctgcggctgccctatgagcagtggaaggccctgaatgaaattgatgccagctaccaggacctggtgcagaggctggagcccgtcatcatggagctggagcggcaggagaatgtgctggtgatctgccaccaggccgtgctgcgctgcctgctggcctacttcctggacaagtctgctgaggagatgccctacctgaagtgccccctgcacacagtgctgaagctgacccctgtggcctacggctgccgggtggagagcatctacctgaatgtggagagcgtgtgcacccaccgggagaggtctgagaacatgaagggcagccgcagcagcgctgacagcagcaggaagcactag

SEQ ID NO: 142036 - DNA, 1581 bp, synthetic construct; identical to SEQ ID NO: 142034
  misc_feature 1..1581: note = Description of Artificial Sequence: Synthetic coding sequence
  source 1..1581: mol_type = other DNA

SEQ ID NO: 142037 - DNA, 1503 bp, synthetic construct
  misc_feature 1..1503: note = Description of Artificial Sequence: Synthetic coding sequence
  source 1..1503: mol_type = other DNA
atgcccttcaggaaggcctgtggccccaagctgaccaacagccccaccgtcatcgtgatggtgggcctgcctgcccggggcaagacctacatcagcaagaagctgacccgctacctgaactggattggagtgcccaccaaggtgttcaacgtgggggagtacagaagagaggccgtgaagcagtacagcagctacaacttcttccggccagacaatgaggaggccatgaaggtgaggaagcagtgtgccctggccgccctgagagatgtgaagagctacctggccaaggagggcggccagattgctgtgtttgatgccaccaacaccacccgggagaggaggcacatgatcctgcactttgccaaggaaaatgacttcaaggccttcttcattgaatctgtgtgtgatgaccccaccgtggtggccagcaacatcatggaggtgaagatcagcagcccagactacaaggactgcaacagcgctgaggccatggatgacttcatgaagaggatcagctgctatgaggccagctaccagcccctggaccctgacaagtgtgaccgggacctgagcctcatcaaggtgattgatgtgggccgccgcttcctggtgaacagagtgcaggaccacatccagagcagaattgtgtactacctgatgaacatccacgtgcagcccaggaccatctacctgtgccgccacggggagaatgagcacaacctgcagggcagaattggaggagacagcggcctgagcagccggggcaagaagtttgccagcgccctgagcaagtttgtggaggagcagaacctgaaggacctgcgggtgtggaccagccagctgaagagcaccatccagacagctgaggccctgcggctgccctatgagcagtggaaggccctgaatgaaattgatgctggggtgtgtgaggagctgacctatgaggagatccgggacacctacccagaggagtatgccctgcgggagcaggacaagtactactaccgctaccccactggagagagctaccaggacctggtgcagaggctggagcccgtcatcatggagctggagcggcaggagaatgtgctggtgatctgccaccaggccgtgctgcgctgcctgctggcctacttcctggacaagtctgctgaggagatgccctacctgaagtgccccctgcacacagtgctgaagctgacccctgtggcctacggctgccgggtggagagcatctacctgaatgtggagagcgtgtgcacccaccgggagaggagtgaagatgccaagaagggccccaaccccctgatgagaagaaattctgtgacccccctggccagccctgagcccaccaagaagccccgcatcaacagctttgaggagcacgtggccagcaccagcgctgccctgcccagctgcctgcccccagaggtgcccacccagctgcccggccagaacatgaagggcagccgcagcagcgctgacagcagcaggaagcactag

SEQ ID NO: 142038 - DNA, 279 bp, synthetic construct
  misc_feature 1..279: note = Description of Artificial Sequence: Synthetic coding sequence
  source 1..279: mol_type = other DNA
atctacctgaatgtggagagcgtgtgcacccaccgggagaggagtgaagatgccaagaagggccccaaccccctgatgagaagaaacagcgtgacccccctggccagccctgagcccaccaagaagccccgcatcaacagctttgaggagcacgtggccagcaccagcgctgccctgcccagctgcctgcccccagaggtgcccacccagctgcccggccagcccctgctgggccaggcctgcctgaactggaagggcgtgatgagaaatgctgcctag

SEQ ID NO: 142039 - DNA, 96 bp, synthetic construct
  misc_feature 1..96: note = Description of Artificial Sequence: Synthetic coding sequence
  source 1..96: mol_type = other DNA
atctacctgaatgtggagagcgtgtgcacccaccgggagaggtctgagaacatgaagggcagccgcagcagcgctgacagcagcaggaagcactag

SEQ ID NO: 142040 - DNA, 261 bp, synthetic construct
  misc_feature 1..261: note = Description of Artificial Sequence: Synthetic coding sequence
  source 1..261: mol_type = other DNA
atgccctacctgaagtgccccctgcacacagtgctgaagctgacccctgtggcctacggctgccgggtggagagcatctacctgaatgtggagagcgtgtgcacccaccgggagaggtctgagggcctgagcctcttcccccggctggagtgtggcggcgctgtgacagcccactgcagcctgaacctgctgggcagcagtgaccccccagccagcgccagccgggtggccgagaccaccggctgcaaggagggcacctag

SEQ ID NO: 142041 - DNA, 432 bp, synthetic construct
  misc_feature 1..432: note = Description of Artificial Sequence: Synthetic coding sequence
  source 1..432: mol_type = other DNA
tgagtggaggagcagaacctgaaggacctgcgggtgtggaccagccagctgaagagcaccatccagacagctgaggccctgcggctgccctatgagcagtggaaggccctgaatgaaattgatgccagctaccaggacctggtgcagaggctggagcctgtgatcatggagctggagcggcaggagaatgtgctggtgatctgccaccaggccgtgctgcgctgcctgctggcctacttcctggacaagtctgctgaggagatgccctacctgaagtgccccctgcacacagtgctgaagctgacccctgtggcctacggctgccgggtggagagcatctacctgaatgtggagagcgtgtgcacccaccgggagaggtctgagaacatgaagggcagccgcagcagcgctgacagcagcaggaagcactag

SEQ ID NO: 142042 - DNA, 555 bp, synthetic construct
  misc_feature 1..555: note = Description of Artificial Sequence: Synthetic coding sequence
  source 1..555: mol_type = other DNA
atgcccttcaggaaggcctgtggccccaagctgaccaacagccccaccgtcatcgtgatggtgggcctgcctgcccggggcaagacctacatcagcaagaagctgacccgctacctgaactggattggagtgcccaccaaggtgttcaacgtgggggagtacagaagagaggccgtgaagcagtacagcagctacaacttcttccggccagacaatgaggaggccatgaaggtgaggaagcagtgtgccctggccgccctgagagatgtgaagagctacctggccaaggagggcggccagattgctgtgtttgatgccaccaacaccacccgggagaggaggcacatgatcctgcactttgccaaggaaaatgacttcaaggccttcttcattgaatctgtgtgtgatgaccccaccgtggtggccagcaacatcatgcagaaggccttccagagggacctgagcgccacccccctgtggtgctgcaggaagctgaagagccctgcccgcatcaccaagacagccacccggcagaagccctggaccaccagctag

SEQ ID NO: 142043 - DNA, 1605 bp, synthetic construct
  misc_feature 1..1605: note = Description of Artificial Sequence: Synthetic coding sequence
  source 1..1605: mol_type = other DNA
atgggagagggcggccagaaggagggggacagccagcaggccggggccctgcccctgctgtgccagctggacaccttcagccccaaggccaccgtgtttggagtgtccatcaacccagcctgtggccccaagctgaccaacagccccaccgtcatcgtgatggtgggcctgcctgcccggggcaagacctacatcagcaagaagctgacccgctacctgaactggattggagtgcccaccaaggtgttcaacgtgggggagtacagaagagaggccgtgaagcagtacagcagctacaacttcttccggccagacaatgaggaggccatgaaggtgaggaagcagtgtgccctggccgccctgagagatgtgaagagctacctggccaaggagggcggccagattgctgtgtttgatgccaccaacaccacccgggagaggaggcacatgatcctgcactttgccaaggaaaatgacttcaaggccttcttcattgaatctgtgtgtgatgaccccaccgtggtggccagcaacatcatggaggtgaagatcagcagcccagactacaaggactgcaacagcgctgaggccatggatgacttcatgaagaggatcagctgctatgaggccagctaccagcccctggaccctgacaagtgtgaccgggacctgagcctcatcaaggtgattgatgtgggccgccgcttcctggtgaacagagtgcaggaccacatccagagcagaattgtgtactacctgatgaacatccacgtgcagcccaggaccatctacctgtgccgccacggggagaatgagcacaacctgcagggcagaattggaggagacagcggcctgagcagccggggcaagaagtttgccagcgccctgagcaagtttgtggaggagcagaacctgaaggacctgcgggtgtggaccagccagctgaagagcaccatccagacagctgaggccctgcggctgccctatgagcagtggaaggccctgaatgaaattgatgctggggtgtgtgaggagctgacctatgaggagatccgggacacctacccagaggagtatgccctgcgggagcaggacaagtactactaccgctaccccactggagagagctaccaggacctggtgcagaggctggagcccgtcatcatggagctggagcggcaggagaatgtgctggtgatctgccaccaggccgtgctgcgctgcctgctggcctacttcctggacaagtctgctgaggagatgccctacctgaagtgccccctgcacacagtgctgaagctgacccctgtggcctacggctgccgggtggagagcatctacctgaatgtggagagcgtgtgcacccaccgggagaggagtgaagatgccaagaagggccccaaccccctgatgagaagaaattctgtgacccccctggccagccctgagcccaccaagaagccccgcatcaacagctttgaggagcacgtggccagcaccagcgctgccctgcccagctgcctgcccccagaggtgcccacccagctgcccggccagaacatgaagggcagccgcagcagcgctgacagcagcaggaagcactag

SEQ ID NO: 142044 - DNA, 594 bp, synthetic construct
  misc_feature 1..594: note = Description of Artificial Sequence: Synthetic coding sequence
  source 1..594: mol_type = other DNA
atggaccccccagctggctttgtgcgggccggcaacccagctgtggccgccccccagagccccctgagccctgagggcgcccacttccgggccgcccaccaccccaggagcacaggcagccgctgccccggcagcctgcagcccagccggcccctggtggccaactggctgcagagcctgcctgagatgcctgtggacttcaccggctactggaagatgctggtgaatgaaaattttgaggagtacctgcgggccctggatgtgaatgtggccctgaggaagatcgccaacctgctgaagccagacaaggagatcgtgcaggatggagaccacatgatcatccgcaccctgagcaccttcaggaactacatcatggacttccaggtgggcaaggagtttgaggaggacctgaccggcattgatgacaggaagtgcatgaccaccgtgtcctgggatggagacaagctgcagtgtgtgcagaagggggagaaggagggccggggctggacccagtggattgaaggagatgagctgcacctggagatgagggtggagggcgtggtgtgcaagcaggtgttcaagaaggtgcagtag

SEQ ID NO: 142045 - DNA, 528 bp, synthetic construct
  misc_feature 1..528: note = Description of Artificial Sequence: Synthetic coding sequence
  source 1..528: mol_type = other DNA
atgaccaactgccccaccctcatcgtgatggtgggcctgcctgcccggggcaagacctacatcagcaagaagctgacccgctacctgaactggattggagtgcccacccgggagttcaacgtgggccagtacagaagagatgtggtgaagacctacaagagctttgagttcttcctgcctgacaatgaggagggcctgaagatcaggaagcagtgtgccctggccgccctgagagatgtgcggcgcttcctgtctgaggagggcggccacgtggccgtgtttgatgccaccaacaccacccgggagcggcgggccaccatcttcaactttggagagcagaatggctacaagaccttctttgtggagagcatctgtgtggaccctgaggtgattgctgccaacatcgtgcaggtgaagctgggcagcccagactatgtgaacagagacagtgatgaggccacagaggacttcatgagaagaattgagtgctatgaaaattcctatgagagcctggatgaggacctgtag

SEQ ID NO: 142046 - DNA, 1377 bp, synthetic construct
  misc_feature 1..1377: note = Description of Artificial Sequence: Synthetic coding sequence
  source 1..1377: mol_type = other DNA
atggaccggggcagcctgggcggcagcagcctgacagacctgggccctggcagcagccggcgggtgtgcatgaccaactgccccaccctgattgtgatggtgggcctgcctgcccggggcaagacctacatcagcaagaagctgacccgctacctgaactggattggagtgcccacccgggagttcaacgtgggccagtacagaagagatgtggtgaagacctacaagagctttgagttcttcctgcctgacaatgaggagggcctgaagatcaggaagcagtgtgccctggccgccctgagagatgtgcggcgcttcctgtctgaggagggcggccacgtggccgtgtttgatgccaccaacaccacccgggagcggcgggccaccatcttcaactttggagagcagaatggctacaagaccttctttgtggagagcatctgtgtggaccctgaggtgattgctgccaacatcgtgcaggtgaagctgggcagcccagactatgtgaacagagacagtgatgaggccacagaggacttcatgagaagaattgaatgttatgagaacagctatgagagcctggatgaggacctggaccgggacctgagctacatcaagatcatggatgtgggccagagctatgtggtgaacagagtggccgaccacatccagagcagaattgtgtactacctgatgaacatccacgtgacccccaggagcatctacctgtgccgccacggggagagcgagctgaacctgaagggcagaattggaggagaccccggcctgagcccccggggccgggagtttgccaagagcctggcccagttcatcagtgaccagaacatcaaggacctgaaggtgtggaccagccagatgaagaggaccatccagacagctgaggccctgggcgtgccctatgagcagtggaaggtgctgaatgaaattgatgctggggtgtgtgaggagatgacctatgaggagatccaggacaactaccccctggagtttgccctgcgggaccaggacaagtaccgctaccgctaccccaagggggagagctatgaggacctggtgcagaggctggagcccgtcatcatggagctggagcggcaggagaatgtgctggtgatctgccaccaggccgtgatgcgctgcctgctggcctacttcctggacaaggctgctgagcagctgccctacctgaagtgccccctgcacacagtgctgaagctgacccctgtggcctacggctgcaaggtggagagcatcttcctgaatgtggccgctgtgaacacccaccgggaccggccccagaatgtggacatcagccggcccccagaggaggccctggtgacagtgcctgcccaccagtag

SEQ ID NO: 142047 - DNA, 1308 bp, synthetic construct
  misc_feature 1..1308: note = Description of Artificial Sequence: Synthetic coding sequence
  source 1..1308: mol_type = other DNA
atgaccaactgccccaccctcatcgtgatggtgggcctgcctgcccggggcaagacctacatcagcaagaagctgacccgctacctgaactggattggagtgcccacccgggagttcaacgtgggccagtacagaagagatgtggtgaagacctacaagagctttgagttcttcctgcctgacaatgaggagggcctgaagatcaggaagcagtgtgccctggccgccctgagagatgtgcggcgcttcctgtctgaggagggcggccacgtggccgtgtttgatgccaccaacaccacccgggagcggcgggccaccatcttcaactttggagagcagaatggctacaagaccttctttgtggagagcatctgtgtggaccctgaggtgattgctgccaacatcgtgcaggtgaagctgggcagcccagactatgtgaacagagacagtgatgaggccacagaggacttcatgagaagaattgagtgctatgaaaattcctatgagagcctggatgaggacctggaccgggacctgagctacatcaagatcatggatgtgggccagagctatgtggtgaacagagtggccgaccacatccagagccgcatcgtgtactacctgatgaacatccacgtgacccccaggagcatctacctgtgcagacatggagagagcgagctgaacctgaagggccgcatcggcggggaccccggcctgagcccccggggccgggagtttgccaagagcctggcccagttcatcagtgaccagaacatcaaggacctgaaggtgtggaccagccagatgaagaggaccatccagacagctgaggccctgggcgtgccctatgagcagtggaaggtgctgaatgaaattgatgctggggtgtgtgaggagatgacctatgaggagatccaggacaactaccccctggagtttgccctgcgggaccaggacaagtaccgctaccgctaccccaagggggagagctatgaggacctggtgcagaggctggagcctgtgatcatggagctggagcggcaggagaatgtgctggtgatctgccaccaggccgtgatgcgctgcctgctggcctacttcctggacaaggctgctgagcagctgccctacctgaagtgccccctgcacacagtgctgaagctgacccctgtggcctacggctgcaaggtggagagcatcttcctgaatgtggccgctgtgaacacccaccgggaccggccccagaatgtggacatcagcaggcctcctgaggaggccctggtgacagtgcctgcccaccagtag

SEQ ID NO: 142048 - DNA, 429 bp, synthetic construct
  misc_feature 1..429: note = Description of Artificial Sequence: Synthetic coding sequence
  source 1..429: mol_type = other DNA
atggccagcccccgggagctgacccagaaccccctgaagaagatctggatgccctacagcaatggccggcctgccctgcacgcctgccagaggggcgtgtgcatgaccaactgccccaccctcatcgtgatggtgggcctgcctgcccggggcaagacctacatcagcaagaagctgacccgctacctgaactggattggagtgcccacccgggagttcaacgtgggccagtacagaagagatgtggtgaagacctacaagagctttgagttcttcctgcctgacaatgaggagggcctgaagatcaggaagttcctgatgccccagaccccaccagaaaatggagagcggcccagcctcatcctggagaacaggatggccacccggcccttcctgagcagccccagcgtgtggatcctgcggagctag

SEQ ID NO: 142049 - DNA, 777 bp, synthetic construct
  misc_feature 1..777: note = Description of Artificial Sequence: Synthetic coding sequence
  source 1..777: mol_type = other DNA
atggccgccccagcccctggcctcatcagcgtcttcagcagcagccaggagctgggcgccgccctggcccagctggtggcccagagagctgcctgctgcctggccggggcccgggccaggtttgccctgggcctgagcggcggcagcctggtgtccatgctggcccgggagctgcctgctgctgtggccccagctggccctgccagcctggcccgctggaccctgggcttctgtgatgagcggctggtgccctttgaccacgccgagagcacctacggcctgtaccgcacccacctgctgagccggctgcccatccctgagagccaggtgatcaccatcaaccctgagctgcctgtggaggaggccgctgaggactatgccaagaagctgcggcaggccttccagggcgacagcatccctgtgtttgacctgctgatcctgggcgtgggcccagatggccacacctgcagcctcttcccagaccaccccctgctgcaggagcgggagaagatcgtggcccccatcagtgacagccccaagcccccaccccagagggtgaccctgaccctgcctgtgctgaatgctgccaggacagtcatctttgtggccaccggggagggcaaggctgctgtgctgaagaggatcctggaggaccaggaggagaaccccctgcctgctgccctggtgcagccccacacaggcaagctgtgctggttcctggatgaagctgctgcccggctgctgactgtgccctttgagaagcacagcaccctgtag

SEQ ID NO: 142050 - DNA, 1428 bp, synthetic construct
  misc_feature 1..1428: note = Description of Artificial Sequence: Synthetic coding sequence
  source 1..1428: mol_type = other DNA
atggccgccaagagccagcccaacatccccaaggccaagagcctggatggagtgaccaatgacagaacagccagccagggccagtggggccgggcctgggaggtggactggttcagcctggccagcgtcatcttcctgctgctgtttgcccccttcatcgtgtactacttcatcatggcctgtgaccagtacagctgtgccctgactggacctgtggtggacatcgtgactggacatgcccggctgagtgacatctgggccaagaccccacccatcaccaggaaggccgcccagctgtacaccctgtgggtgaccttccaggtgctgctgtacaccagcctgcctgacttctgccacaagttcctgcccggctacgtgggcggcatccaggagggcgctgtgaccccagctggggtggtgaacaagtaccagatcaatggcctgcaggcctggctgctgacccacctgctgtggtttgccaatgcccacctgctgtcctggttcagccccaccatcatctttgacaactggatccccctgctgtggtgtgccaacatcctgggctatgctgtgtccacctttgccatggtgaagggctacttcttccccaccagcgcccgggactgcaagttcaccggcaacttcttctacaactacatgatgggcatcgagttcaaccccagaattggcaagtggtttgacttcaagctgttcttcaacggccggcccggcatcgtggcctggaccctcatcaacctgagctttgctgccaagcagcgggagctgcacagccacgtgaccaatgccatggtgctggtgaatgtgctgcaggccatctacgtgattgacttcttctggaatgagacctggtacctgaagaccatcgacatctgccacgaccacttcggctggtacctgggctggggagactgtgtgtggctgccctacctgtacaccctgcagggcctgtacctggtgtaccaccctgtgcagctgagcacccctcatgctgtgggcgtgctgctgctgggcctggtgggctactacatcttccgggtggccaaccaccagaaggacctcttccggaggacagatggccgctgcctgatctggggcaggaagcccaaggtgattgaatgttcctacaccagcgcagatggccagaggcaccacagcaagctgctggtgtctggcttctggggcgtggcccggcacttcaactacgtgggggacctgatgggcagcctggcctactgcctggcctgtggcggcggccacctgctgccctacttctacatcatctacatggccatcctgctgacccaccgctgcctgagagatgagcaccgctgtgccagcaaatatggccgggactgggagcgctacacagctgctgtgccctaccgcctgctgcccggcatcttctag

SEQ ID NO: 142051 - DNA, 1428 bp, synthetic construct; identical to SEQ ID NO: 142050
  misc_feature 1..1428: note = Description of Artificial Sequence: Synthetic coding sequence
  source 1..1428: mol_type = other DNA

SEQ ID NO: 142052 - DNA, 327 bp, synthetic construct
  misc_feature 1..327: note = Description of Artificial Sequence: Synthetic coding sequence
  source 1..327: mol_type = other DNA
atggccgccaagagccagcccaacatccccaaggccaagagcctggatggagtgaccaatgacagaacagccagccagggccagtggggccgggcctgggaggtggactggttcagcctggccagcgtcatcttcctgctgctgtttgcccccttcatcgtgtactacttcatcatggcctgtgaccagtacagctgtgccctgactggacctgtggtggacatcgtgactggacatgcccggctgagtgacatctgggccaagaccccacccatcaccaggaaggccgcccagctgtacaccctgtgggtgaccttccaggtgtag

SEQ ID NO: 142053 - DNA, 495 bp, synthetic construct
  misc_feature 1..495: note = Description of Artificial Sequence: Synthetic coding sequence
  source 1..495: mol_type = other DNA
atggccgccaagagccagcccaacatccccaaggccaagagcctggatggagtgaccaatgacagaacagccagccagggccagtggggccgggcctgggaggtggactggttcagcctggccagcgtcatcttcctgctgctgtttgcccccttcatcgtgtactacttcatcatggcctgtgaccagtacagctgtgccctgactggacctgtggtggacatcgtgactggacatgcccggctgagtgacatctgggccaagaccccacccatcaccaggaaggccgcccagctgtacaccctgtgggtgaccttccaggtgctgctgtacaccagcctgcctgacttctgccacaagttcctgcccggctacgtgggcggcatccaggagggcgctgtgaccccagctggggtggtgaacaagtaccagatcaatggcctgcaggcctggctgctgacccacctgctgtggtttgccaatgcccacctgtag

SEQ ID NO: 142054 - DNA, 276 bp, synthetic construct
  misc_feature 1..276: note = Description of Artificial Sequence: Synthetic coding sequence
  source 1..276: mol_type = other DNA
atggccgccaagagccagcccaacatccccaaggccaagagcctggatggagtgaccaatgacagaacagccagccagggccagtggggccgggcctgggaggtggactggttcagcctggccagcgtcatcttcctgctgctgtttgcccccttcatcgtgtactacttcatcatggcctgtgaccagtacagctgtgccctgactggacctgtggtggacatcgtgactggacatgcccggctgagtgacatctgggccaagaccccaccctag

SEQ ID NO: 142055 - DNA, 318 bp, synthetic construct
  misc_feature 1..318: note = Description of Artificial Sequence: Synthetic coding sequence
  source 1..318: mol_type = other DNA
atggccgccaagagccagcccaacatccccaaggccaagagcctggatggagtgaccaatgacagaacagccagccagggccagtggggccgggcctgggaggtggactggttcagcctggccagcgtcatcttcctgctgctgtttgcccccttcatcgtgtactacttcatcatggcctgtgaccagtacagctgtgccctgactggacctgtggtggacatcgtgactggacatgcccggctgagtgacatctgggccaagaccccacccatcaccaggaaggccgcccagctgtacaccctgtgggtgacctag

SEQ ID NO: 142056 - DNA, 846 bp, synthetic construct
  misc_feature 1..846: note = Description of Artificial Sequence: Synthetic coding sequence
  source 1..846: mol_type = other DNA
atggacagctacagcacctacctggccaccgtgaaggtgtctggctcctggctggaggagcaggatgaggacatctatgaggtggagagccgggtgcccctgccccaccccttccccctgtgtgagcacctggatgagaacaacagcgtgattgtgaacaccagcatcttccacttcatccacaagagaaatggccacatcctgaagctgatcagcaagatcagcctgcccaccccaccctacagcctggagcacgccaaggtgacccagacagagctgatgagggagagcttccggcagaagcaggaggccacagagagcctgaagtgccaggaggagctgcgggagcggctgcacgaggagagccgggcccgggagcagctggccgtggagctgagcaaggccgagggcgtgattgatggctatgcagatgagaagaccctgtttgagcggcagatccaggagaagacagacatcatcgaccggctggagcaggagctgctgtgtgccagcaaccggctgcaggagctggaggccgagcagcagcagatccaggaggagcgggagctgctgagccggcagaaggaggccatgaaggccgaggccggccctgtggagcagcagctgctgcaggagacagagaagctgatgaaggagaagctggaggtgcagtgccaggccgagaaggtgagagatgacctgcagaagcaggtgaaggccctggagattgatgtggaggagcaggtgagccgcttcatcgagctggagcaggagaagaacacagagctgatggacctgcggcagcagaaccaggccctggagaagcagctggagaagatgaggtag

SEQ ID NO: 142057 - DNA, 11724 bp, synthetic construct
  misc_feature 1..11724: note = Description of Artificial Sequence: Synthetic coding sequence
  source 1..11724: mol_type = other DNA
atggaggatgaggagcggcagaagaagctggaggccggcaaggccaagctggcccagttccggcagaggaaggcccagagtgatggccagagccccagcaagaagcagaagaagaagaggaagaccagcagcagcaagcatgatgtgtctgcccaccacgacctgaacatcgaccagagccagtgcaatgagatgtacatcaacagcagccagagggtggagagcaccgtcatccctgagagcaccatcatgaggaccctgcacagcggggagatcaccagccatgagcagggcttctctgtggagctggagagcgagatcagcaccacagcagatgactgcagcagcgaggtgaatggctgcagctttgtgatgaggacaggcaagcccaccaacctgctgcgggaggaggagtttggagtggatgacagctacagcgagcagggcgcccaggacagccccacccacctggagatgatggagagcgagctggccggcaagcagcatgaaattgaggagctgaaccgggagctggaggagatgagggtgacctatggaacagagggcctgcagcagctgcaggagtttgaggccgccatcaagcagagagatggcatcatcacccagctgacagccaacctgcagcaggcccggcgggagaaggatgagaccatgagggagttcctggagctgacagagcagagccagaagctgcagatccagttccagcagctgcaggccagcgagaccctgaggaacagcacccacagcagcacagctgctgacctgctgcaggccaagcagcagatcctgacccaccagcagcagctggaggagcaggaccacctgctggaggactaccagaagaagaaggaggacttcaccatgcagatctccttcctgcaggagaagatcaaggtgtatgagatggagcaggacaagaaggtggagaacagcaacaaggaggagatccaggagaaggagaccatcatcgaggagctgaacaccaagatcatcgaggaggagaagaagaccctggagctgaaggacaagctgaccacagctgacaagctgctgggggagctgcaggagcagatcgtgcagaagaaccaggagatcaagaacatgaagctggagctgaccaacagcaagcagaaggagcggcagagcagcgaggagatcaagcagctgatgggcaccgtggaggagctgcagaagaggaaccacaaggacagccagtttgaaacagacatcgtgcagaggatggagcaggagacccagaggaagctggagcagctgcgggcagagctggatgagatgtatggccagcagatcgtgcagatgaagcaggagctgatccggcagcacatggcccagatggaggagatgaagaccaggcacaagggggagatggagaatgccctgcggagctacagcaacatcaccgtgaatgaagaccagatcaagctgatgaatgtggccatcaatgagctgaacatcaagctgcaggacaccaacagccagaaggagaagctgaaggaggagctgggcctcatcctggaggagaagtgtgccctgcagaggcagctggaggacctggtggaggagctgtccttcagccgggagcagatccagagggcccggcagaccatcgccgagcaggagagcaagctgaatgaggcccacaagagcctgagcacagtggaggacctgaaggccgagatcgtgtctgccagcgagagcaggaaggagctggagctgaagcatgaagctgaggtgaccaactacaagatcaagctggagatgctggagaaggagaagaatgctgtgctggacaggatggccgagagccaggaggccgagctggagcggctgcggacccagctgctcttcagccatgaggaggagctgagcaagctgaaggaggacctggagattgagcaccgcatcaacatcgagaagctgaaggacaacctgggcatccactacaagcagcagattgatggcctgcagaatgagatgagccagaagattgagaccatgcagtttgagaaggacaacctgatcaccaagcagaaccagctgatcctggagatcagcaagctgaaggacctgcagcagagcctggtgaacagcaagtctgaggagatgaccctgcagatcaatgagctgcagaaggagattgagatcctgcggcaggaggagaaggagaagggcaccctggagcaggaggtgcaggagctgcagctgaagacagagctgctggagaagcagatgaaggagaaggaaaatgacctgcaggagaagtttgcccagctggaggccgagaacagcatcctgaaggatgagaagaagaccctggaggacatgctgaagatccacacccctgtgtcccaggaggagcggctcatcttcctggacagcatcaagagcaagagcaaggacagcgtgtgggagaaggagattgagatcctgattgaggagaatgaagacctgaagcagcagtgcatccagctgaatgaggagattgagaagcagaggaacaccttctcctttgctgagaagaactttgaggtgaactaccaggagctgcaggaggagtatgcctgcctgctgaaggtgaaggatgacctggaggacagcaagaacaagcaggagctggagtacaagagcaagctgaaggccctgaatgaggagctgcacctgcagaggatcaaccccaccaccgtgaagatgaagagctctgtgtttgatgaggacaagacctttgtggccgagaccctggagatgggagaggtggtggagaaggacaccacagagctgatggagaagctggaggtgaccaagcgggagaagctggagctgagccagaggctgagtgacctgtctgagcagctgaagcagaagcacggggagatctccttcctgaatgaggaggtgaagagcctgaagcaggagaaggagcaggtgtccctgcgctgccgggagctggagatcatcatcaaccacaacagagcagaaaatgtgcagagctgtgacacccaggtgagcagcctgctggatggagtggtgaccatgaccagcagaggagctgagggctctgtgtccaaggtgaacaagagctttggagaggagagcaagatcatggtggaggacaaggtgtcctttgagaacatgacagtgggggaggagagcaagcaggagcagctgatcctggaccacctgcccagcgtgaccaaggagagcagcctgcgggccacccagcccagtgaaaatgacaagctgcagaaggagctgaatgtgctgaagtctgagcagaatgacctgcggctgcagatggaggcccagaggatctgcctgagcctggtgtacagcacccacgtggaccaggtgcgggagtacatggagaatgagaaggacaaggccctgtgcagcctgaaggaggagctgatctttgcccaggaggagaagatcaaggagctgcagaagatccaccagctggagctgcagaccatgaagacccaggagactggagatgagggcaagcccctgcacctgctgattggcaagctgcagaaggctgtgtctgaggagtgcagctacttcctgcagaccctgtgcagcgtgctgggggagtactacaccccagccctgaagtgtgaggtgaatgctgaggacaaggagaacagcggggactacatcagtgaaaatgaagatcctgagctgcaggactaccgctatgaggtgcaggacttccaggagaacatgcacaccctgctgaacaaggtgacagaggagtacaacaagctgctggtgctgcagacccggctgagcaagatctggggccagcagacagatggcatgaagctggagtttggagaggagaacctgcccaaggaggagacagagttcctgagcatccacagccagatgaccaacctggaggacattgatgtgaaccacaagagcaagctgagcagcctgcaggacctggagaagaccaagctggaggagcaggtgcaggagctggagagcctcatcagcagcctgcagcagcagctgaaggagacagagcagaactatgaagctgagatccactgcctgcagaagaggctgcaggccgtgtctgagagcacagtgccccccagcctgcctgtggacagcgtggtgatcacagaaagtgatgcccagaggaccatgtacccaggcagctgtgtgaagaagaacattgatggcaccatcgagttctctggagaatttggagtgaaggaggagaccaacatcgtgaagctgctggagaagcagtaccaggagcagctggaggaggaggtggccaaggtgattgtgtccatgagcatcgcctttgcccagcagacagagctgagccgcatcagcggcggcaaggaaaatacagccagcagcaagcaggcccatgctgtgtgccagcaggagcagcactacttcaatgagatgaagctgagccaggaccagatcggcttccagacctttgaaacagtggatgtgaagttcaaggaggagttcaagcccctgagcaaggagctgggggagcacggcaaggagatcctgctgagcaacagcgacccccatgacatccctgagagcaaggactgtgtgctgaccatcagcgaggagatgttcagcaaggacaagaccttcatcgtgcggcagagcatccatgatgagatctctgtgtcctccatggatgccagccggcagctgatgctgaatgaggagcagctggaggacatgaggcaggagctggtgcggcagtaccaggagcaccagcaggccacagagctgctgcggcaggcccacatgaggcagatggagcggcagcgggaggaccaggagcagctgcaggaggagatcaagaggctgaaccggcagctggcccagaggagcagcattgacaatgaaaacctggtgtctgagcgggagcgggtgctgctggaggagctggaggccctgaagcagctgagcctggccggccgggagaagctgtgctgtgagctgaggaacagcagcacccagacccagaatggaaatgaaaaccagggcgaggtggaggagcagaccttcaaggagaaggagctggacaggaagccagaagatgtgcccccagagatcctgagcaatgaaagatatgccctgcagaaggccaacaaccggctgctgaagatcctgctggaggtggtgaagaccacagctgctgtggaggagaccatcggccgccacgtgctgggcatcctggacaggagcagcaagagccagagcagcgccagcctcatctggaggtctgaggccgaggcctctgtgaagagctgtgtgcatgaggagcacaccagggtgacagatgagagcatccccagctacagcggcagtgacatgcccagaaatgacatcaacatgtggagcaaggtgacagaggagggcacagagctgagccagaggctggtgcgcagcggctttgctggaacagaaattgatcctgaaaatgaggagctgatgctgaacatcagcagccggctgcaggccgctgtggagaagctgctggaggccatcagcgagaccagcagccagctggagcacgccaaggtgacccagacagagctgatgagggagagcttccggcagaagcaggaggccacagagagcctgaagtgccaggaggagctgcgggagcggctgcacgaggagagccgggcccgggagcagctggccgtggagctgagcaaggccgagggcgtgattgatggctatgcagatgagaagaccctgtttgagcggcagatccaggagaagacagacatcatcgaccggctggagcaggagctgctgtgtgccagcaaccggctgcaggagctggaggccgagcagcagcagatccaggaggagcgggagctgctgagccggcagaaggaggccatgaaggccgaggccggccctgtggagcagcagctgctgcaggagacagagaagctgatgaaggagaagctggaggtgcagtgccaggccgagaaggtgagagatgacctgcagaagcaggtgaaggccctggagattgatgtggaggagcaggtgagccgcttcatcgagctggagcaggagaagaacacagagctgatggacctgcggcagcagaaccaggccctggagaagcagctggagaagatgaggaagttcctggatgagcaggccatcgaccgggagcacgagagagatgtgttccagcaggagatccagaagctggagcagcagctgaaggtggtgccccgcttccagcccatcagcgagcaccagacccgggaggtggagcagctggccaaccacctgaaggagaagacagacaagtgcagcgagctgctgctgagcaaggagcagctgcagagggacatccaggagagaaatgaggagattgagaagctggagttccgggtgcgggagctggagcaggccctgctggtgtctgctgacaccttccagaaggtggaggacaggaagcactttggagctgtggaggccaagccagagctgagcctggaggtgcagctgcaggccgagagagatgccatcgacaggaaggagaaggagatcaccaacctggaggagcagctggagcagttccgggaggagctggagaacaagaatgaggaggtgcagcagctgcacatgcagctggagatccagaagaaggagagcaccacccggctgcaggagctggagcaggagaacaagctgttcaaggatgacatggagaagctgggcctggccatcaaggagagtgatgccatgagcacccaggaccagcacgtgctgtttgggaagtttgcccagatcatccaggagaaggaggtggagattgaccagctgaatgagcaggtgaccaagctgcagcagcagctgaagatcaccacagacaacaaggtgattgaggagaagaatgaactcatccgggacctggagacccagatcgagtgcctgatgtctgaccaggagtgtgtgaagaggaaccgggaggaggagattgagcagctgaatgaagtcatcgagaagctgcagcaggagctggccaacatcggccagaagacctccatgaatgcccacagcctgtctgaggaggccgacagcctgaagcaccagctggatgtggtgattgctgagaagctggccctggagcagcaggtggagacagccaatgaggagatgaccttcatgaagaatgtgctgaaggagaccaacttcaagatgaaccagctgacccaggagctgttcagcctgaagcgggagcgggagagcgtggagaagatccagagcatccctgagaacagcgtgaatgtggccatcgaccacctgagcaaggacaagccagagctggaggtggtgctgacagaagatgccctgaagagcctggagaaccagacctacttcaagagctttgaggagaatggcaagggcagcatcatcaacctggagacccggctgctgcagctggagagcacagtgtctgccaaggacctggagctgacccagtgctacaagcagatcaaggacatgcaggagcagggccagtttgaaacagagatgctgcagaagaagatcgtgaacctgcagaagatcgtggaggagaaggtggccgccgccctggtgtcccagatccagctggaggccgtgcaggagtatgccaagttctgccaggacaaccagaccatcagcagcgagcctgagaggaccaacatccagaacctgaaccagctgcgggaggatgagctgggcagtgacatcagcgccctgaccctgcgcatcagcgagctggagagccaggtggtggagatgcacaccagcctcatcctggagaaggagcaggtggagattgctgagaagaatgtgctggagaaggagaagaagctgctggagctgcagaagctgctggagggcaatgagaagaagcagcgggagaaggagaagaagaggagcccccaggatgtggaggtgctgaagaccaccacagagctgttccacagcaatgaggagagcggcttcttcaatgagctggaggccctgcgggcagagagcgtggccaccaaggccgagctggccagctacaaggagaaggccgagaagctgcaggaggagctgctggtgaaggagaccaacatgaccagcctgcagaaggacctgagccaggtgcgggaccacctggccgaggccaaggagaagctgagcatcctggagaaggaggatgaaacagaggtgcaggagagcaagaaggcctgcatgtttgagcccctgcccatcaagctgagcaagagcatcgccagccagacagatggcaccctgaagatcagcagcagcaaccagaccccccagatcctggtgaagaatgccggcatccagatcaacctgcagagtgaatgtagcagcgaggaggtgacagagatcatcagccagttcacagagaagattgagaagatgcaggagctgcacgccgctgagatcctggacatggagagccgccacatcagcgagacagagaccctgaagcgggagcactacgtggccgtgcagctgctgaaggaggagtgtggcaccctgaaggctgtgatccagtgcctgcggagcaaggagggcagcagcatccctgagctggcccacagtgatgcctaccagacccgggagatctgcagcagtgacagcggcagtgactggggccagggcatctacctgacccacagccagggctttgatattgccagcgagggccgcggggaggagagcgagagcgccacagacagcttccccaagaagatcaagggcctgctgcgggctgtgcacaatgaaggcatgcaggtgctgagcctgacagagagcccctacagtgatggagaggaccacagcatccagcaggtgtctgagccctggctggaggagaggaaggcctacatcaacaccatcagcagcctgaaggacctgatcaccaagatgcagctgcagcgggaggccgaggtgtatgacagcagccagagccatgagagcttcagtgactggagaggagagctgctgctggccctgcagcaggtgttcctggaggagaggtctgtgctgctggccgccttcagaacagagctgacagccctgggcaccacagatgctgtgggcctgctgaactgcctggagcagaggatccaggagcagggcgtggagtaccaggccgccatggagtgcctgcagaaggctgacagaagaagcctgctgtctgagatccaggccctgcacgcccagatgaatggaaggaagatcaccctgaagcgggagcaggagagcgagaagcccagccaggagctgctggagtacaacatccagcagaagcagagccagatgctggagatgcaggtggagctgagctccatgaaggaccgggccacagagctgcaggagcagctgagcagcgagaagatggtggtggccgagctgaagtctgagctggcccagaccaagctggagctggagaccaccctgaaggcccagcacaagcacctgaaggagctggaggccttccggctggaggtgaaggacaagacagatgaggtgcacctgctgaatgacaccctggccagcgagcagaagaagagccgggagctgcagtgggccctggagaaggagaaggccaagctgggccgctctgaggagcgggacaaggaggagctggaggacctgaagttcagcctggagagccagaagcagaggaacctgcagctgaacctgctgctggagcagcagaagcagctgctgaatgaaagccagcagaagattgagagccagaggatgctgtatgatgcccagctgtctgaggagcagggcaggaacctggagctgcaggtgctgctggagagcgagaaggtgcgcatccgggagatgagcagcaccctggaccgggagcgggagctgcacgcccagctgcagagcagtgatggcaccggccagagcaggcctcccctgcccagcgaggacctgctgaaggagctgcagaagcagctggaggagaagcacagcagaattgtggagctgctgaatgaaacagagaagtacaagctggacagcctgcagacccggcagcagatggagaaggaccggcaggtgcacaggaagaccctgcagacagagcaggaggccaacacagagggccagaagaagatgcatgagctgcagagcaaggtggaggacctgcagaggcagctggaggagaagaggcagcaggtgtacaagctggacctggagggccagaggctgcagggcatcatgcaggagttccagaagcaggagctggagcgggaggagaagcgggagagccgccgcatcctgtaccagaacctgaatgagcccaccacctggagcctgaccagtgacaggaccaggaactgggtgctgcagcagaagattgaaggagagaccaaggagagcaactatgccaagctgattgagatgaatggaggcggcaccggctgcaaccacgagctggagatgatccggcagaagctgcagtgtgtggccagcaagctgcaggtgctgccccagaaggccagcgagcggctgcagtttgaaacagcagatgatgaggacttcatctgggtgcaggagaacattgatgagatcatcctgcagctgcagaagctgaccggccagcagggcgaggagcccagcctggtgagccccagcaccagctgtggcagcctgacagagcggctgctgcggcagaatgctgagctgaccggccacatcagccagctgacagaggagaagaatgacctgaggaacatggtgatgaagctggaggagcagatccgctggtaccggcagacaggagctggccgggacaacagcagccgcttcagcctgaatggaggagccaacatcgaggccatcatcgccagcgagaaggaggtgtggaaccgggagaagctgaccctgcagaagagcctgaagagagctgaggccgaggtgtacaagctgaaggccgagctgagaaatgacagcctgctgcagaccctgagcccagattctgaacatgtgaccctgaagaggatctacggcaagtacctgcgggcagagagcttcaggaaggccctgatctaccagaagaagtacctgctgctgctgctgggcggcttccaggagtgtgaagatgccaccctggccctgctggccaggatgggcggccagcctgccttcacagacctggaggtgatcaccaaccggcccaagggcttcacccgcttccgctctgctgtgcgggtgtccatcgccatcagcaggatgaagttcctggtgcggcgctggcaccgggtgactggatctgtgtccatcaacatcaacagagatggcttcggcctgaaccagggcgctgagaagacagacagcttctaccacagcagcggcggcctggagctgtatggagagcccaggcacaccacctaccgcagcagaagtgacctggactacatccgcagccccctgcccttccagaaccgctacccaggcaccccagctgacttcaaccctggcagcctggcctgcagccagctgcagaactatgaccctgaccgggccctgacagactacatcacccggctggaggccctgcagaggcggctgggcaccatccagagcggcagcaccacccagttccacgccggcatgagaagatag

SEQ ID NO: 142058 - DNA, 11574 bp, synthetic construct
  misc_feature 1..11574: note = Description of Artificial Sequence: Synthetic coding sequence
  source 1..11574: mol_type = other DNA
atggaggatgaggagcggcagaagaagctggaggccggcaaggccaagattgaggagctgagcctggccttcctggtgcggcagctggcccagttccggcagaggaaggcccagagtgatggccagagccccagcaagaagcagaagaagaagaggaagaccagcagcagcaagcatgatgtgtctgcccaccacgacctgaacatcgaccagagccagtgcaatgagatgtacatcaacagcagccagagggtggagagcaccgtcatccctgagagcaccatcatgaggaccctgcacagcggggagatcaccagccatgagcagggcttctctgtggagctggagagcgagatcagcaccacagcagatgactgcagcagcgaggtgaatggctgcagctttgtgatgaggacaggcaagcccaccaacctgctgcgggaggaggagtttggagtggatgacagctacagcgagcagggcgcccaggacagccccacccacctggagatgatggagagcgagctggccggcaagcagcatgaaattgaggagctgaaccgggagctggaggagatgagggtgacctatggaacagagggcctgcagcagctgcaggagtttgaggccgccatcaagcagagagatggcatcatcacccagctgacagccaacctgcagcaggcccggcgggagaaggatgagaccatgagggagttcctggagctgacagagcagagccagaagctgcagatccagttccagcagctgcaggccagcgagaccctgaggaacagcacccacagcagcacagctgctgacctgctgcaggccaagcagcagatcctgacccaccagcagcagctggaggagcaggaccacctgctggaggactaccagaagaagaaggaggacttcaccatgcagatctccttcctgcaggagaagatcaaggtgtatgagatggagcaggacaagaaggtggagaacagcaacaaggaggagatccaggagaaggagaccatcatcgaggagctgaacaccaagatcatcgaggaggagaagaagaccctggagctgaaggacaagctgaccacagctgacaagctgctgggggagctgcaggagcagatcgtgcagaagaaccaggagatcaagaacatgaagctggagctgaccaacagcaagcagaaggagcggcagagcagcgaggagatcaagcagctgatgggcaccgtggaggagctgcagaagaggaaccacaaggacagccagtttgaaacagacatcgtgcagaggatggagcaggagacccagaggaagctggagcagctgcgggcagagctggatgagatgtatggccagcagatcgtgcagatgaagcaggagctgatccggcagcacatggcccagatggaggagatgaagaccaggcacaagggggagatggagaatgccctgcggagctacagcaacatcaccgtgaatgaagaccagatcaagctgatgaatgtggccatcaatgagctgaacatcaagctgcaggacaccaacagccagaaggagaagctgaaggaggagctgggcctcatcctggaggagaagtgtgccctgcagaggcagctggaggacctggtggaggagctgtccttcagccgggagcagatccagagggcccggcagaccatcgccgagcaggagagcaagctgaatgaggcccacaagagcctgagcacagtggaggacctgaaggccgagatcgtgtctgccagcgagagcaggaaggagctggagctgaagcatgaagctgaggtgaccaactacaagatcaagctggagatgctggagaaggagaagaatgctgtgctggacaggatggccgagagccaggaggccgagctggagcggctgcggacccagctgctcttcagccatgaggaggagctgagcaagctgaaggaggacctggagattgagcaccgcatcaacatcgagaagctgaaggacaacctgggcatccactacaagcagcagattgatggcctgcagaatgagatgagccagaagattgagaccatgcagtttgagaaggacaacctgatcaccaagcagaaccagctgatcctggagatcagcaagctgaaggacctgcagcagagcctggtgaacagcaagtctgaggagatgaccctgcagatcaatgagctgcagaaggagattgagatcctgcggcaggaggagaaggagaagggcaccctggagcaggaggtgcaggagctgcagctgaagacagagctgctggagaagcagatgaaggagaaggaaaatgacctgcaggagaagtttgcccagctggaggccgagaacagcatcctgaaggatgagaagaagaccctggaggacatgctgaagatccacacccctgtgtcccaggaggagcggctcatcttcctggacagcatcaagagcaagagcaaggacagcgtgtgggagaaggagattgagatcctgattgaggagaatgaagacctgaagcagcagtgcatccagctgaatgaggagattgagaagcagaggaacaccttctcctttgctgagaagaactttgaggtgaactaccaggagctgcaggaggagtatgcctgcctgctgaaggtgaaggatgacctggaggacagcaagaacaagcaggagctggagtacaagagcaagctgaaggccctgaatgaggagctgcacctgcagaggatcaaccccaccaccgtgaagatgaagagctctgtgtttgatgaggacaagacctttgtggccgagaccctggagatgggagaggtggtggagaaggacaccacagagctgatggagaagctggaggtgaccaagcgggagaagctggagctgagccagaggctgagtgacctgtctgagcagctgaagcagaagcacggggagatctccttcctgaatgaggaggtgaagagcctgaagcaggagaaggagcaggtgtccctgcgctgccgggagctggagatcatcatcaaccacaacagagcagaaaatgtgcagagctgtgacacccaggtgagcagcctgctggatggagtggtgaccatgaccagcagaggagctgagggctctgtgtccaaggtgaacaagagctttggagaggagagcaagatcatggtggaggacaaggtgtcctttgagaacatgacagtgggggaggagagcaagcaggagcagctgatcctggaccacctgcccagcgtgaccaaggagagcagcctgcgggccacccagcccagtgaaaatgacaagctgcagaaggagctgaatgtgctgaagtctgagcagaatgacctgcggctgcagatggaggcccagaggatctgcctgagcctggtgtacagcacccacgtggaccaggtgcgggagtacatggagaatgagaaggacaaggccctgtgcagcctgaaggaggagctgatctttgcccaggaggagaagatcaaggagctgcagaagatccaccagctggagctgcagaccatgaagacccaggagactggagatgagggcaagcccctgcacctgctgattggcaagctgcagaaggctgtgtctgaggagtgcagctacttcctgcagaccctgtgcagcgtgctgggggagtactacaccccagccctgaagtgtgaggtgaatgctgaggacaaggagaacagcggggactacatcagtgaaaatgaagatcctgagctgcaggactaccgctatgaggtgcaggacttccaggagaacatgcacaccctgctgaacaaggtgacagaggagtacaacaagctgctggtgctgcagacccggctgagcaagatctggggccagcagacagatggcatgaagctggagtttggagaggagaacctgcccaaggaggagacagagttcctgagcatccacagccagatgaccaacctggaggacattgatgtgaaccacaagagcaagctgagcagcctgcaggacctggagaagaccaagctggaggagcaggtgcaggagctggagagcctcatcagcagcctgcagcagcagctgaaggagacagagcagaactatgaagctgagatccactgcctgcagaagaggctgcaggccgtgtctgagagcacagtgccccccagcctgcctgtggacagcgtggtgatcacagaaagtgatgcccagaggaccatgtacccaggcagctgtgtgaagaagaacattgatggcaccatcgagttctctggagaatttggagtgaaggaggagaccaacatcgtgaagctgctggagaagcagtaccaggagcagctggaggaggaggtggccaaggtgattgtgtccatgagcatcgcctttgcccagcagacagagctgagccgcatcagcggcggcaaggaaaatacagccagcagcaagcaggcccatgctgtgtgccagcaggagcagcactacttcaatgagatgaagctgagccaggaccagatcggcttccagacctttgaaacagtggatgtgaagttcaaggaggagttcaagcccctgagcaaggagctgggggagcacggcaaggagatcctgctgagcaacagcgacccccatgacatccctgagagcaaggactgtgtgctgaccatcagcgaggagatgttcagcaaggacaagaccttcatcgtgcggcagagcatccatgatgagatctctgtgtcctccatggatgccagccggcagctgatgctgaatgaggagcagctggaggacatgaggcaggagctggtgcggcagtaccaggagcaccagcaggccacagagctgctgcggcaggcccacatgaggcagatggagcggcagcgggaggaccaggagcagctgcaggaggagatcaagaggctgaaccggcagctggcccagaggagcagcattgacaatgaaaacctggtgtctgagcgggagcgggtgctgctggaggagctggaggccctgaagcagctgagcctggccggccgggagaagctgtgctgtgagctgaggaacagcagcacccagacccagaatggaaatgaaaaccagggcgaggtggaggagcagaccttcaaggagaaggagctggacaggaagccagaagatgtgcccccagagatcctgagcaatgaaagatatgccctgcagaaggccaacaaccggctgctgaagatcctgctggaggtggtgaagaccacagctgctgtggaggagaccatcggccgccacgtgctgggcatcctggacaggagcagcaagagccagagcagcgccagcctcatctggaggtctgaggccgaggcctctgtgaagagctgtgtgcatgaggagcacaccagggtgacagatgagagcatccccagctacagcggcagtgacatgcccagaaatgacatcaacatgtggagcaaggtgacagaggagggcacagagctgagccagaggctggtgcgcagcggctttgctggaacagaaattgatcctgaaaatgaggagctgatgctgaacatcagcagccggctgcaggccgctgtggagaagctgctggaggccatcagcgagaccagcagccagctggagcacgccaaggtgacccagacagagctgatgagggagagcttccggcagaagcaggaggccacagagagcctgaagtgccaggaggagctgcgggagcggctgcacgaggagagccgggcccgggagcagctggccgtggagctgagcaaggccgagggcgtgattgatggctatgcagatgagaagaccctgtttgagcggcagatccaggagaagacagacatcatcgaccggctggagcaggagctgctgtgtgccagcaaccggctgcaggagctggaggccgagcagcagcagatccaggaggagcgggagctgctgagccggcagaaggaggccatgaaggccgaggccggccctgtggagcagcagctgctgcaggagacagagaagctgatgaaggagaagctggaggtgcagtgccaggccgagaaggtgagagatgacctgcagaagcaggtgaaggccctggagattgatgtggaggagcaggtgagccgcttcatcgagctggagcaggagaagaacacagagctgatggacctgcggcagcagaaccaggccctggagaagcagctggagaagatgaggaagttcctggatgagcaggccatcgaccgggagcacgagagagatgtgttccagcaggagatccagaagctggagcagcagctgaaggtggtgccccgcttccagcccatcagcgagcaccagacccgggaggtggagcagctggccaaccacctgaaggagaagacagacaagtgcagcgagctgctgctgagcaaggagcagctgcagagggacatccaggagagaaatgaggagattgagaagctggagttccgggtgcgggagctggagcaggccctgctggtgtctgctgacaccttccagaaggtggaggacaggaagcactttggagctgtggaggccaagccagagctgagcctggaggtgcagctgcaggccgagagagatgccatcgacaggaaggagaaggagatcaccaacctggaggagcagctggagcagttccgggaggagctggagaacaagaatgaggaggtgcagcagctgcacatgcagctggagatccagaagaaggagagcaccacccggctgcaggagctggagcaggagaacaagctgttcaaggatgacatggagaagctgggcctggccatcaaggagagtgatgccatgagcacccaggaccagcacgtgctgtttgggaagtttgcccagatcatccaggagaaggaggtggagattgaccagctgaatgagcaggtgaccaagctgcagcagcagctgaagatcaccacagacaacaaggtgattgaggagaagaatgaactcatccgggacctggagacccagatcgagtgcctgatgtctgaccaggagtgtgtgaagaggaaccgggaggaggagattgagcagctgaatgaagtcatcgagaagctgcagcaggagctggccaacatcggccagaagacctccatgaatgcccacagcctgtctgaggaggccgacagcctgaagcaccagctggatgtggtgattgctgagaagctggccctggagcagcaggtggagacagccaatgaggagatgaccttcatgaagaatgtgctgaaggagaccaacttcaagatgaaccagctgacccaggagctgttcagcctgaagcgggagcgggagagcgtggagaagatccagagcatccctgagaacagcgtgaatgtggccatcgaccacctgagcaaggacaagccagagctggaggtggtgctgacagaagatgccctgaagagcctggagaaccagacctacttcaagagctttgaggagaatggcaagggcagcatcatcaacctggagacccggctgctgcagctggagagcacagtgtctgccaaggacctggagctgacccagtgctacaagcagatcaaggacatgcaggagcagggccagtttgaaacagagatgctgcagaagaagatcgtgaacctgcagaagatcgtggaggagaaggtggccgccgccctggtgtcccagatccagctggaggccgtgcaggagtatgccaagttctgccaggacaaccagaccatcagcagcgagcctgagaggaccaacatccagaacctgaaccagctgcgggaggatgagctgggcagtgacatcagcgccctgaccctgcgcatcagcgagctggagagccaggtggtggagatgcacaccagcctcatcctggagaaggagcaggtggagattgctgagaagaatgtgctggagaaggagaagaagctgctggagctgcagaagctgctggagggcaatgagaagaagcagcgggagaaggagaagaagaggagcccccaggatgtggaggtgctgaagaccaccacagagctgttccacagcaatgaggagagcggcttcttcaatgagctggaggccctgcgggcagagagcgtggccaccaaggccgagctggccagctacaaggagaaggccgagaagctgcaggaggagctgctggtgaaggagaccaacatgaccagcctgcagaaggacctgagccaggtgcgggaccacctggccgaggccaaggagaagctgagcatcctggagaaggaggatgaaacagaggtgcaggagagcaagaaggcctgcatgtttgagcccctgcccatcaagctgagcaagagcatcgccagccagacagatggcaccctgaagatcagcagcagcaaccagaccccccagatcctggtgaagaatgccggcatccagatcaacctgcagagtgaatgtagcagcgaggaggtgacagagatcatcagccagttcacagagaagattgagaagatgcaggagctgcacgccgctgagatcctggacatggagagccgccacatcagcgagacagagaccctgaagcgggagcactacgtggccgtgcagctgctgaaggaggagtgtggcaccctgaaggctgtgatccagtgcctgcggagcaaggagggcctgctgcgggctgtgcacaatgaaggcatgcaggtgctgagcctgacagagagcccctacagtgatggagaggaccacagcatccagcaggtgtctgagccctggctggaggagaggaaggcctacatcaacaccatcagcagcctgaaggacctgatcaccaagatgcagctgcagcgggaggccgaggtgtatgacagcagccagagccatgagagcttcagtgactggagaggagagctgctgctggccctgcagcaggtgttcctggaggagaggtctgtgctgctggccgccttcagaacagagctgacagccctgggcaccacagatgctgtgggcctgctgaactgcctggagcagaggatccaggagcagggcgtggagtaccaggccgccatggagtgcctgcagaaggctgacagaagaagcctgctgtctgagatccaggccctgcacgcccagatgaatggaaggaagatcaccctgaagcgggagcaggagagcgagaagcccagccaggagctgctggagtacaacatccagcagaagcagagccagatgctggagatgcaggtggagctgagctccatgaaggaccgggccacagagctgcaggagcagctgagcagcgagaagatggtggtggccgagctgaagtctgagctggcccagaccaagctggagctggagaccaccctgaaggcccagcacaagcacctgaaggagctggaggccttccggctggaggtgaaggacaagacagatgaggtgcacctgctgaatgacaccctggccagcgagcagaagaagagccgggagctgcagtgggccctggagaaggagaaggccaagctgggccgctctgaggagcgggacaaggaggagctggaggacctgaagttcagcctggagagccagaagcagaggaacctgcagctgaacctgctgctggagcagcagaagcagctgctgaatgaaagccagcagaagattgagagccagaggatgctgtatgatgcccagctgtctgaggagcagggcaggaacctggagctgcaggtgctgctggagagcgagaaggtgcgcatccgggagatgagcagcaccctggaccgggagcgggagctgcacgcccagctgcagagcagtgatggcaccggccagagcaggcctcccctgcccagcgaggacctgctgaaggagctgcagaagcagctggaggagaagcacagcagaattgtggagctgctgaatgaaacagagaagtacaagctggacagcctgcagacccggcagcagatggagaaggaccggcaggtgcacaggaagaccctgcagacagagcaggaggccaacacagagggccagaagaagatgcatgagctgcagagcaaggtggaggacctgcagaggcagctggaggagaagaggcagcaggtgtacaagctggacctggagggccagaggctgcagggcatcatgcaggagttccagaagcaggagctggagcgggaggagaagcgggagagccgccgcatcctgtaccagaacctgaatgagcccaccacctggagcctgaccagtgacaggaccaggaactgggtgctgcagcagaagattgaaggagagaccaaggagagcaactatgccaagctgattgagatgaatggaggcggcaccggctgcaaccacgagctggagatgatccggcagaagctgcagtgtgtggccagcaagctgcaggtgctgccccagaaggccagcgagcggctgcagtttgaaacagcagatgatgaggacttcatctgggtgcaggagaacattgatgagatcatcctgcagctgcagaagctgaccggccagcagggcgaggagcccagcctggtgagccccagcaccagctgtggcagcctgacagagcggctgctgcggcagaatgctgagctgaccggccacatcagccagctgacagaggagaagaatgacctgaggaacatggtgatgaagctggaggagcagatccgctggtaccggcagacaggagctggccgggacaacagcagccgcttcagcctgaatggaggagccaacatcgaggccatcatcgccagcgagaaggaggtgtggaaccgggagaagctgaccctgcagaagagcctgaagagagctgaggccgaggtgtacaagctgaaggccgagctgagaaatgacagcctgctgcagaccctgagcccagattctgaacatgtgaccctgaagaggatctacggcaagtacctgcgggcagagagcttcaggaaggccctgatctaccagaagaagtacctgctgctgctgctgggcggcttccaggagtgtgaagatgccaccctggccctgctggccaggatgggcggccagcctgccttcacagacctggaggtgatcaccaaccggcccaagggcttcacccgcttccgctctgctgtgcgggtgtccatcgccatcagcaggatgaagttcctggtgcggcgctggcaccgggtgactggatctgtgtccatcaacatcaacagagatggcttcggcctgaaccagggcgctgagaagacagacagcttctaccacagcagcggcggcctggagctgtatggagagcccaggcacaccacctaccgcagcagaagtgacctggactacatccgcagccccctgcccttccagaaccgctacccaggcaccccagctgacttcaaccctggcagcctggcctgcagccagctgcagaactatgaccctgaccgggccctgacagactacatcacccggctggaggccctgcagaggcggctgggcaccatccagagcggcagcaccacccagttccacgccggcatgagaagatag

SEQ ID NO: 142059 - DNA, 11736 bp, synthetic construct
  misc_feature 1..11736: note = Description of Artificial Sequence: Synthetic coding sequence
  source 1..11736: mol_type = other DNA
atggaggatgaggagcggcagaagaagctggaggccggcaaggccaagattgaggagctgagcctggccttcctggtgcggcagctggcccagttccggcagaggaaggcccagagtgatggccagagccccagcaagaagcagaagaagaagaggaagaccagcagcagcaagcatgatgtgtctgcccaccacgacctgaacatcgaccagagccagtgcaatgagatgtacatcaacagcagccagagggtggagagcaccgtcatccctgagagcaccatcatgaggaccctgcacagcggggagatcaccagccatgagcagggcttctctgtggagctggagagcgagatcagcaccacagcagatgactgcagcagcgaggtgaatggctgcagctttgtgatgaggacaggcaagcccaccaacctgctgcgggaggaggagtttggagtggatgacagctacagcgagcagggcgcccaggacagccccacccacctggagatgatggagagcgagctggccggcaagcagcatgaaattgaggagctgaaccgggagctggaggagatgagggtgacctatggaacagagggcctgcagcagctgcaggagtttgaggccgccatcaagcagagagatggcatcatcacccagctgacagccaacctgcagcaggcccggcgggagaaggatgagaccatgagggagttcctggagctgacagagcagagccagaagctgcagatccagttccagcagctgcaggccagcgagaccctgaggaacagcacccacagcagcacagctgctgacctgctgcaggccaagcagcagatcctgacccaccagcagcagctggaggagcaggaccacctgctggaggactaccagaagaagaaggaggacttcaccatgcagatctccttcctgcaggagaagatcaaggtgtatgagatggagcaggacaagaaggtggagaacagcaacaaggaggagatccaggagaaggagaccatcatcgaggagctgaacaccaagatcatcgaggaggagaagaagaccctggagctgaaggacaagctgaccacagctgacaagctgctgggggagctgcaggagcagatcgtgcagaagaaccaggagatcaagaacatgaagctggagctgaccaacagcaagcagaaggagcggcagagcagcgaggagatcaagcagctgatgggcaccgtggaggagctgcagaagaggaaccacaaggacagccagtttgaaacagacatcgtgcagaggatggagcaggagacccagaggaagctggagcagctgcgggcagagctggatgagatgtatggccagcagatcgtgcagatgaagcaggagctgatccggcagcacatggcccagatggaggagatgaagaccaggcacaagggggagatggagaatgccctgcggagctacagcaacatcaccgtgaatgaagaccagatcaagctgatgaatgtggccatcaatgagctgaacatcaagctgcaggacaccaacagccagaaggagaagctgaaggaggagctgggcctcatcctggaggagaagtgtgccctgcagaggcagctggaggacctggtggaggagctgtccttcagccgggagcagatccagagggcccggcagaccatcgccgagcaggagagcaagctgaatgaggcccacaagagcctgagcacagtggaggacctgaaggccgagatcgtgtctgccagcgagagcaggaaggagctggagctgaagcatgaagctgaggtgaccaactacaagatcaagctggagatgctggagaaggagaagaatgctgtgctggacaggatggccgagagccaggaggccgagctggagcggctgcggacccagctgctcttcagccatgaggaggagctgagcaagctgaaggaggacctggagattgagcaccgcatcaacatcgagaagctgaaggacaacctgggcatccactacaagcagcagattgatggcctgcagaatgagatgagccagaagattgagaccatgcagtttgagaaggacaacctgatcaccaagcagaaccagctgatcctggagatcagcaagctgaaggacctgcagcagagcctggtgaacagcaagtctgaggagatgaccctgcagatcaatgagctgcagaaggagattgagatcctgcggcaggaggagaaggagaagggcaccctggagcaggaggtgcaggagctgcagctgaagacagagctgctggagaagcagatgaaggagaaggaaaatgacctgcaggagaagtttgcccagctggaggccgagaacagcatcctgaaggatgagaagaagaccctggaggacatgctgaagatccacacccctgtgtcccaggaggagcggctcatcttcctggacagcatcaagagcaagagcaaggacagcgtgtgggagaaggagattgagatcctgattgaggagaatgaagacctgaagcagcagtgcatccagctgaatgaggagattgagaagcagaggaacaccttctcctttgctgagaagaactttgaggtgaactaccaggagctgcaggaggagtatgcctgcctgctgaaggtgaaggatgacctggaggacagcaagaacaagcaggagctggagtacaagagcaagctgaaggccctgaatgaggagctgcacctgcagaggatcaaccccaccaccgtgaagatgaagagctctgtgtttgatgaggacaagacctttgtggccgagaccctggagatgggagaggtggtggagaaggacaccacagagctgatggagaagctggaggtgaccaagcgggagaagctggagctgagccagaggctgagtgacctgtctgagcagctgaagcagaagcacggggagatctccttcctgaatgaggaggtgaagagcctgaagcaggagaaggagcaggtgtccctgcgctgccgggagctggagatcatcatcaaccacaacagagcagaaaatgtgcagagctgtgacacccaggtgagcagcctgctggatggagtggtgaccatgaccagcagaggagctgagggctctgtgtccaaggtgaacaagagctttggagaggagagcaagatcatggtggaggacaaggtgtcctttgagaacatgacagtgggggaggagagcaagcaggagcagctgatcctggaccacctgcccagcgtgaccaaggagagcagcctgcgggccacccagcccagtgaaaatgacaagctgcagaaggagctgaatgtgctgaagtctgagcagaatgacctgcggctgcagatggaggcccagaggatctgcctgagcctggtgtacagcacccacgtggaccaggtgcgggagtacatggagaatgagaaggacaaggccctgtgcagcctgaaggaggagctgatctttgcccaggaggagaagatcaaggagctgcagaagatccaccagctggagctgcagaccatgaagacccaggagactggagatgagggcaagcccctgcacctgctgattggcaagctgcagaaggctgtgtctgaggagtgcagctacttcctgcagaccctgtgcagcgtgctgggggagtactacaccccagccctgaagtgtgaggtgaatgctgaggacaaggagaacagcggggactacatcagtgaaaatgaagatcctgagctgcaggactaccgctatgaggtgcaggacttccaggagaacatgcacaccctgctgaacaaggtgacagaggagtacaacaagctgctggtgctgcagacccggctgagcaagatctggggccagcagacagatggcatgaagctggagtttggagaggagaacctgcccaaggaggagacagagttcctgagcatccacagccagatgaccaacctggaggacattgatgtgaaccacaagagcaagctgagcagcctgcaggacctggagaagaccaagctggaggagcaggtgcaggagctggagagcctcatcagcagcctgcagcagcagctgaaggagacagagcagaactatgaagctgagatccactgcctgcagaagaggctgcaggccgtgtctgagagcacagtgccccccagcctgcctgtggacagcgtggtgatcacagaaagtgatgcccagaggaccatgtacccaggcagctgtgtgaagaagaacattgatggcaccatcgagttctctggagaatttggagtgaaggaggagaccaacatcgtgaagctgctggagaagcagtaccaggagcagctggaggaggaggtggccaaggtgattgtgtccatgagcatcgcctttgcccagcagacagagctgagccgcatcagcggcggcaaggaaaatacagccagcagcaagcaggcccatgctgtgtgccagcaggagcagcactacttcaatgagatgaagctgagccaggaccagatcggcttccagacctttgaaacagtggatgtgaagttcaaggaggagttcaagcccctgagcaaggagctgggggagcacggcaaggagatcctgctgagcaacagcgacccccatgacatccctgagagcaaggactgtgtgctgaccatcagcgaggagatgttcagcaaggacaagaccttcatcgtgcggcagagcatccatgatgagatctctgtgtcctccatggatgccagccggcagctgatgctgaatgaggagcagctggaggacatgaggcaggagctggtgcggcagtaccaggagcaccagcaggccacagagctgctgcggcaggcccacatgaggcagatggagcggcagcgggaggaccaggagcagctgcaggaggagatcaagaggctgaaccggcagctggcccagaggagcagcattgacaatgaaaacctggtgtctgagcgggagcgggtgctgctggaggagctggaggccctgaagcagctgagcctggccggccgggagaagctgtgctgtgagctgaggaacagcagcacccagacccagaatggaaatgaaaaccagggcgaggtggaggagcagaccttcaaggagaaggagctggacaggaagccagaagatgtgcccccagagatcctgagcaatgaaagatatgccctgcagaaggccaacaaccggctgctgaagatcctgctggaggtggtgaagaccacagctgctgtggaggagaccatcggccgccacgtgctgggcatcctggacaggagcagcaagagccagagcagcgccagcctcatctggaggtctgaggccgaggcctctgtgaagagctgtgtgcatgaggagcacaccagggtgacagatgagagcatccccagctacagcggcagtgacatgcccagaaatgacatcaacatgtggagcaaggtgacagaggagggcacagagctgagccagaggctggtgcgcagcggctttgctggaacagaaattgatcctgaaaatgaggagctgatgctgaacatcagcagccggctgcaggccgctgtggagaagctgctggaggccatcagcgagaccagcagccagctggagcacgccaaggtgacccagacagagctgatgagggagagcttccggcagaagcaggaggccacagagagcctgaagtgccaggaggagctgcgggagcggctgcacgaggagagccgggcccgggagcagctggccgtggagctgagcaaggccgagggcgtgattgatggctatgcagatgagaagaccctgtttgagcggcagatccaggagaagacagacatcatcgaccggctggagcaggagctgctgtgtgccagcaaccggctgcaggagctggaggccgagcagcagcagatccaggaggagcgggagctgctgagccggcagaaggaggccatgaaggccgaggccggccctgtggagcagcagctgctgcaggagacagagaagctgatgaaggagaagctggaggtgcagtgccaggccgagaaggtgagagatgacctgcagaagcaggtgaaggccctggagattgatgtggaggagcaggtgagccgcttcatcgagctggagcaggagaagaacacagagctgatggacctgcggcagcagaaccaggccctggagaagcagctggagaagatgaggaagttcctggatgagcaggccatcgaccgggagcacgagagagatgtgttccagcaggagatccagaagctggagcagcagctgaaggtggtgccccgcttccagcccatcagcgagcaccagacccgggaggtggagcagctggccaaccacctgaaggagaagacagacaagtgcagcgagctgctgctgagcaaggagcagctgcagagggacatccaggagagaaatgaggagattgagaagctggagttccgggtgcgggagctggagcaggccctgctggtgtctgctgacaccttccagaaggtggaggacaggaagcactttggagctgtggaggccaagccagagctgagcctggaggtgcagctgcaggccgagagagatgccatcgacaggaaggagaaggagatcaccaacctggaggagcagctggagcagttccgggaggagctggagaacaagaatgaggaggtgcagcagctgcacatgcagctggagatccagaagaaggagagcaccacccggctgcaggagctggagcaggagaacaagctgttcaaggatgacatggagaagctgggcctggccatcaaggagagtgatgccatgagcacccaggaccagcacgtgctgtttgggaagtttgcccagatcatccaggagaaggaggtggagattgaccagctgaatgagcaggtgaccaagctgcagcagcagctgaagatcaccacagacaacaaggtgattgaggagaagaatgaactcatccgggacctggagacccagatcgagtgcctgatgtctgaccaggagtgtgtgaagaggaaccgggaggaggagattgagcagctgaatgaagtcatcgagaagctgcagcaggagctggccaacatcggccagaagacctccatgaatgcccacagcctgtctgaggaggccgacagcctgaagcaccagctggatgtggtgattgctgagaagctggccctggagcagcaggtggagacagccaatgaggagatgaccttcatgaagaatgtgctgaaggagaccaacttcaagatgaaccagctgacccaggagctgttcagcctgaagcgggagcgggagagcgtggagaagatccagagcatccctgagaacagcgtgaatgtggccatcgaccacctgagcaaggacaagccagagctggaggtggtgctgacagaagatgccctgaagagcctggagaaccagacctacttcaagagctttgaggagaatggcaagggcagcatcatcaacctggagacccggctgctgcagctggagagcacagtgtctgccaaggacctggagctgacccagtgctacaagcagatcaaggacatgcaggagcagggccagtttgaaacagagatgctgcagaagaagatcgtgaacctgcagaagatcgtggaggagaaggtggccgccgccctggtgtcccagatccagctggaggccgtgcaggagtatgccaagttctgccaggacaaccagaccatcagcagcgagcctgagaggaccaacatccagaacctgaaccagctgcgggaggatgagctgggcagtgacatcagcgccctgaccctgcgcatcagcgagctggagagccaggtggtggagatgcacaccagcctcatcctggagaaggagcaggtggagattgctgagaagaatgtgctggagaaggagaagaagctgctggagctgcagaagctgctggagggcaatgagaagaagcagcgggagaaggagaagaagaggagcccccaggatgtggaggtgctgaagaccaccacagagctgttccacagcaatgaggagagcggcttcttcaatgagctggaggccctgcgggcagagagcgtggccaccaaggccgagctggccagctacaaggagaaggccgagaagctgcaggaggagctgctggtgaaggagaccaacatgaccagcctgcagaaggacctgagccaggtgcgggaccacctggccgaggccaaggagaagctgagcatcctggagaaggaggatgaaacagaggtgcaggagagcaagaaggcctgcatgtttgagcccctgcccatcaagctgagcaagagcatcgccagccagacagatggcaccctgaagatcagcagcagcaaccagaccccccagatcctggtgaagaatgccggcatccagatcaacctgcagagtgaatgtagcagcgaggaggtgacagagatcatcagccagttcacagagaagattgagaagatgcaggagctgcacgccgctgagatcctggacatggagagccgccacatcagcgagacagagaccctgaagcgggagcactacgtggccgtgcagctgctgaaggaggagtgtggcaccctgaaggctgtgatccagtgcctgcggagcaaggaggtgtttggcttctacaacatgtgcttcagcaccctgtgtgacagcggcagtgactggggccagggcatctacctgacccacagccagggctttgatattgccagcgagggccgcggggaggagagcgagagcgccacagacagcttccccaagaagatcaagggcctgctgcgggctgtgcacaatgaaggcatgcaggtgctgagcctgacagagagcccctacagtgatggagaggaccacagcatccagcaggtgtctgagccctggctggaggagaggaaggcctacatcaacaccatcagcagcctgaaggacctgatcaccaagatgcagctgcagcgggaggccgaggtgtatgacagcagccagagccatgagagcttcagtgactggagaggagagctgctgctggccctgcagcaggtgttcctggaggagaggtctgtgctgctggccgccttcagaacagagctgacagccctgggcaccacagatgctgtgggcctgctgaactgcctggagcagaggatccaggagcagggcgtggagtaccaggccgccatggagtgcctgcagaaggctgacagaagaagcctgctgtctgagatccaggccctgcacgcccagatgaatggaaggaagatcaccctgaagcgggagcaggagagcgagaagcccagccaggagctgctggagtacaacatccagcagaagcagagccagatgctggagatgcaggtggagctgagctccatgaaggaccgggccacagagctgcaggagcagctgagcagcgagaagatggtggtggccgagctgaagtctgagctggcccagaccaagctggagctggagaccaccctgaaggcccagcacaagcacctgaaggagctggaggccttccggctggaggtgaaggacaagacagatgaggtgcacctgctgaatgacaccctggccagcgagcagaagaagagccgggagctgcagtgggccctggagaaggagaaggccaagctgggccgctctgaggagcgggacaaggaggagctggaggacctgaagttcagcctggagagccagaagcagaggaacctgcagctgaacctgctgctggagcagcagaagcagctgctgaatgaaagccagcagaagattgagagccagaggatgctgtatgatgcccagctgtctgaggagcagggcaggaacctggagctgcaggtgctgctggagagcgagaaggtgcgcatccgggagatgagcagcaccctggaccgggagcgggagctgcacgcccagctgcagagcagtgatggcaccggccagagcaggcctcccctgcccagcgaggacctgctgaaggagctgcagaagcagctggaggagaagcacagcagaattgtggagctgctgaatgaaacagagaagtacaagctggacagcctgcagacccggcagcagatggagaaggaccggcaggtgcacaggaagaccctgcagacagagcaggaggccaacacagagggccagaagaagatgcatgagctgcagagcaaggtggaggacctgcagaggcagctggaggagaagaggcagcaggtgtacaagctggacctggagggccagaggctgcagggcatcatgcaggagttccagaagcaggagctggagcgggaggagaagcgggagagccgccgcatcctgtaccagaacctgaatgagcccaccacctggagcctgaccagtgacaggaccaggaactgggtgctgcagcagaagattgaaggagagaccaaggagagcaactatgccaagctgattgagatgaatggaggcggcaccggctgcaaccacgagctggagatgatccggcagaagctgcagtgtgtggccagcaagctgcaggtgctgccccagaaggccagcgagcggctgcagtttgaaacagcagatgatgaggacttcatctgggtgcaggagaacattgatgagatcatcctgcagctgcagaagctgaccggccagcagggcgaggagcccagcctggtgagccccagcaccagctgtggcagcctgacagagcggctgctgcggcagaatgctgagctgaccggccacatcagccagctgacagaggagaagaatgacctgaggaacatggtgatgaagctggaggagcagatccgctggtaccggcagacaggagctggccgggacaacagcagccgcttcagcctgaatggaggagccaacatcgaggccatcatcgccagcgagaaggaggtgtggaaccgggagaagctgaccctgcagaagagcctgaagagagctgaggccgaggtgtacaagctgaaggccgagctgagaaatgacagcctgctgcagaccctgagcccagattctgaacatgtgaccctgaagaggatctacggcaagtacctgcgggcagagagcttcaggaaggccctgatctaccagaagaagtacctgctgctgctgctgggcggcttccaggagtgtgaagatgccaccctggccctgctggccaggatgggcggccagcctgccttcacagacctggaggtgatcaccaaccggcccaagggcttcacccgcttccgctctgctgtgcgggtgtccatcgccatcagcaggatgaagttcctggtgcggcgctggcaccgggtgactggatctgtgtccatcaacatcaacagagatggcttcggcctgaaccagggcgctgagaagacagacagcttctaccacagcagcggcggcctggagctgtatggagagcccaggcacaccacctaccgcagcagaagtgacctggactacatccgcagccccctgcccttccagaaccgctacccaggcaccccagctgacttcaaccctggcagcctggcctgcagccagctgcagaactatgaccctgaccgggccctgacagactacatcacccggctggaggccctgcagaggcggctgggcaccatccagagcggcagcaccacccagttccacgccggcatgagaagatag

SEQ ID NO: 142060 - DNA, 4932 bp, synthetic construct
  misc_feature 1..4932: note = Description of Artificial Sequence: Synthetic coding sequence
  source 1..4932: mol_type = other DNA
atggaggatgaggagcggcagaagaagctggaggccggcaaggccaagattgaggagctgagcctggccttcctggtgcggcagctggcccagttccggcagaggaaggcccagagtgatggccagagccccagcaagaagcagaagaagaagaggaagaccagcagcagcaagcatgatgtgtctgcccaccacgacctgaacatcgaccagagccagtgcaatgagatgtacatcaacagcagccagagggtggagagcaccgtcatccctgagagcaccatcatgaggaccctgcacagcggggagatcaccagccatgagcagggcttctctgtggagctggagagcgagatcagcaccacagcagatgactgcagcagcgaggtgaatggctgcagctttgtgatgaggacaggcaagcccaccaacctgctgcgggaggaggagtttggagtggatgacagctacagcgagcagggcgcccaggacagccccacccacctggagatgatggagagcgagctggccggcaagcagcatgaaattgaggagctgaaccgggagctggaggagatgagggtgacctatggaacagagggcctgcagcagctgcaggagtttgaggccgccatcaagcagagagatggcatcatcacccagctgacagccaacctgcagcaggcccggcgggagaaggatgagaccatgagggagttcctggagctgacagagcagagccagaagctgcagatccagttccagcagctgcaggccagcgagaccctgaggaacagcacccacagcagcacagctgctgacctgctgcaggccaagcagcagatcctgacccaccagcagcagctggaggagcaggaccacctgctggaggactaccagaagaagaaggaggacttcaccatgcagatctccttcctgcaggagaagatcaaggtgtatgagatggagcaggacaagaaggtggagaacagcaacaaggaggagatccaggagaaggagaccatcatcgaggagctgaacaccaagatcatcgaggaggagaagaagaccctggagctgaaggacaagctgaccacagctgacaagctgctgggggagctgcaggagcagatcgtgcagaagaaccaggagatcaagaacatgaagctggagctgaccaacagcaagcagaaggagcggcagagcagcgaggagatcaagcagctgatgggcaccgtggaggagctgcagaagaggaaccacaaggacagccagtttgaaacagacatcgtgcagaggatggagcaggagacccagaggaagctggagcagctgcgggcagagctggatgagatgtatggccagcagatcgtgcagatgaagcaggagctgatccggcagcacatggcccagatggaggagatgaagaccaggcacaagggggagatggagaatgccctgcggagctacagcaacatcaccgtgaatgaagaccagatcaagctgatgaatgtggccatcaatgagctgaacatcaagctgcaggacaccaacagccagaaggagaagctgaaggaggagctgggcctcatcctggaggagaagtgtgccctgcagaggcagctggaggacctggtggaggagctgtccttcagccgggagcagatccagagggcccggcagaccatcgccgagcaggagagcaagctgaatgaggcccacaagagcctgagcacagtggaggacctgaaggccgagatcgtgtctgccagcgagagcaggaaggagctggagctgaagcatgaagctgaggtgaccaactacaagatcaagctggagatgctggagaaggagaagaatgctgtgctggacaggatggccgagagccaggaggccgagctggagcggctgcggacccagctgctcttcagccatgaggaggagctgagcaagctgaaggaggacctggagattgagcaccgcatcaacatcgagaagctgaaggacaacctgggcatccactacaagcagcagattgatggcctgcagaatgagatgagccagaagattgagaccatgcagtttgagaaggacaacctgatcaccaagcagaaccagctgatcctggagatcagcaagctgaaggacctgcagcagagcctggtgaacagcaagtctgaggagatgaccctgcagatcaatgagctgcagaaggagattgagatcctgcggcaggaggagaaggagaagggcaccctggagcaggaggtgcaggagctgcagctgaagacagagctgctggagaagcagatgaaggagaaggaaaatgacctgcaggagaagtttgcccagctggaggccgagaacagcatcctgaaggatgagaagaagaccctggaggacatgctgaagatccacacccctgtgtcccaggaggagcggctcatcttcctggacagcatcaagagcaagagcaaggacagcgtgtgggagaaggagattgagatcctgattgaggagaatgaagacctgaagcagcagtgcatccagctgaatgaggagattgagaagcagaggaacaccttctcctttgctgagaagaactttgaggtgaactaccaggagctgcaggaggagtatgcctgcctgctgaaggtgaaggatgacctggaggacagcaagaacaagcaggagctggagtacaagagcaagctgaaggccctgaatgaggagctgcacctgcagaggatcaaccccaccaccgtgaagatgaagagctctgtgtttgatgaggacaagacctttgtggccgagaccctggagatgggagaggtggtggagaaggacaccacagagctgatggagaagctggaggtgaccaagcgggagaagctggagctgagccagaggctgagtgacctgtctgagcagctgaagcagaagcacggggagatctccttcctgaatgaggaggtgaagagcctgaagcaggagaaggagcaggtgtccctgcgctgccgggagctggagatcatcatcaaccacaacagagcagaaaatgtgcagagctgtgacacccaggtgagcagcctgctggatggagtggtgaccatgaccagcagaggagctgagggctctgtgtccaaggtgaacaagagctttggagaggagagcaagatcatggtggaggacaaggtgtcctttgagaacatgacagtgggggaggagagcaagcaggagcagctgatcctggaccacctgcccagcgtgaccaaggagagcagcctgcgggccacccagcccagtgaaaatgacaagctgcagaaggagctgaatgtgctgaagtctgagcagaatgacctgcggctgcagatggaggcccagaggatctgcctgagcctggtgtacagcacccacgtggaccaggtgcgggagtacatggagaatgagaaggacaaggccctgtgcagcctgaaggaggagctgatctttgcccaggaggagaagatcaaggagctgcagaagatccaccagctggagctgcagaccatgaagacccaggagactggagatgagggcaagcccctgcacctgctgattggcaagctgcagaaggctgtgtctgaggagtgcagctacttcctgcagaccctgtgcagcgtgctgggggagtactacaccccagccctgaagtgtgaggtgaatgctgaggacaaggagaacagcggggactacatcagtgaaaatgaagatcctgagctgcaggactaccgctatgaggtgcaggacttccaggagaacatgcacaccctgctgaacaaggtgacagaggagtacaacaagctgctggtgctgcagacccggctgagcaagatctggggccagcagacagatggcatgaagctggagtttggagaggagaacctgcccaaggaggagacagagttcctgagcatccacagccagatgaccaacctggaggacattgatgtgaaccacaagagcaagctgagcagcctgcaggacctggagaagaccaagctggaggagcaggtgcaggagctggagagcctcatcagcagcctgcagcagcagctgaaggagacagagcagaactatgaagctgagatccactgcctgcagaagaggctgcaggccgtgtctgagagcacagtgccccccagcctgcctgtggacagcgtggtgatcacagaaagtgatgcccagaggaccatgtacccaggcagctgtgtgaagaagaacattgatggcaccatcgagttctctggagaatttggagtgaaggaggagaccaacatcgtgaagctgctggagaagcagtaccaggagcagctggaggaggaggtggccaaggtgattgtgtccatgagcatcgcctttgcccagcagacagagctgagccgcatcagcggcggcaaggaaaatacagccagcagcaagcaggcccatgctgtgtgccagcaggagcagcactacttcaatgagatgaagctgagccaggaccagatcggcttccagacctttgaaacagtggatgtgaagttcaaggaggagttcaagcccctgagcaaggagctgggggagcacggcaaggagatcctgctgagcaacagcgacccccatgacatccctgagagcaaggactgtgtgctgaccatcagcgaggagatgttcagcaaggacaagaccttcatcgtgcggcagagcatccatgatgagatctctgtgtcctccatggatgccagccggcagctgatgctgaatgaggagcagctggaggacatgaggcaggagctggtgcggcagtaccaggagcaccagcaggccacagagctgctgcggcaggcccacatgaggcagatggagcggcagcgggaggaccaggagcagctgcaggtgcgggtgctgtag

SEQ ID NO: 142061 - DNA, 11631 bp, synthetic construct
  misc_feature 1..11631: note = Description of Artificial Sequence: Synthetic coding sequence
  source 1..11631: mol_type = other DNA
atggaggatgaggagcggcagaagaagctggaggccggcaaggccaagattgaggagctgagcctggccttcctggtgcggcagctggcccagttccggcagaggaaggcccagagtgatggccagagccccagcaagaagcagaagaagaagaggaagaccagcagcagcaagcatgatgtgtctgcccaccacgacctgaacatcgaccagagccagtgcaatgagatgtacatcaacagcagccagagggtggagagcaccgtcatccctgagagcaccatcatgaggaccctgcacagcggggagatcaccagccatgagcagggcttctctgtggagctggagagcgagatcagcaccacagcagatgactgcagcagcgaggtgaatggctgcagctttgtgatgaggacaggcaagcccaccaacctgctgcgggaggaggagtttggagtggatgacagctacagcgagcagggcgcccaggacagccccacccacctggagatgatggagagcgagctggccggcaagcagcatgaaattgaggagctgaaccgggagctggaggagatgagggtgacctatggaacagagggcctgcagcagctgcaggagtttgaggccgccatcaagcagagagatggcatcatcacccagctgacagccaacctgcagcaggcccggcgggagaaggatgagaccatgagggagttcctggagctgacagagcagagccagaagctgcagatccagttccagcagctgcaggccagcgagaccctgaggaacagcacccacagcagcacagctgctgacctgctgcaggccaagcagcagatcctgacccaccagcagcagctggaggagcaggaccacctgctggaggactaccagaagaagaaggaggacttcaccatgcagatctccttcctgcaggagaagatcaaggtgtatgagatggagcaggacaagaaggtggagaacagcaacaaggaggagatccaggagaaggagaccatcatcgaggagctgaacaccaagatcatcgaggaggagaagaagaccctggagctgaaggacaagctgaccacagctgacaagctgctgggggagctgcaggagcagatcgtgcagaagaaccaggagatcaagaacatgaagctggagctgaccaacagcaagcagaaggagcggcagagcagcgaggagatcaagcagctgatgggcaccgtggaggagctgcagaagaggaaccacaaggacagccagtttgaaacagacatcgtgcagaggatggagcaggagacccagaggaagctggagcagctgcgggcagagctggatgagatgtatggccagcagatcgtgcagatgaagcaggagctgatccggcagcacatggcccagatggaggagatgaagaccaggcacaagggggagatggagaatgccctgcggagctacagcaacatcaccgtgaatgaagaccagatcaagctgatgaatgtggccatcaatgagctgaacatcaagctgcaggacaccaacagccagaaggagaagctgaaggaggagctgggcctcatcctggaggagaagtgtgccctgcagaggcagctggaggacctggtggaggagctgtccttcagccgggagcagatccagagggcccggcagaccatcgccgagcaggagagcaagctgaatgaggcccacaagagcctgagcacagtggaggacctgaaggccgagatcgtgtctgccagcgagagcaggaaggagctggagctgaagcatgaagctgaggtgaccaactacaagatcaagctggagatgctggagaaggagaagaatgctgtgctggacaggatggccgagagccaggaggccgagctggagcggctgcggacccagctgctcttcagccatgaggaggagctgagcaagctgaaggaggacctggagattgagcaccgcatcaacatcgagaagctgaaggacaacctgggcatccactacaagcagcagattgatggcctgcagaatgagatgagccagaagattgagaccatgcagtttgagaaggacaacctgatcaccaagcagaaccagctgatcctggagatcagcaagctgaaggacctgcagcagagcctggtgaacagcaagtctgaggagatgaccctgcagatcaatgagctgcagaaggagattgagatcctgcggcaggaggagaaggagaagggcaccctggagcaggaggtgcaggagctgcagctgaagacagagctgctggagaagcagatgaaggagaaggaaaatgacctgcaggagaagtttgcccagctggaggccgagaacagcatcctgaaggatgagaagaagaccctggaggacatgctgaagatccacacccctgtgtcccaggaggagcggctcatcttcctggacagcatcaagagcaagagcaaggacagcgtgtgggagaaggagattgagatcctgattgaggagaatgaagacctgaagcagcagtgcatccagctgaatgaggagattgagaagcagaggaacaccttctcctttgctgagaagaactttgaggtgaactaccaggagctgcaggaggagtatgcctgcctgctgaaggtgaaggatgacctggaggacagcaagaacaagcaggagctggagtacaagagcaagctgaaggccctgaatgaggagctgcacctgcagaggatcaaccccaccaccgtgaagatgaagagctctgtgtttgatgaggacaagacctttgtggccgagaccctggagatgggagaggtggtggagaaggacaccacagagctgatggagaagctggaggtgaccaagcgggagaagctggagctgagccagaggctgagtgacctgtctgagcagctgaagcagaagcacggggagatctccttcctgaatgaggaggtgaagagcctgaagcaggagaaggagcaggtgtccctgcgctgccgggagctggagatcatcatcaaccacaacagagcagaaaatgtgcagagctgtgacacccaggtgagcagcctgctggatggagtggtgaccatgaccagcagaggagctgagggctctgtgtccaaggtgaacaagagctttggagaggagagcaagatcatggtggaggacaaggtgtcctttgagaacatgacagtgggggaggagagcaagcaggagcagctgatcctggaccacctgcccagcgtgaccaaggagagcagcctgcgggccacccagcccagtgaaaatgacaagctgcagaaggagctgaatgtgctgaagtctgagcagaatgacctgcggctgcagatggaggcccagaggatctgcctgagcctggtgtacagcacccacgtggaccaggtgcgggagtacatggagaatgagaaggacaaggccctgtgcagcctgaaggaggagctgatctttgcccaggaggagaagatcaaggagctgcagaagatccaccagctggagctgcagaccatgaagacccaggagactggagatgagggcaagcccctgcacctgctgattggcaagctgcagaaggctgtgtctgaggagtgcagctacttcctgcagaccctgtgcagcgtgctgggggagtactacaccccagccctgaagtgtgaggtgaatgctgaggacaaggagaacagcggggactacatcagtgaaaatgaagatcctgagctgcaggactaccgctatgaggtgcaggacttccaggagaacatgcacaccctgctgaacaaggtgacagaggagtacaacaagctgctggtgctgcagacccggctgagcaagatctggggccagcagacagatggcatgaagctggagtttggagaggagaacctgcccaaggaggagacagagttcctgagcatccacagccagatgaccaacctggaggacattgatgtgaaccacaagagcaagctgagcagcctgcaggacctggagaagaccaagctggaggagcaggtgcaggagctggagagcctcatcagcagcctgcagcagcagctgaaggagacagagcagaactatgaagctgagatccactgcctgcagaagaggctgcaggccgtgtctgagagcacagtgccccccagcctgcctgtggacagcgtggtgatcacagaaagtgatgcccagaggaccatgtacccaggcagctgtgtgaagaagaacattgatggcaccatcgagttctctggagaatttggagtgaaggaggagaccaacatcgtgaagctgctggagaagcagtaccaggagcagctggaggaggaggtggccaaggtgattgtgtccatgagcatcgcctttgcccagcagacagagctgagccgcatcagcggcggcaaggaaaatacagccagcagcaagcaggcccatgctgtgtgccagcaggagcagcactacttcaatgagatgaagctgagccaggaccagatcggcttccagacctttgaaacagtggatgtgaagttcaaggaggagttcaagcccctgagcaaggagctgggggagcacggcaaggagatcctgctgagcaacagcgacccccatgacatccctgagagcaaggactgtgtgctgaccatcagcgaggagatgttcagcaaggacaagaccttcatcgtgcggcagagcatccatgatgagatctctgtgtcctccatggatgccagccggcagctgatgctgaatgaggagcagctggaggacatgaggcaggagctggtgcggcagtaccaggagcaccagcaggccacagagctgctgcggcaggcccacatgaggcagatggagcggcagcgggaggaccaggagcagctgcaggaggagatcaagaggctgaaccggcagctggcccagaggagcagcattgacaatgaaaacctggtgtctgagcgggagcgggtgctgctggaggagctggaggccctgaagcagctgagcctggccggccgggagaagctgtgctgtgagctgaggaacagcagcacccagacccagaatggaaatgaaaaccagggcgaggtggaggagcagaccttcaaggagaaggagctggacaggaagccagaagatgtgcccccagagatcctgagcaatgaaagatatgccctgcagaaggccaacaaccggctgctgaagatcctgctggaggtggtgaagaccacagctgctgtggaggagaccatcggccgccacgtgctgggcatcctggacaggagcagcaagagccagagcagcgccagcctcatctggaggtctgaggccgaggcctctgtgaagagctgtgtgcatgaggagcacaccagggtgacagatgagagcatccccagctacagcggcagtgacatgcccagaaatgacatcaacatgtggagcaaggtgacagaggagggcacagagctgagccagaggctggtgcgcagcggctttgctggaacagaaattgatcctgaaaatgaggagctgatgctgaacatcagcagccggctgcaggccgctgtggagaagctgctggaggccatcagcgagaccagcagccagctggagcacgccaaggtgacccagacagagctgatgagggagagcttccggcagaagcaggaggccacagagagcctgaagtgccaggaggagctgcgggagcggctgcacgaggagagccgggcccgggagcagctggccgtggagctgagcaaggccgagggcgtgattgatggctatgcagatgagaagaccctgtttgagcggcagatccaggagaagacagacatcatcgaccggctggagcaggagctgctgtgtgccagcaaccggctgcaggagctggaggccgagcagcagcagatccaggaggagcgggagctgctgagccggcagaaggaggccatgaaggccgaggccggccctgtggagcagcagctgctgcaggagacagagaagctgatgaaggagaagctggaggtgcagtgccaggccgagaaggtgagagatgacctgcagaagcaggtgaaggccctggagattgatgtggaggagcaggtgagccgcttcatcgagctggagcaggagaagaacacagagctgatggacctgcggcagcagaaccaggccctggagaagcagctggagaagatgaggaagttcctggatgagcaggccatcgaccgggagcacgagagagatgtgttccagcaggagatccagaagctggagcagcagctgaaggtggtgccccgcttccagcccatcagcgagcaccagacccgggaggtggagcagctggccaaccacctgaaggagaagacagacaagtgcagcgagctgctgctgagcaaggagcagctgcagagggacatccaggagagaaatgaggagattgagaagctggagttccgggtgcgggagctggagcaggccctgctggtggaggacaggaagcactttggagctgtggaggccaagccagagctgagcctggaggtgcagctgcaggccgagagagatgccatcgacaggaaggagaaggagatcaccaacctggaggagcagctggagcagttccgggaggagctggagaacaagaatgaggaggtgcagcagctgcacatgcagctggagatccagaagaaggagagcaccacccggctgcaggagctggagcaggagaacaagctgttcaaggatgacatggagaagctgggcctggccatcaaggagagtgatgccatgagcacccaggaccagcacgtgctgtttgggaagtttgcccagatcatccaggagaaggaggtggagattgaccagctgaatgagcaggtgaccaagctgcagcagcagctgaagatcaccacagacaacaaggtgattgaggagaagaatgaactcatccgggacctggagacccagatcgagtgcctgatgtctgaccaggagtgtgtgaagaggaaccgggaggaggagattgagcagctgaatgaagtcatcgagaagctgcagcaggagctggccaacatcggccagaagacctccatgaatgcccacagcctgtctgaggaggccgacagcctgaagcaccagctggatgtggtgattgctgagaagctggccctggagcagcaggtggagacagccaatgaggagatgaccttcatgaagaatgtgctgaaggagaccaacttcaagatgaaccagctgacccaggagctgttcagcctgaagcgggagcgggagagcgtggagaagatccagagcatccctgagaacagcgtgaatgtggccatcgaccacctgagcaaggacaagccagagctggaggtggtgctgacagaagatgccctgaagagcctggagaaccagacctacttcaagagctttgaggagaatggcaagggcagcatcatcaacctggagacccggctgctgcagctggagagcacagtgtctgccaaggacctggagctgacccagtgctacaagcagatcaaggacatgcaggagcagggccagtttgaaacagagatgctgcagaagaagatcgtgaacctgcagaagatcgtggaggagaaggtggccgccgccctggtgtcccagatccagctggaggccgtgcaggagtatgccaagttctgccaggacaaccagaccatcagcagcgagcctgagaggaccaacatccagaacctgaaccagctgcgggaggatgagctgggcagtgacatcagcgccctgaccctgcgcatcagcgagctggagagccaggtggtggagatgcacaccagcctcatcctggagaaggagcaggtggagattgctgagaagaatgtgctggagaaggagaagaagctgctggagctgcagaagctgctggagggcaatgagaagaagcagcgggagaaggagaagaagaggagcccccaggatgtggaggtgctgaagaccaccacagagctgttccacagcaatgaggagagcggcttcttcaatgagctggaggccctgcgggcagagagcgtggccaccaaggccgagctggccagctacaaggagaaggccgagaagctgcaggaggagctgctggtgaaggagaccaacatgaccagcctgcagaaggacctgagccaggtgcgggaccacctggccgaggccaaggagaagctgagcatcctggagaaggaggatgaaacagaggtgcaggagagcaagaaggcctgcatgtttgagcccctgcccatcaagctgagcaagagcatcgccagccagacagatggcaccctgaagatcagcagcagcaaccagaccccccagatcctggtgaagaatgccggcatccagatcaacctgcagagtgaatgtagcagcgaggaggtgacagagatcatcagccagttcacagagaagattgagaagatgcaggagctgcacgccgctgagatcctggacatggagagccgccacatcagcgagacagagaccctgaagcgggagcactacgtggccgtgcagctgctgaaggaggagtgtggcaccctgaaggctgtgatccagtgcctgcggagcaaggagggcagcagcatccctgagctggcccacagtgatgcctaccagacccgggagatctgcagcagtgacagcggcagtgactggggccagggcatctacctgacccacagccagggctttgatattgccagcgagggccgcggggaggagagcgagagcgccacagacagcttccccaagaagatcaagggcctgctgcgggctgtgcacaatgaaggcatgcaggtgctgagcctgacagagagcccctacagtgatggagaggaccacagcatccagcaggtgtctgagccctggctggaggagaggaaggcctacatcaacaccatcagcagcctgaaggacctgatcaccaagatgcagctgcagcgggaggccgaggtgtatgacagcagccagagccatgagagcttcagtgactggagaggagagctgctgctggccctgcagcaggtgttcctggaggagaggtctgtgctgctggccgccttcagaacagagctgacagccctgggcaccacagatgctgtgggcctgctgaactgcctggagcagaggatccaggagcagggcgtggagtaccaggccgccatggagtgcctgcagaaggctgacagaagaagcctgctgtctgagatccaggccctgcacgcccagatgaatggaaggaagatcaccctgaagcgggagcaggagagcgagaagcccagccaggagctgctggagtacaacatccagcagaagcagagccagatgctggagatgcaggtggagctgagctccatgaaggaccgggccacagagctgcaggagcagctgagcagcgagaagatggtggtggccgagctgaagtctgagctggcccagaccaagctggagctggagaccaccctgaaggcccagcacaagcacctgaaggagctggaggccttccggctggaggtgaaggacaagacagatgaggtgcacctgctgaatgacaccctggccagcgagcagaagaagagccgggagctgcagtgggccctggagaaggagaaggccaagctgggccgctctgaggagcgggacaaggaggagctggaggacctgaagttcagcctggagagccagaagcagaggaacctgcagctgaacctgctgctggagcagcagaagcagctgctgaatgaaagccagcagaagattgagagccagaggatgctgtatgatgcccagctgtctgaggagcagggcaggaacctggagctgcaggtgctgctggagagcgagaaggtgcgcatccgggagatgagcagcaccctggaccgggagcgggagctgcacgcccagctgcagagcagtgatggcaccggccagagcaggcctcccctgcccagcgaggacctgctgaaggagctgcagaagcagctggaggagaagcacagcagaattgtggagctgctgaatgaaacagagaagtacaagctggacagcctgcagacccggcagcagatggagaaggaccggcaggtgcacaggaagaccctgcagacagagcaggaggccaacacagagggccagaagaagatgcatgagctgcagagcaaggtggaggacctgcagaggcagctggaggagaagaggcagcaggtgtacaagctggacctggagggccagaggctgcagggcatcatgcaggagttccagaagcaggagctggagcgggaggagaagcgggagagccgccgcatcctgtaccagaacctgaatgagcccaccacctggagcctgaccagtgacaggaccaggaactgggtgctgcagcagaagattgaaggagagaccaaggagagcaactatgccaagctgattgagatgaatggaggcggcaccggctgcaaccacgagctggagatgatccggcagaagctgcagtgtgtggccagcaagctgcaggtgctgccccagaaggccagcgagcggctgcagtttgaaacagcagatgatgaggacttcatctgggtgcaggagaacattgatgagatcatcctgcagctgcagaagctgaccggccagcagggcgaggagcccagcctggtgagccccagcaccagctgtggcagcctgacagagcggctgctgcggcagaatgctgagctgaccggccacatcagccagctgacagaggagaagaatgacctgaggaacatggtgatgaagctggaggagcagatccgctggtaccggcagacaggagctggccgggacaacagcagccgcttcagcctgaatggaggagccaacatcgaggccatcatcgccagcgagaaggaggtgtggaaccgggagaagctgaccctgcagaagagcctgaagagagctgaggccgaggtgtacaagctgaaggccgagctgagaaatgacagcctgctgcagaccctgagcccagattctgaacatgtgaccctgaagaggatctacggcaagtacctgcgggcagagagcttcaggaaggccctgatctaccagaagaagtacctgctgctgctgctgggcggcttccaggagtgtgaagatgccaccctggccctgctggccaggatgggcggccagcctgccttcacagacctggaggtgatcaccaaccggcccaagggcttcacccgcttccgctctgctgtgcgggtgtccatcgccatcagcaggatgaagttcctggtgcggcgctggcaccgggtgactggatctgtgtccatcaacatcaacagagatggcttcggcctgaaccagggcgctgagaagacagacagcttctaccacagcagcggcggcctggagctgtatggagagcccaggcacaccacctaccgcagcagaagtgacctggactacatccgcagccccctgcccttccagaaccgctacccaggcaccccagctgacttcaaccctggcagcctggcctgcagccagctgcagaactatgacccctag

SEQ ID NO: 142062 - DNA, 1782 bp, synthetic construct
  misc_feature 1..1782: note = Description of Artificial Sequence: Synthetic coding sequence
  source 1..1782: mol_type = other DNA
atggccatccagttccgcagcctcttccccctggccctgcccggcatgctggccctgctgggctggtggtggttcttcagcaggaagaagggccacgtgagcagccatgatgagcagcaggtggaggccggggctgtgcagctgcgggctgaccctgccatcaaggagcccctgcctgtggaggatgtgtgccccaaggtggtgtccaccccaccttctgtgacagagcccccagagaaggagctgagcacagtgtccaagctgcctgctgagcccccagccctgctgcagacccaccccccctgcagaagaagtgagagcagcggcatcctgcccaacaccacagacatgaggctgcggcccggcaccaggagagatgacagcaccaagctggagctggccctgaccggcggggaggccaagagcatccccctggagtgccccctgagcagccccaagggcgtgctcttcagcagcaagtctgctgaggtgtgcaagcaggacagccccttcagccgggtgcccaggaaggtgcagcccggctaccctgtggtgcctgctgagaagaggagcagcggggagcgggcccgggagactggaggagctgagggcactggagatgctgtgctgggggagaaggtgctggaggaggccctgctgagccgggagcacgtgctggagctggagaacagcaagggccccagcctggccagcctggagggggaggaggacaagggcaagagcagcagcagccaggtggtgggccctgtgcaggaggaggagtatgtggccgagaagctgcccagccgcttcatcgagagcgcccacacagagctggccaaggatgatgctgccccagcccctcctgtggctgatgccaaggcccaggacagaggagtggagggggagctgggcaatgaggagagcctggacagaaatgaggagggcctggacagaaatgaggagggcctggacagaaatgaggagagcctggacagaaatgaggagggcctggacagaaatgaggagatcaagagagctgccttccagatcatcagccaggtgatcagcgaggccacagagcaggtgctggccaccaccgtgggcaaggtggccggccgggtgtgccaggccagccagctgcagggccagaaggaggagagctgtgtgcctgtgcaccagaagacagtgctgggccctgacacagctgagcccgccacagctgaggccgctgtggcccccccagatgctggcctgcccctgcccggcctgcctgctgagggcagccccccacccaagacctacgtgtcctgcctgaagagcctgctgagcagccccaccaaggacagcaagcccaacatcagcgcccaccacatcagcctggccagctgcctggccctgaccaccccatctgaggagctgcctgaccgggccggcatcctggtggaggatgccacctgtgtgacctgcatgtctgacagcagccagagcgtgcccctggtggccagccctggccactgcagcgacagcttcagcaccagcggcctggaggacagctgcacagagaccagcagcagcccccgggacaaggccatcaccccacccctgcctgagagcacagtgcccttcagcaatggagtgctgaagggggagctgagtgacctgggcgcagaagatggctggaccatggatgctgaggccgaccacagcggcgtggccgcccctcctcctgggaagaggggcaccctcatcacccgctgccccggcttctttgagtgctag

SEQ ID NO: 142063 - DNA, 2712 bp, synthetic construct
  misc_feature 1..2712: note = Description of Artificial Sequence: Synthetic coding sequence
  source 1..2712: mol_type = other DNA
atggccatccagttccgcagcctcttccccctggccctgcccggcatgctggccctgctgggctggtggtggttcttcagcaggaagaagggccacgtgagcagccatgatgagcagcaggtggaggccggggctgtgcagctgcgggctgaccctgccatcaaggagcccctgcctgtggaggatgtgtgccccaaggtggtgtccaccccaccttctgtgacagagcccccagagaaggagctgagcacagtgtccaagctgcctgctgagcccccagccctgctgcagacccaccccccctgcagaagaagtgagagcagcggcatcctgcccaacaccacagacatgaggctgcggcccggcaccaggagagatgacagcaccaagctggagctggccctgaccggcggggaggccaagagcatccccctggagtgccccctgagcagccccaagggcgtgctcttcagcagcaagtctgctgaggtgtgcaagcaggacagccccttcagccgggtgcccaggaaggtgcagcccggctaccctgtggtgcctgctgagaagaggagcagcggggagcgggcccgggagactggaggagctgagggcactggagatgctgtgctgggggagaaggtgctggaggaggccctgctgagccgggagcacgtgctggagctggagaacagcaagggccccagcctggccagcctggagggggaggaggacaagggcaagagcagcagcagccaggtggtgggccctgtgcaggaggaggagtatgtggccgagaagctgcccagccgcttcatcgagagcgcccacacagagctggccaaggatgatgctgccccagcccctcctgtggctgatgccaaggcccaggacagaggagtggagggggagctgggcaatgaggagagcctggacagaaatgaggagggcctggacagaaatgaggagggcctggacagaaatgaggagagcctggacagaaatgaggagggcctggacagaaatgaggagatcaagagagctgccttccagatcatcagccaggtgatcagcgaggccacagagcaggtgctggccaccaccgtgggcaaggtggccggccgggtgtgccaggccagccagctgcagggccagaaggaggagagctgtgtgcctgtgcaccagaagacagtgctgggccctgacacagctgagcccgccacagctgaggccgctgtggcccccccagatgctggcctgcccctgcccggcctgcctgctgagggcagccccccacccaagacctacgtgtcctgcctgaagagcctgctgagcagccccaccaaggacagcaagcccaacatcagcgcccaccacatcagcctggccagctgcctggccctgaccaccccatctgaggagctgcctgaccgggccggcatcctggtggaggatgccacctgtgtgacctgcatgtctgacagcagccagagcgtgcccctggtggccagccctggccactgcagcgacagcttcagcaccagcggcctggaggacagctgcacagagaccagcagcagcccccgggacaaggccatcaccccacccctgcctgagagcacagtgcccttcagcaatggagtgctgaagggggagctgagtgacctgggcgcagaagatggctggaccatggatgctgaggccgaccacagcggcggcagtgacagaaattccatggacagcgtggacagctgctgcagcctgaagaagacagagagcttccagaatgcccaggccggcagcaaccccaagaaggtggacctgatcatctgggagattgaggtgcccaagcacctggtgggccgcctgattggcaagcagggccgctacgtgtccttcctgaagcagaccagcggggccaagatctacatcagcaccctgccctacacccagagcgtgcagatctgccacatcgagggcagccagcaccacgtggacaaggccctgaacctgattggcaagaagttcaaggagctgaacctgaccaacatctatgccccacccctgcccagcctggccctgcccagcctgcccatgacctcctggctgatgctgcctgatggcatcaccgtggaggtgattgtggtgaaccaggtgaatgccggccacctgtttgtgcagcagcacacccaccccaccttccacgccctgcggagcctggaccagcagatgtacctgtgctacagccagcccggcatccccaccctgcccacccctgtggagatcaccgtcatctgtgccgcccctggagcagatggagcctggtggagggcccaggtggtggccagctatgaggagaccaatgaggtggagatccgctacgtggactatggaggctacaagagggtgaaggtggatgtgctgcggcagatccgcagtgactttgtgaccctgcccttccagggcgctgaggtgctgctggacagcgtgatgcccctgagtgatgatgaccagttcagccctgaggctgatgctgccatgtctgagatgacaggcaacacagccctgctggcccaggtgaccagctacagccccaccggcctgcccctcatccagctgtggagcgtggtgggagatgaggtggtgctgatcaacagaagcctggtggagcggggcctggcccagtgggtggacagctactacaccagcctgtag

SEQ ID NO: 142064 - DNA, 2838 bp, synthetic construct
  misc_feature 1..2838: note = Description of Artificial Sequence: Synthetic coding sequence
  source 1..2838: mol_type = other DNA
atgggcgccctgggcgtgtctggcagcagcagccctgggggctgccccggctggaggcggctgcctgctgctgtgaacaccaaccctgtggactttgcccctggggtcatcacccaggccagcaggatggccatccagttccgcagcctcttccccctggccctgcccggcatgctggccctgctgggctggtggtggttcttcagcaggaagaagggccacgtgagcagccatgatgagcagcaggtggaggccggggctgtgcagctgcgggctgaccctgccatcaaggagcccctgcctgtggaggatgtgtgccccaaggtggtgtccaccccaccttctgtgacagagcccccagagaaggagctgagcacagtgtccaagctgcctgctgagcccccagccctgctgcagacccaccccccctgcagaagaagtgagagcagcggcatcctgcccaacaccacagacatgaggctgcggcccggcaccaggagagatgacagcaccaagctggagctggccctgaccggcggggaggccaagagcatccccctggagtgccccctgagcagccccaagggcgtgctcttcagcagcaagtctgctgaggtgtgcaagcaggacagccccttcagccgggtgcccaggaaggtgcagcccggctaccctgtggtgcctgctgagaagaggagcagcggggagcgggcccgggagactggaggagctgagggcactggagatgctgtgctgggggagaaggtgctggaggaggccctgctgagccgggagcacgtgctggagctggagaacagcaagggccccagcctggccagcctggagggggaggaggacaagggcaagagcagcagcagccaggtggtgggccctgtgcaggaggaggagtatgtggccgagaagctgcccagccgcttcatcgagagcgcccacacagagctggccaaggatgatgctgccccagcccctcctgtggctgatgccaaggcccaggacagaggagtggagggggagctgggcaatgaggagagcctggacagaaatgaggagggcctggacagaaatgaggagggcctggacagaaatgaggagagcctggacagaaatgaggagggcctggacagaaatgaggagatcaagagagctgccttccagatcatcagccaggtgatcagcgaggccacagagcaggtgctggccaccaccgtgggcaaggtggccggccgggtgtgccaggccagccagctgcagggccagaaggaggagagctgtgtgcctgtgcaccagaagacagtgctgggccctgacacagctgagcccgccacagctgaggccgctgtggcccccccagatgctggcctgcccctgcccggcctgcctgctgagggcagccccccacccaagacctacgtgtcctgcctgaagagcctgctgagcagccccaccaaggacagcaagcccaacatcagcgcccaccacatcagcctggccagctgcctggccctgaccaccccatctgaggagctgcctgaccgggccggcatcctggtggaggatgccacctgtgtgacctgcatgtctgacagcagccagagcgtgcccctggtggccagccctggccactgcagcgacagcttcagcaccagcggcctggaggacagctgcacagagaccagcagcagcccccgggacaaggccatcaccccacccctgcctgagagcacagtgcccttcagcaatggagtgctgaagggggagctgagtgacctgggcgcagaagatggctggaccatggatgctgaggccgaccacagcggcggcagtgacagaaattccatggacagcgtggacagctgctgcagcctgaagaagacagagagcttccagaatgcccaggccggcagcaaccccaagaaggtggacctgatcatctgggagattgaggtgcccaagcacctggtgggccgcctgattggcaagcagggccgctacgtgtccttcctgaagcagaccagcggggccaagatctacatcagcaccctgccctacacccagagcgtgcagatctgccacatcgagggcagccagcaccacgtggacaaggccctgaacctgattggcaagaagttcaaggagctgaacctgaccaacatctatgccccacccctgcccagcctggccctgcccagcctgcccatgacctcctggctgatgctgcctgatggcatcaccgtggaggtgattgtggtgaaccaggtgaatgccggccacctgtttgtgcagcagcacacccaccccaccttccacgccctgcggagcctggaccagcagatgtacctgtgctacagccagcccggcatccccaccctgcccacccctgtggagatcaccgtcatctgtgccgcccctggagcagatggagcctggtggagggcccaggtggtggccagctatgaggagaccaatgaggtggagatccgctacgtggactatggaggctacaagagggtgaaggtggatgtgctgcggcagatccgcagtgactttgtgaccctgcccttccagggcgctgaggtgctgctggacagcgtgatgcccctgagtgatgatgaccagttcagccctgaggctgatgctgccatgtctgagatgacaggcaacacagccctgctggcccaggtgaccagctacagccccaccggcctgcccctcatccagctgtggagcgtggtgggagatgaggtggtgctgatcaacagaagcctggtggagcggggcctggcccagtgggtggacagctactacaccagcctgtag

SEQ ID NO: 142065 - DNA, 2712 bp, synthetic construct; identical to SEQ ID NO: 142063
  misc_feature 1..2712: note = Description of Artificial Sequence: Synthetic coding sequence
  source 1..2712: mol_type = other DNA

SEQ ID NO: 142066 - DNA, 1095 bp, synthetic construct
  misc_feature 1..1095: note = Description of Artificial Sequence: Synthetic coding sequence
  source 1..1095: mol_type = other DNA
atgggcatcctggagaagatcagcgagattgagaaggagatcgcccggacccagaagaacaaggccacagagtaccacctgggcctgctgaaggccaagctggccaagtaccgggcccagctgctggagcccagcaagagcgccagcagcaaaggagagggctttgatgtgatgaagtctggagatgcccgggtggccctgattggcttccccagcgtgggcaagagcaccttcctgagcctgatgaccagcacagccagcgaggccgccagctatgagttcaccaccctgacctgcatccctggggtcatcgagtacaagggggccaacatccagctgctggacctgcccggcatcatcgagggcgccgcccagggcaagggccggggccggcaggtgattgctgtggccaggacagcagatgtgatcatcatgatgctggatgccaccaagggggaggtgcagaggagcctgctggagaaggagctggagagcgtgggcatccggctgaacaagcacaagcccaacatctacttcaagcccaagaagggcggcggcatctccttcaacagcacagtgaccctgacccagtgcagcgagaagctggtgcagctgatcctgcacgagtacaagatcttcaatgctgaggtgctcttccgggaggactgcagcccagatgagttcattgatgtgattgtgggcaacagagtgtacatgccctgcctgtatgtgtacaacaagattgaccagatctccatggaggaggtggaccggctggccaggaagcccaacagcgtggtgatcagctgtggcatgaagctgaacctggactacctgctggagatgctgtgggagtacctggccctgacctgcatctacaccaagaagaggggccagaggccagacttcacagatgccatcatcctgaggaaaggagcctctgtggagcacgtgtgccaccgcatccacaggagcctggccagccagttcaagtatgccctggtgtggggcaccagcaccaagtacagcccccagagggtgggcctgacccacaccatggagcatgaagatgtgatccagatcgtgaagaagtag

SEQ ID NO: 142067 - DNA, 1815 bp, synthetic construct
  misc_feature 1..1815: note = Description of Artificial Sequence: Synthetic coding sequence
  source 1..1815: mol_type = other DNA
atgagaggagctggccccagcccccggcagagccccaggaccctgcggccagaccccggccctgccatgtccttcttccggaggaaggtgaagggcaaggagcaggagaagaccagtgatgtgaagagcatcaaggccagcatctctgtgcacagcccccagaagagcaccaagaaccacgccctgctggaggccgccggccccagccacgtggccatcaatgccatcagcgccaacatggacagcttcagcagcagcaggacagccaccctgaagaagcagcccagccacatggaggccgcccactttggagacctgggccgcagctgcctggactaccagacccaggagaccaagagcagcctgagcaagaccctggagcaggtgctgcatgacaccatcgtgctgccctacttcatccagttcatggagctgcggaggatggagcacctggtgaagttctggctggaggccgagagcttccacagcaccacctggagccgcatccgggcccacagcctgaacacagtgaagcagagcagcctggccgagcctgtgagccccagcaagaagcatgagaccacagccagcttcctgacagacagcctggacaagaggctggaggacagcggcagcgcccagctgttcatgacccacagcgagggcatcgacctgaacaacagaaccaacagcacccagaaccacctgctgctgagccaggagtgtgacagcgcccacagcctgcggctggagatggcccgggccggcacccaccaggtgtccatggagacccaggagagcagcagcaccctgactgtggccagcaggaacagccctgccagccccctgaaggagctgagcggcaagctgatgaagagcattgagcaggatgctgtgaacaccttcaccaagtacatcagcccagatgctgccaagcccatccccatcacagaggccatgagaaatgacatcatcgcccgcatctgtggagaagatggccaggtggaccccaactgctttgtgctggcccagagcatcgtgttttctgccatggagcaggagcacttcagcgagttcctgcggagccaccacttctgcaagtaccagatcgaggtgctgaccagcggcaccgtgtacctggccgacatcctcttctgtgagagcgccctcttctacttcagcgagtacatggagaaggaggatgctgtgaacatcctgcagttctggctggccgctgacaacttccagagccagctggccgccaagaagggccagtatgatggccaggaggcccagaatgatgccatgatcctgtatgacaagtacttcagcctgcaggccacccaccccctgggctttgatgatgtggtgcggctggagattgagagcaacatctgccgggagggcggccccctgcccaactgcttcaccacccccctgcggcaggcctggaccaccatggagaagagctctgtgaagaaggccagcatcaagatcctgaagaactttgatgaggccatcatcgtggatgctgccagcctggaccctgagagcctgtaccagaggacctacgccggcaagatgaccttcggccgggtgtctgacctgggccagttcatccgggagagcgagcctgagccagatgtgaggaagagcaagggctccatgttcagccaggccatgaagaagtgggtgcagggcaacacagatgaggcccaggaggagctggcctggaagatcgccaagatgattgtgtctgacatcatgcagcaggcccagtatgaccagcccctggagaagagcaccaaggtgtag

SEQ ID NO: 142068 - DNA, 8454 bp, synthetic construct
  misc_feature 1..8454: note = Description of Artificial Sequence: Synthetic coding sequence
  source 1..8454: mol_type = other DNA
atgaagctgaacccccagcaggcccccctgtatggagactgtgtggtgacagtgctgctggccgaggaggacaaggcagaagatgatgtggtgttctacctggtgttcctgggcagcaccctgcggcactgcaccagcaccaggaaggtgtccagtgacaccctggagaccatcgcccctggccatgactgctgtgaaacagtgaaggtgcagctgtgtgccagcaaggagggcctgcctgtgtttgtggtggccgaggaggacttccactttgtgcaggatgaggcctatgatgctgcccagttcctggccaccagcgctggcaaccagcaggccctgaacttcacccgcttcctggaccagagcggcccccccagcggagatgtgaacagcctggacaagaagctggtgctggccttccgccacctgaagctgcccacagagtggaatgtgctgggcacagaccagagcctgcatgatgctggcccccgggagaccctgatgcactttgctgtgcggctgggcctgctgcggctgacctggttcctgctgcagaagccaggcggccgcggggccctgagcatccacaaccaggagggcgccacccctgtgtccctggccctggagcggggctaccacaagctgcaccagctgctgacagaggagaatgctggggagccagacagctggagcagcctgtcctatgagatcccctatggagactgcagcgtgcgccaccaccgggagctggacatctacaccctgaccagcgagagtgacagccaccacgagcaccccttccctggagatggctgcaccggccccatcttcaagctgatgaacatccagcagcagctgatgaagaccaacctgaagcagatggacagcctgatgcccctgatgatgacagcccaggaccccagcagcgcccctgagacagatggccagttcctgccctgtgcccctgagcccacagacccccagaggctgagcagcagcgaggagacagagagcacccagtgctgccccggcagccctgtggcccagacagagagcccctgtgacctgagcagcatcgtggaggaggagaacacagacaggagctgcaggaagaagaacaagggcgtggagaggaaaggagaggaggtggagcccgcccccatcgtggacagcggcaccgtgtctgaccaggacagctgcctgcagagcctgcctgactgtggggtgaagggcacagagggcctgagcagctgtggcaacagaaatgaggagaccggcaccaagagcagcggcatgcccacagaccaggagagcctgagcagtggagatgctgtgctgcagagggacctggtgatggagcccggcacagcccagtacagcagtggaggagagctgggcggcatcagcaccaccaacgtgtccaccccagacacagctggggagatggagcacggcctgatgaacccagatgccaccgtgtggaagaatgtgctgcagggcggggagagcaccaaggagagatttgagaacagcaacattggaacagctggggccagtgatgtgcacgtgaccagcaagcctgtggacaagatctctgtgcccaactgtgccccagctgccagcagcctggatggcaacaagccagctgagagcagcctggccttcagcaatgaggagaccagcacagagaagacagctgagacagagaccagccgcagccgggaggagagcgcagatgcccctgtggaccagaacagcgtggtgatcccagctgctgccaaggacaagatcagtgatggcctggagccctacaccctgctggccgccggcattggagaggccatgagccccagcgacctggccctgctgggcctggaggaggatgtgatgccccaccagaacagcgagaccaacagcagccacgcccagagccagaagggcaagagcagccccatctgcagcaccactggagatgacaagctgtgtgccgacagcgcctgccagcagaacacagtgaccagcagcggggacctggtggccaagctgtgtgacaacatcgtgtctgagagcgagagcaccacagcccggcagcccagcagccaggaccccccagatgccagccactgtgaggacccccaggcccacacagtgaccagtgaccctgtgcgggacacccaggagagagctgacttctgccccttcaaggtggtggacaacaagggccagaggaaggatgtgaagctggacaagcccctgaccaacatgctggaggtggtgagccacccccaccctgtggtgcccaagatggagaaggagctggtgcctgaccaggccgtcatcagtgacagcaccttcagcctggccaacagccctggcagcgagagcgtgaccaaggatgatgccctgagctttgtgcccagccagaaggagaagggcacagccaccccagagctgcacacagccacagactacagagatggcccagatggcaacagcaatgaaccagacacccggcccctggaggacagagctgtgggcctgagcaccagcagcacagctgctgagctgcagcacggcatgggcaacaccagcctgaccggcctgggcggggagcacgagggccctgcccccccagccatccctgaggccctgaacatcaagggcaacacagacagcagcctgcagagcgtgggcaaggccaccctggccctggacagcgtgctgacagaggagggcaagctgctggtggtgtctgagagcagcgctgcccaggagcaggacaaggacaaggctgtgacctgcagcagcatcaaggaaaatgccctgagcagcggcaccctgcaggaggagcagaggaccccacctcctggccaggacacccagcagttccacgagaagagcatctctgctgactgtgccaaggacaaggccctgcagctgagcaacagccctggggccagcagcgccttcctgaaggccgagacagagcacaacaaggaggtggccccccaggtgtccctgctgacccagggcggggccgcccagagcctggtgcccccaggggccagcctggccacagagagccggcaggaggccctgggcgctgagcacaacagcagcgccctgctgccctgcctgctgcctgatggcagtgatggcagtgatgccctgaactgcagccagcccagccccctggatgtgggcgtgaagaacacccagagccagggcaagaccagcgcctgtgaggtgtctggagatgtgacagtggatgtgactggagtgaatgccctgcagggcatggccgagccccggcgggagaacatcagccacaacacccaggacatcctgatccccaacgtgctgctgagccaggagaagaatgctgtgctgggcctgcctgtggccctgcaggacaaggctgtgacagacccccagggcgtgggcaccccagagatgatccccctggactgggagaagggcaagctggagggcgctgaccacagctgcaccatgggagatgctgaggaggcccagattgatgatgaggcccaccctgtgctgctgcagcctgtggccaaggagctgcccacagacatggagctgagcgcccatgatgatggagccccagctggggtgcgggaggtgatgagggcccctccttctggccgggagaggagcacccccagcctgccctgcatggtgtctgcccaggatgcccccctgcccaagggagctgacctgattgaggaggccgccagcagaattgtggatgctgtgattgagcaggtgaaggccgccggggccctgctgacagaaggagaggcctgccacatgagcctgagcagccctgagctgggccccctgaccaagggcctggagagcgccttcacagagaaggtgtccaccttccccccaggagagagcctgcccatgggcagcaccccagaggaggccaccggcagcctggccggctgctttgctggccgggaggagcctgagaagatcatcctgcctgtgcagggccctgagcctgctgctgagatgccagatgtgaaggccgaggatgaggtggacttccgggccagcagcatcagcgaggaggtggccgtgggcagcattgctgccaccctgaagatgaagcagggccccatgacccaggccatcaaccgggagaactggtgcaccatcgagccctgcccagatgctgccagcctgctggccagcaagcagagcccagaatgtgagaacttcctggatgtgggcctgggcagagaatgtaccagcaagcagggcgtgctgaagcgggagagcggcagtgacagcgacctcttccacagccccagtgatgacatggacagcatcatcttccccaagccagaggaggagcacctggcctgtgacatcaccggcagcagcagcagcacagatgacacagccagcctggacagacacagcagccacggcagtgatgtgtccctgagccagatcctgaagcccaacagaagccgggaccggcagagcctggatggcttctacagccacggcatgggcgctgagggccgggagagcgagagcgagcctgctgaccctggagatgtggaggaggaggagatggacagcatcacagaggtgcctgccaactgcagcgtgctgcggagctccatgaggagcctgagccccttccgccgccacagctggggccctgggaagaatgctgccagtgatgctgagatgaaccaccgctccatgtcctggtgccccagcggcgtgcagtacagcgctggcctgtctgctgacttcaactaccgctccttcagcctggagggcctgactggaggagctggggtgggcaacaagcccagcagcagcctggaggtgagcagcgccaatgctgaggagctgcggcaccccttctctggagaggagcgggtggacagcctggtgtccctgtctgaggaggacctggagagtgaccagcgggagcacaggatgtttgaccagcagatctgccacaggagcaagcagcagggcttcaactactgcaccagcgccatcagcagccccctgaccaagagcatcagcctgatgaccatcagccaccctggcctggacaacagccggcccttccacagcaccttccacaacaccagcgccaacctgacagagagcatcacagaggagaactacaacttcctgccccacagccccagcaagaaggacagcgagtggaagagcggcaccaaggtgtccaggaccttctcctacatcaagaacaagatgagcagcagcaagaagagcaaggagaaggagaaggagaaggacaagatcaaggagaaggagaaggacagcaaggacaaggagaaggacaagaagacagtgaatggccacaccttcagcagcatccctgtggtgggccccatcagctgcagccagtgcatgaagcccttcaccaacaaggatgcctacacctgtgccaactgcagcgcctttgtgcacaagggctgccgggagagcctggccagctgtgccaaggtgaagatgaagcagcccaagggcagcctgcaggcccatgacaccagcagcctgcccaccgtcatcatgaggaacaagcccagccagcccaaggagcggcccaggtctgctgtgctgctggtggatgaaacagccaccacccccatctttgccaacagaagaagccagcagagcgtgtccctgagcaagtctgtgtccatccagaacatcactggagtgggcaatgatgagaacatgagcaacacctggaagttcctgagccacagcacagacagcctgaacaagatcagcaaggtgaatgaaagcacagagagcctgacagatgagggcgtgggcacagacatgaatgaaggccagctgctgggggactttgaaattgagagcaagcagctggaggccgagagctggagccgcatcatcgacagcaagttcctgaagcagcagaagaaggatgtggtgaagaggcaggaggtgatctatgagctgatgcagacagagttccaccacgtgaggaccctgaagatcatgtctggagtgtacagccagggcatgatggctgacctgctgtttgagcagcagatggtggagaagctgttcccctgcctggatgagctgatcagcatccacagccagttcttccagaggatcctggagaggaagaaggagagcctggtggacaagtctgagaagaacttcctgatcaagagaattggagatgtgctggtgaaccagttcagcggggagaatgctgagcggctgaagaagacctacggcaagttctgtggccagcacaaccagagcgtgaactacttcaaggacctgtatgccaaggacaagcgcttccaggcctttgtgaagaagaagatgagcagctctgtggtgcggcggctgggcatccctgagtgcatcctgctggtgacccagaggatcaccaagtaccctgtgctcttccagaggatcctgcagtgcaccaaggacaatgaggtggagcaggaggacctggcccagagcctgagcctggtgaaggatgtgattggagctgtggacagcaaggtggccagctatgagaagaaggtgcggctgaatgagatctacaccaagacagacagcaagagcatcatgaggatgaagagcggccagatgtttgccaaggaggacctgaagaggaagaagctggtgagagatggctctgtgttcctgaagaatgctgctggccgcctgaaggaggtgcaggccgtgctgctgacagacatcctggtgttcctgcaggagaaggaccagaagtacatctttgccagcctggaccagaagagcaccgtcatcagcctgaagaagctgattgtgcgggaggtggcccacgaggagaagggcctcttcctgatctccatgggcatgacagatcctgagatggtggaggtgcacgccagcagcaaggaggagagaaattcctggatccagatcatccaggacaccatcaacaccctgaacagagatgaagatgagggcatccccagtgaaaatgaggaggagaagaagatgctggacacccgggcccgggagctgaaggagcagctgcaccagaaggaccagaagatcctgctgctgctggaggagaaggagatgatcttccgggacatggccgagtgcagcacccccctgcctgaggactgcagccccacccacagcccccgggtgctcttccgcagcaacacagaggaggccctgaagggcggccccctgatgaagagcgccatcaatgaggtggagatcctgcagggcctggtgtctggcaacctgggcggcaccctgggccccaccgtgagcagccccatcgagcaggatgtggtgggccctgtgtccctgcccaggagagctgagaccttcggcggctttgacagccaccagatgaatgccagcaagggcggggagaaggaggagggagatgatggccaggacctgcggaggacagaaagtgacagcggcctgaagaagggcggcaatgccaacctggtgttcatgctgaagaggaacagcgagcaggtggtgcagagcgtggtgcacctgtatgagctgctgagcgccctgcagggcgtggtgctgcagcaggacagctacatcgaggaccagaagctggtgctgtctgagcgggccctgaccaggagcctgagccggcccagcagcctgattgagcaggagaagcagaggagcctggagaagcagaggcaggacctggccaacctgcagaagcagcaggcccagtacctggaggagaagagaagaagagagcgggagtgggaggcccgggagcgggagctgcgggagcgggaggccctgctggcccagcgggaggaggaggtgcagcagggccagcaggacctggagaaggagcgggaggagctgcagcagaagaagggcacctaccagtatgacctggagcggctgcgggccgcccagaagcagctggagcgggagcaggagcagctgcggcgggaggccgagcggctgagccagaggcagacagagcgggacctgtgccaggtgagccacccccacaccaagctgatgaggatccccagcttcttccccagccctgaggagccccccagccccagcgcccccagcatcgccaagagcggcagcctggacagcgagctgtctgtgagccccaagagaaattccatcagcaggacccacaaggacaagggccccttccacatcctgagcagcaccagccagaccaacaagggccctgagggccagagccaggccccagccagcaccagcgccagcacccggctgtttggcctgaccaagcccaaggagaagaaggagaagaagaagaagaacaagaccagccgcagccagcctggagatggccctgccagcgaggtgtctgctgagggggaggagatcttctgctag

SEQ ID NO: 142069 - DNA, 3177 bp, synthetic construct
  misc_feature 1..3177: note = Description of Artificial Sequence: Synthetic coding sequence
  source 1..3177: mol_type = other DNA
atgagcagcagcaagaagagcaaggagaaggagaaggagaaggacaagatcaaggagaaggagaaggacagcaaggacaaggagaaggacaagaagacagtgaatggccacaccttcagcagcatccctgtggtgggccccatcagctgcagccagtgcatgaagcccttcaccaacaaggatgcctacacctgtgccaactgcagcgcctttgtgcacaagggctgccgggagagcctggccagctgtgccaaggtgaagatgaagcagcccaagggcagcctgcaggcccatgacaccagcagcctgcccaccgtcatcatgaggaacaagcccagccagcccaaggagcggcccaggtctgctgtgctgctggtggatgaaacagccaccacccccatctttgccaacagaagaagccagcagagcgtgtccctgagcaagtctgtgtccatccagaacatcaccggggtgggcaatgatgagaacatgagcaacacctggaagttcctgagccacagcacagacagcctgaacaagatcagcaaggtgaatgaaagcacagagagcctgacagatgaaggagtgggcacagacatgaatgaaggccagctgctgggggactttgaaattgagagcaagcagctggaggccgagagctggagccgcatcatcgacagcaagttcctgaagcagcagaagaaggatgtggtgaagaggcaggaggtgatctatgagctgatgcagacagagttccaccacgtgaggaccctgaagatcatgtctggagtgtacagccagggcatgatggctgacctgctgtttgagcagcagatggtggagaagctgttcccctgcctggatgagctgatcagcatccacagccagttcttccagaggatcctggagaggaagaaggagagcctggtggacaagtctgagaagaacttcctgatcaagagaattggagatgtgctggtgaaccagttctctggagaaaatgctgagcggctgaagaagacctacggcaagttctgtggccagcacaaccagagcgtgaactacttcaaggacctgtatgccaaggacaagcgcttccaggcctttgtgaagaagaagatgagcagctctgtggtgcggcggctgggcatccctgagtgcatcctgctggtgacccagaggatcaccaagtaccctgtgctcttccagaggatcctgcagtgcaccaaggacaatgaggtggagcaggaggacctggcccagagcctgagcctggtgaaggatgtgattggagctgtggacagcaaggtggccagctatgagaagaaggtgcggctgaatgagatctacaccaagacagacagcaagagcatcatgaggatgaagagcggccagatgtttgccaaggaggacctgaagaggaagaagctggtgagagatggcagcgtcttcctgaagaatgctgctggccgcctgaaggaggtgcaggccgtgctgctgacagacatcctggtgttcctgcaggagaaggaccagaagtacatctttgccagcctggaccagaagagcaccgtcatcagcctgaagaagctgattgtgcgggaggtggcccacgaggagaagggcctcttcctgatctccatgggcatgacagatcctgagatggtggaggtgcacgccagcagcaaggaggagaggaacagctggatccagatcatccaggacaccatcaacaccctgaacagagatgaagatgagggcatccccagtgaaaatgaggaggagaagaagatgctggacacccgggcccgggagctgaaggagcagctgcaccagaaggaccagaagatcctgctgctgctggaggagaaggagatgatcttccgggacatggctgaatgttccacccccctgcctgaggactgcagccccacccacagcccccgggtgctcttccgcagcaacacagaggaggccctgaagggcggccccctgatgaagagcgccatcaatgaggtggagatcctgcagggcctggtgtctggcaacctgggcggcaccctgggccccaccgtgagcagccccatcgagcaggatgtggtgggccctgtgtccctgccccggcgggcagagacctttggaggctttgacagccaccagatgaatgccagcaaaggaggagagaaggaggagggagatgatggccaggacctgcggaggacagaaagtgacagcggcctgaagaagggcggcaatgccaacctggtgttcatgctgaagagaaattctgagcaggtggtgcagagcgtggtgcacctgtatgagctgctgagcgccctgcagggcgtggtgctgcagcaggacagctacatcgaggaccagaagctggtgctgtctgagcgggccctgaccaggagcctgagccggcccagcagcctcatcgagcaggagaagcagaggagcctggagaagcagaggcaggacctggccaacctgcagaagcagcaggcccagtacctggaggagaagagaagaagagagcgggagtgggaggcccgggagcgggagctgcgggagcgggaggccctgctggcccagcgggaggaggaggtgcagcagggccagcaggacctggagaaggagcgggaggagctgcagcagaagaagggcacctaccagtatgacctggagcggctgcgggccgcccagaagcagctggagcgggagcaggagcagctgcggcgggaggccgagcggctgagccagaggcagacagagcgggacctgtgccaggtgagccacccccacaccaagctgatgaggatccccagcttcttccccagccctgaggagccccccagccccagcgcccccagcatcgccaagagcggcagcctggacagcgagctgtctgtgagccccaagaggaacagcatcagcaggacccacaaggacaagggccccttccacatcctgagcagcaccagccagaccaacaagggccctgagggccagagccaggccccagccagcaccagcgccagcacccggctgtttggcctgaccaagcccaaggagaagaaggagaagaagaagaagaacaagaccagccgcagccagcctggagatggccctgccagcgaggtgtctgctgagggggaggagatcttctgctag

SEQ ID NO: 142070 - DNA, 8451 bp, synthetic construct
  misc_feature 1..8451: note = Description of Artificial Sequence: Synthetic coding sequence
  source 1..8451: mol_type = other DNA
aagctgctggagaagcagccccccattgaaggagactgtgtggtgacagtgctgctggccgaggaggacaaggccgaggatgatgtggtgttctacctggtgttcctgggcagcaccctgcggcactgcaccagcaccaggaaggtgtccagtgacaccctggagaccatcgcccctggccatgactgctgtgagaccgtgaaggtgcagctgtgtgccagcaaggagggcctgcctgtgtttgtggtggccgaggaggacttccactttgtgcaggatgaggcctatgatgctgcccagttcctggccaccagcgctggcaaccagcaggccctgaacttcacccgcttcctggaccagagcggccccccatctggagatgtgaacagcctggacaagaagctggtgctggccttccgccacctgaagctgcccacagagtggaatgtgctgggcacagaccagagcctgcatgatgctggcccccgggagaccctgatgcactttgctgtgcggctgggcctgctgcggctgacctggttcctgctgcagaagccaggcggccgcggggccctgagcatccacaaccaggagggcgccacccctgtgtccctggccctggagcggggctaccacaagctgcaccagctgctgacagaagaaaatgctggggagccagacagctggagcagcctgtcctatgagatcccctacggggactgcagcgtgcgccaccaccgggagctggacatctacaccctgaccagcgagagtgacagccaccacgagcaccccttccctggagatggctgcaccggccccatcttcaagctgatgaacatccagcagcagctgatgaagaccaacctgaagcagatggacagcctgatgcccctgatgatgacagcccaggaccccagcagcgcccctgagacagatggccagttcctgccctgtgcccctgagcccacagacccccagaggctgagcagcagcgaggagacagagagcacccagtgctgccccggcagccctgtggcccagacagagagcccctgtgacctgagcagcatcgtggaggaggagaacacagacaggagctgcaggaagaagaacaagggcgtggagaggaagggggaggaggtggagcccgcccccatcgtggacagcggcaccgtgtctgaccaggacagctgcctgcagagcctgcctgactgtggggtgaagggcacagagggcctgagcagctgtggcaacagaaatgaggagaccggcaccaagagcagcggcatgcccacagaccaggagagcctgagcagtggagatgctgtgctgcagagggacctggtgatggagcctggaacagcccagtacagcagcggcggggagctgggcggcatcagcaccaccaacgtgtccaccccagacacagctggggagatggagcacggcctgatgaacccagatgccaccgtgtggaagaatgtgctgcagggcggggagagcaccaaggagagatttgagaacagcaacatcggcacagctggggccagtgatgtgcacgtgaccagcaagcctgtggacaagatctctgtgcccaactgtgccccagctgccagcagcctggatggcaacaagccagctgagagcagcctggccttcagcaatgaggagaccagcacagagaagacagctgagacagagaccagccgcagccgggaggagagcgcagatgcccctgtggaccagaacagcgtggtgatcccagctgctgccaaggacaagatcagtgatggcctggagccctacaccctgctggccgccggcatcggggaggccatgagccccagcgacctggccctgctgggcctggaggaggatgtgatgccccaccagaacagcgagaccaacagcagccacgcccagagccagaagggcaagagcagccccatctgcagcaccactggagatgacaagctgtgtgccgacagcgcctgccagcagaacacagtgaccagcagcggggacctggtggccaagctgtgtgacaacatcgtgtctgagagcgagagcaccacagcccggcagcccagcagccaggaccccccagatgccagccactgtgaggacccccaggcccacacagtgaccagtgaccctgtgcgggacacccaggagagagctgacttctgccccttcaaggtggtggacaacaagggccagaggaaggatgtgaagctggacaagcccctgaccaacatgctggaggtggtgagccacccccaccctgtggtgcccaagatggagaaggagctggtgcctgaccaggccgtcatcagtgacagcaccttcagcctggccaacagccctggcagcgagagcgtgaccaaggatgatgccctgagctttgtgcccagccagaaggagaagggcacagccaccccagagctgcacacagccacagactacagagatggcccagatggcaacagcaatgaaccagacacccggcccctggaggacagagctgtgggcctgagcaccagcagcacagctgctgagctgcagcacggcatgggcaacaccagcctgaccggcctgggcggggagcacgagggccctgcccccccagccatccctgaggccctgaacatcaagggcaacacagacagcagcctgcagagcgtgggcaaggccaccctggccctggacagcgtgctgacagaggagggcaagctgctggtggtgtctgagagcagcgctgcccaggagcaggacaaggacaaggctgtgacctgcagcagcatcaaggaaaatgccctgagcagcggcaccctgcaggaggagcagaggaccccacctcctggccaggacacccagcagttccacgagaagagcatctctgctgactgtgccaaggacaaggccctgcagctgagcaacagccctggggccagcagcgccttcctgaaggccgagacagagcacaacaaggaggtggccccccaggtgtccctgctgacccagggcggggccgcccagagcctggtgcccccaggggccagcctggccacagagagccggcaggaggccctgggcgctgagcacaacagcagcgccctgctgccctgcctgctgcctgatggcagtgatggcagtgatgccctgaactgcagccagcccagccccctggatgtgggcgtgaagaacacccagagccagggcaagaccagcgcctgtgaggtgtctggagatgtgacagtggatgtgactggagtgaatgccctgcagggcatggccgagccccggcgggagaacatcagccacaacacccaggacatcctgatccccaacgtgctgctgagccaggagaagaatgctgtgctgggcctgcctgtggccctgcaggacaaggctgtgacagacccccagggcgtgggcaccccagagatgatccccctggactgggagaagggcaagctggagggcgctgaccacagctgcaccatgggagatgctgaggaggcccagattgatgatgaggcccaccctgtgctgctgcagcctgtggccaaggagctgcccacagacatggagctgagcgcccatgatgatggagccccagctggggtgcgggaggtgatgagggccccacccagcggccgggagaggagcacccccagcctgccctgcatggtgtctgcccaggatgcccccctgcccaagggagctgacctgattgaggaggccgccagccgcatcgtggatgctgtgattgagcaggtgaaggctgctggggccctgctgacagaaggagaggcctgccacatgagcctgagcagccctgagctgggccccctgaccaagggcctggagagcgccttcacagagaaggtgtccaccttccccccaggagagagcctgcccatgggcagcaccccagaggaggccaccggcagcctggccggctgctttgctggccgggaggagcctgagaagatcatcctgcctgtgcagggccctgagcctgctgctgagatgccagatgtgaaggcagaagatgaggtggacttccgggccagcagcatcagcgaggaggtggccgtgggcagcattgctgccaccctgaagatgaagcagggccccatgacccaggccatcaaccgggagaactggtgcaccatcgagccctgcccagatgctgccagcctgctggccagcaagcagagcccagaatgtgagaacttcctggatgtgggcctgggccgggagtgcaccagcaagcagggcgtgctgaagcgggagagcggcagtgacagcgacctcttccacagccccagtgatgacatggacagcatcatcttccccaagccagaggaggagcacctggcctgtgacatcaccggcagcagcagcagcacagatgacacagccagcctggacagacacagcagccacggcagtgatgtgtccctgagccagatcctgaagcccaacagaagccgggaccggcagagcctggatggcttctacagccacggcatgggcgctgagggccgggagagcgagagcgagcctgctgaccctggagatgtggaggaggaggagatggacagcatcacagaggtgcctgccaactgcagcgtgctgcggagctccatgaggagcctgagccccttcagaagacacagctggggccctgggaagaatgctgccagtgatgctgagatgaaccaccgctccatgtcctggtgccccagcggcgtgcagtacagcgctggcctgtctgctgacttcaactaccgctccttcagcctggagggcctgaccggcggggccggcgtgggcaacaagcccagcagcagcctggaggtgtcctctgccaatgctgaggagctgcggcaccccttcagcggggaggagcgggtggacagcctggtgtccctgtctgaggaggacctggagagtgaccagcgggagcacaggatgtttgaccagcagatctgccacaggagcaagcagcagggcttcaactactgcaccagcgccatcagcagccccctgaccaagagcatcagcctgatgaccatcagccaccctggcctggacaacagccggcccttccacagcaccttccacaacaccagcgccaacctgacagagagcatcacagaggagaactacaacttcctgccccacagccccagcaagaaggacagcgagtggaagagcggcaccaaggtgtccaggaccttctcctacatcaagaacaagatgagcagcagcaagaagagcaaggagaaggagaaggagaaggacaagatcaaggagaaggagaaggacagcaaggacaaggagaaggacaagaagacagtgaatggccacaccttcagcagcatccctgtggtgggccccatcagctgcagccagtgcatgaagcccttcaccaacaaggatgcctacacctgtgccaactgcagcgcctttgtgcacaagggctgccgggagagcctggccagctgtgccaaggtgaagatgaagcagcccaagggcagcctgcaggcccatgacaccagcagcctgcccaccgtcatcatgaggaacaagcccagccagcccaaggagcggcccaggtctgctgtgctgctggtggatgaaacagccaccacccccatctttgccaacagaagaagccagcagagcgtgtccctgagcaagtctgtgtccatccagaacatcaccggggtgggcaatgatgagaacatgagcaacacctggaagttcctgagccacagcacagacagcctgaacaagatcagcaaggtgaatgaaagcacagagagcctgacagatgaaggagtgggcacagacatgaatgaaggccagctgctgggggactttgaaattgagagcaagcagctggaggccgagagctggagccgcatcatcgacagcaagttcctgaagcagcagaagaaggatgtggtgaagaggcaggaggtgatctatgagctgatgcagacagagttccaccacgtgaggaccctgaagatcatgtctggagtgtacagccagggcatgatggctgacctgctgtttgagcagcagatggtggagaagctgttcccctgcctggatgagctgatcagcatccacagccagttcttccagaggatcctggagaggaagaaggagagcctggtggacaagtctgagaagaacttcctgatcaagagaattggagatgtgctggtgaaccagttctctggagaaaatgctgagcggctgaagaagacctacggcaagttctgtggccagcacaaccagagcgtgaactacttcaaggacctgtatgccaaggacaagcgcttccaggcctttgtgaagaagaagatgagcagctctgtggtgcggcggctgggcatccctgagtgcatcctgctggtgacccagaggatcaccaagtaccctgtgctcttccagaggatcctgcagtgcaccaaggacaatgaggtggagcaggaggacctggcccagagcctgagcctggtgaaggatgtgattggagctgtggacagcaaggtggccagctatgagaagaaggtgcggctgaatgagatctacaccaagacagacagcaagagcatcatgaggatgaagagcggccagatgtttgccaaggaggacctgaagaggaagaagctggtgagagatggcagcgtcttcctgaagaatgctgctggccgcctgaaggaggtgcaggccgtgctgctgacagacatcctggtgttcctgcaggagaaggaccagaagtacatctttgccagcctggaccagaagagcaccgtcatcagcctgaagaagctgattgtgcgggaggtggcccacgaggagaagggcctcttcctgatctccatgggcatgacagatcctgagatggtggaggtgcacgccagcagcaaggaggagaggaacagctggatccagatcatccaggacaccatcaacaccctgaacagagatgaagatgagggcatccccagtgaaaatgaggaggagaagaagatgctggacacccgggcccgggagctgaaggagcagctgcaccagaaggaccagaagatcctgctgctgctggaggagaaggagatgatcttccgggacatggctgaatgttccacccccctgcctgaggactgcagccccacccacagcccccgggtgctcttccgcagcaacacagaggaggccctgaagggcggccccctgatgaagagcgccatcaatgaggtggagatcctgcagggcctggtgtctggcaacctgggcggcaccctgggccccaccgtgagcagccccatcgagcaggatgtggtgggccctgtgtccctgccccggcgggcagagacctttggaggctttgacagccaccagatgaatgccagcaaaggaggagagaaggaggagggagatgatggccaggacctgcggaggacagaaagtgacagcggcctgaagaagggcggcaatgccaacctggtgttcatgctgaagagaaattctgagcaggtggtgcagagcgtggtgcacctgtatgagctgctgagcgccctgcagggcgtggtgctgcagcaggacagctacatcgaggaccagaagctggtgctgtctgagcgggccctgaccaggagcctgagccggcccagcagcctcatcgagcaggagaagcagaggagcctggagaagcagaggcaggacctggccaacctgcagaagcagcaggcccagtacctggaggagaagagaagaagagagcgggagtgggaggcccgggagcgggagctgcgggagcgggaggccctgctggcccagcgggaggaggaggtgcagcagggccagcaggacctggagaaggagcgggaggagctgcagcagaagaagggcacctaccagtatgacctggagcggctgcgggccgcccagaagcagctggagcgggagcaggagcagctgcggcgggaggccgagcggctgagccagaggcagacagagcgggacctgtgccaggtgagccacccccacaccaagctgatgaggatccccagcttcttccccagccctgaggagccccccagccccagcgcccccagcatcgccaagagcggcagcctggacagcgagctgtctgtgagccccaagaggaacagcatcagcaggacccacaaggacaagggccccttccacatcctgagcagcaccagccagaccaacaagggccctgagggccagagccaggccccagccagcaccagcgccagcacccggctgtttggcctgaccaagcccaaggagaagaaggagaagaagaagaagaacaagaccagccgcagccagcctggagatggccctgccagcgaggtgtctgctgagggggaggagatcttctgctag

SEQ ID NO: 142071 - DNA, 8442 bp, synthetic construct
  misc_feature 1..8442: note = Description of Artificial Sequence: Synthetic coding sequence
  source 1..8442: mol_type = other DNA
atgaagctgaacccccagcaggcccccctgtatggagactgtgtggtgacagtgctgctggccgaggaggacaaggcagaagatgatgtggtgttctacctggtgttcctgggcagcaccctgcggcactgcaccagcaccaggaaggtgtccagtgacaccctggagaccatcgcccctggccatgactgctgtgaaacagtgaaggtgcagctgtgtgccagcaaggagggcctgcctgtgtttgtggtggccgaggaggacttccactttgtgcaggatgaggcctatgatgctgcccagttcctggccaccagcgctggcaaccagcaggccctgaacttcacccgcttcctggaccagagcggcccccccagcggagatgtgaacagcctggacaagaagctggtgctggccttccgccacctgaagctgcccacagagtggaatgtgctgggcacagaccagagcctgcatgatgctggcccccgggagaccctgatgcactttgctgtgcggctgggcctgctgcggctgacctggttcctgctgcagaagccaggcggccgcggggccctgagcatccacaaccaggagggcgccacccctgtgtccctggccctggagcggggctaccacaagctgcaccagctgctgacagaggagaatgctggggagccagacagctggagcagcctgtcctatgagatcccctatggagactgcagcgtgcgccaccaccgggagctggacatctacaccctgaccagcgagagtgacagccaccacgagcaccccttccctggagatggctgcaccggccccatcttcaagctgatgaacatccagcagcagctgatgaagaccaacctgaagcagatggacagcctgatgcccctgatgatgacagcccaggaccccagcagcgcccctgagacagatggccagttcctgccctgtgcccctgagcccacagacccccagaggctgagcagcagcgaggagacagagagcacccagtgctgccccggcagccctgtggcccagacagagagcccctgtgacctgagcagcatcgtggaggaggagaacacagacaggagctgcaggaagaagaacaagggcgtggagaggaaaggagaggaggtggagcccgcccccatcgtggacagcggcaccgtgtctgaccaggacagctgcctgcagagcctgcctgactgtggggtgaagggcacagagggcctgagcagctgtggcaacagaaatgaggagaccggcaccaagagcagcggcatgcccacagaccaggagagcctgagcagtggagatgctgtgctgcagagggacctggtgatggagcccggcacagcccagtacagcagtggaggagagctgggcggcatcagcaccaccaacgtgtccaccccagacacagctggggagatggagcacggcctgatgaacccagatgccaccgtgtggaagaatgtgctgcagggcggggagagcaccaaggagagatttgagaacagcaacattggaacagctggggccagtgatgtgcacgtgaccagcaagcctgtggacaagatctctgtgcccaactgtgccccagctgccagcagcctggatggcaacaagccagctgagagcagcctggccttcagcaatgaggagaccagcacagagaagacagctgagacagagaccagccgcagccgggaggagagcgcagatgcccctgtggaccagaacagcgtggtgatcccagctgctgccaaggacaagatcagtgatggcctggagccctacaccctgctggccgccggcattggagaggccatgagccccagcgacctggccctgctgggcctggaggaggatgtgatgccccaccagaacagcgagaccaacagcagccacgcccagagccagaagggcaagagcagccccatctgcagcaccactggagatgacaagctgtgtgccgacagcgcctgccagcagaacacagtgaccagcagcggggacctggtggccaagctgtgtgacaacatcgtgtctgagagcgagagcaccacagcccggcagcccagcagccaggaccccccagatgccagccactgtgaggacccccaggcccacacagtgaccagtgaccctgtgcgggacacccaggagagagctgacttctgccccttcaaggtggtggacaacaagggccagaggaaggatgtgaagctggacaagcccctgaccaacatgctggaggtggtgagccacccccaccctgtggtgcccaagatggagaaggagctggtgcctgaccaggccgtcatcagtgacagcaccttcagcctggccaacagccctggcagcgagagcgtgaccaaggatgatgccctgagctttgtgcccagccagaaggagaagggcacagccaccccagagctgcacacagccacagactacagagatggcccagatggcaacagcaatgaaccagacacccggcccctggaggacagagctgtgggcctgagcaccagcagcacagctgctgagctgcagcacggcatgggcaacaccagcctgaccggcctgggcggggagcacgagggccctgcccccccagccatccctgaggccctgaacatcaagggcaacacagacagcagcctgcagagcgtgggcaaggccaccctggccctggacagcgtgctgacagaggagggcaagctgctggtggtgtctgagagcagcgctgcccaggagcaggacaaggacaaggctgtgacctgcagcagcatcaaggaaaatgccctgagcagcggcaccctgcaggaggagcagaggaccccacctcctggccaggacacccagcagttccacgagaagagcatctctgctgactgtgccaaggacaaggccctgcagctgagcaacagccctggggccagcagcgccttcctgaaggccgagacagagcacaacaaggaggtggccccccaggtgtccctgctgacccagggcggggccgcccagagcctggtgcccccaggggccagcctggccacagagagccggcaggaggccctgggcgctgagcacaacagcagcgccctgctgccctgcctgctgcctgatggcagtgatggcagtgatgccctgaactgcagccagcccagccccctggatgtgggcgtgaagaacacccagagccagggcaagaccagcgcctgtgaggtgtctggagatgtgacagtggatgtgactggagtgaatgccctgcagggcatggccgagccccggcgggagaacatcagccacaacacccaggacatcctgatccccaacgtgctgctgagccaggagaagaatgctgtgctgggcctgcctgtggccctgcaggacaaggctgtgacagacccccagggcgtgggcaccccagagatgatccccctggactgggagaagggcaagctggagggcgctgaccacagctgcaccatgggagatgctgaggaggcccagattgatgatgaggcccaccctgtgctgctgcagcctgtggccaaggagctgcccacagacatggagctgagcgcccatgatgatggagccccagctggggtgcgggaggtgatgagggcccctccttctggccgggagaggagcacccccagcctgccctgcatggtgtctgcccaggatgcccccctgcccaagggagctgacctgattgaggaggccgccagcagaattgtggatgctgtgattgagcaggtgaaggccgccggggccctgctgacagaaggagaggcctgccacatgagcctgagcagccctgagctgggccccctgaccaagggcctggagagcgccttcacagagaaggtgtccaccttccccccaggagagagcctgcccatgggcagcaccccagaggaggccaccggcagcctggccggctgctttgctggccgggaggagcctgagaagatcatcctgcctgtgcagggccctgagcctgctgctgagatgccagatgtgaaggccgaggatgaggtggacttccgggccagcagcatcagcgaggaggtggccgtgggcagcattgctgccaccctgaagatgaagcagggccccatgacccaggccatcaaccgggagaactggtgcaccatcgagccctgcccagatgctgccagcctgctggccagcaagcagagcccagaatgtgagaacttcctggatgtgggcctgggcagagaatgtaccagcaagcagggcgtgctgaagcgggagagcggcagtgacagcgacctcttccacagccccagtgatgacatggacagcatcatcttccccaagccagaggaggagcacctggcctgtgacatcaccggcagcagcagcagcacagatgacacagccagcctggacagacacagcagccacggcagtgatgtgtccctgagccagatcctgaagcccaacagaagccgggaccggcagagcctggatggcttctacagccacggcatgggcgctgagggccgggagagcgagagcgagcctgctgaccctggagatgtggaggaggaggagatggacagcatcacagaggtgcctgccaactgcagcgtgctgcggagctccatgaggagcctgagccccttccgccgccacagctggggccctgggaagaatgctgccagtgatgctgagatgaaccacaggagctccatgagggtgctgggagatgtggtgcggcggccccccatccaccggcgctccttcagcctggagggcctgactggaggagctggggtgggcaacaagcccagcagcagcctggaggtgagcagcgccaatgctgaggagctgcggcaccccttctctggagaggagcgggtggacagcctggtgtccctgtctgaggaggacctggagagtgaccagcgggagcacaggatgtttgaccagcagatctgccacaggagcaagcagcagggcttcaactactgcaccagcgccatcagcagccccctgaccaagagcatcagcctgatgaccatcagccaccctggcctggacaacagccggcccttccacagcaccttccacaacaccagcgccaacctgacagagagcatcacagaggagaactacaacttcctgccccacagccccagcaagaaggacagcgagtggaagagcggcaccaaggtgtccaggaccttctcctacatcaagaacaagatgagcagcagcaagaagagcaaggagaaggagaaggagaaggacaagatcaaggagaaggagaaggacagcaaggacaaggagaaggacaagaagacagtgaatggccacaccttcagcagcatccctgtggtgggccccatcagctgcagccagtgcatgaagcccttcaccaacaaggatgcctacacctgtgccaactgcagcgcctttgtgcacaagggctgccgggagagcctggccagctgtgccaaggtgaagatgaagcagcccaagggcagcctgcaggcccatgacaccagcagcctgcccaccgtcatcatgaggaacaagcccagccagcccaaggagcggcccaggtctgctgtgctgctggtggatgaaacagccaccacccccatctttgccaacagaagaagccagcagagcgtgtccctgagcaagtctgtgtccatccagaacatcactggagtgggcaatgatgagaacatgagcaacacctggaagttcctgagccacagcacagacagcctgaacaagatcagcaaggtgaatgaaagcacagagagcctgacagatgagggcgtgggcacagacatgaatgaaggccagctgctgggggactttgaaattgagagcaagcagctggaggccgagagctggagccgcatcatcgacagcaagttcctgaagcagcagaagaaggatgtggtgaagaggcaggaggtgatctatgagctgatgcagacagagttccaccacgtgaggaccctgaagatcatgtctggagtgtacagccagggcatgatggctgacctgctgtttgagcagcagatggtggagaagctgttcccctgcctggatgagctgatcagcatccacagccagttcttccagaggatcctggagaggaagaaggagagcctggtggacaagtctgagaagaacttcctgatcaagagaattggagatgtgctggtgaaccagttcagcggggagaatgctgagcggctgaagaagacctacggcaagttctgtggccagcacaaccagagcgtgaactacttcaaggacctgtatgccaaggacaagcgcttccaggcctttgtgaagaagaagatgagcagctctgtggtgcggcggctgggcatccctgagtgcatcctgctggtgacccagaggatcaccaagtaccctgtgctcttccagaggatcctgcagtgcaccaaggacaatgaggtggagcaggaggacctggcccagagcctgagcctggtgaaggatgtgattggagctgtggacagcaaggtggccagctatgagaagaaggtgcggctgaatgagatctacaccaagacagacagcaagagcatcatgaggatgaagagcggccagatgtttgccaaggaggacctgaagaggaagaagctggtgagagatggctctgtgttcctgaagaatgctgctggccgcctgaaggaggtgcaggccgtgctgctgacagacatcctggtgttcctgcaggagaaggaccagaagtacatctttgccagcctggaccagaagagcaccgtcatcagcctgaagaagctgattgtgcgggaggtggcccacgaggagaagggcctcttcctgatctccatgggcatgacagatcctgagatggtggaggtgcacgccagcagcaaggaggagagaaattcctggatccagatcatccaggacaccatcaacaccctgaacagagatgaagatgagggcatccccagtgaaaatgaggaggagaagaagatgctggacacccgggcccgggagctgaaggagcagctgcaccagaaggaccagaagatcctgctgctgctggaggagaaggagatgatcttccgggacatggccgagtgcagcacccccctgcctgaggactgcagccccacccacagcccccgggtgctcttccgcagcaacacagaggaggccctgaagggcggccccctgatgaagagcgccatcaatgaggtggagatcctgcagggcctggtgtctggcaacctgggcggcaccctgggccccaccgtgagcagccccatcgagcaggatgtggtgggccctgtgtccctgcccaggagagctgagaccttcggcggctttgacagccaccagatgaatgccagcaagggcggggagaaggaggagggagatgatggccaggacctgcggaggacagaaagtgacagcggcctgaagaagggcggcaatgccaacctggtgttcatgctgaagaggaacagcgagcaggtggtgcagagcgtggtgcacctgtatgagctgctgagcgccctgcagggcgtggtgctgcagcaggacagctacatcgaggaccagaagctggtgctgtctgagcgggccctgaccaggagcctgagccggcccagcagcctgattgagcaggagaagcagaggagcctggagaagcagaggcaggacctggccaacctgcagaagcagcaggcccagtacctggaggagaagagaagaagagagcgggagtgggaggcccgggagcgggagctgcgggagcgggaggccctgctggcccagcgggaggaggaggtgcagcagggccagcaggacctggagaaggagcgggaggagctgcagcagaagaagggcacctaccagtatgacctggagcggctgcgggccgcccagaagcagctggagcgggagcaggagcagctgcggcgggaggccgagcggctgagccagaggcagacagagcgggacctgtgccaggtgagccacccccacaccaagctgatgaggatccccagcttcttccccagccctgaggagccccccagccccagcgcccccagcatcgccaagagcggcagcctggacagcgagctgtctgtgagccccaagagaaattccatcagcaggacccacaaggacaagggccccttccacatcctgagcagcaccagccagaccaacaagggccctgagggccagagccaggccccagccagcaccagcgccagcacccggctgtttggcctgaccaagcccaaggagaagaaggagaagaagaagaagaacaagaccagccgcagccagcctggagatggccctgccagcgaggtgtctgctgagggggaggagatcttctgctag

SEQ ID NO: 142072 - DNA, 1245 bp, synthetic construct
  misc_feature 1..1245: note = Description of Artificial Sequence: Synthetic coding sequence
  source 1..1245: mol_type = other DNA
atgagcaacacctggaagttcctgagccacagcacagacagcctgaacaagatcagcaaggtgaatgaaagcacagagagcctgacagatgagggcacagacatgaatgaaggccagctgctgggggactttgaaattgagagcaagcagctggaggccgagagctggagccgcatcatcgacagcaagttcctgaagcagcagaagaaggatgtggtgaagaggcaggaggtgatctatgagctgatgcagacagagttccaccacgtgaggaccctgaagatcatgtctggagtgtacagccagggcatgatggctgacctgctgtttgagcagcagatggtggagaagctgttcccctgcctggatgagctgatcagcatccacagccagttcttccagaggatcctggagaggaagaaggagagcctggtggacaagtctgagaagaacttcctgatcaagagaattggagatgtgctggtgaaccagttcagcggggagaatgctgagcggctgaagaagacctacggcaagttctgtggccagcacaaccagagcgtgaactacttcaaggacctgtatgccaaggacaagcgcttccaggcctttgtgaagaagaagatgagcagctctgtggtgcggcggctgggcatccctgagtgcatcctgctggtgacccagaggatcaccaagtaccctgtgctcttccagaggatcctgcagtgcaccaaggacaatgaggtggagcaggaggacctggcccagagcctgagcctggtgaaggatgtgattggagctgtggacagcaaggtggccagctatgagaagaaggtgcggctgaatgagatctacaccaagacagacagcaagagcatcatgaggatgaagagcggccagatgtttgccaaggaggacctgaagaggaagaagctggtgagagatggctctgtgttcctgaagaatgctgctggccgcctgaaggaggtgcaggccgtgctgctgacagacatcctggtgttcctgcaggagaaggaccagaagtacatctttgccagcctggaccagaagagcaccgtcatcagcctgaagaagctgattgtgcgggaggtggcccacgaggagaagggcctcttcctgatctccatgggcatgacagatcctgagatggtggaggtgcacgccagcagcaaggaggagagaaattcctggatccagatcatccaggacaccatcaacacctag

SEQ ID NO: 142073 - DNA, 1158 bp, synthetic construct
  misc_feature 1..1158: note = Description of Artificial Sequence: Synthetic coding sequence
  source 1..1158: mol_type = other DNA
atgtatgaaagacacaagaggcgctacagcctgtgtgacatcagcaaggtggacagaacagtggatgtggtgctgctgaagatcaaccgggagaactggtgcaccatcgagccctgcccagatgctgccagcctgctggccagcaagcagagcccagaatgtgagaacttcctggatgtgggcctgggcagagaatgtaccagcaagcagggcgtgctgaagcgggagagcggcagtgacagcgacctcttccacagccccagtgatgacatggacagcatcatcttccccaagccagaggaggagcacctggcctgtgacatcaccggcagcagcagcagcacagatgacacagccagcctggacagacacagcagccacggcagtgatgtgtccctgagccagatcctgaagcccaacagaagccgggaccggcagagcctggatggcttctacagccacggcatgggcgctgagggccgggagagcgagagcgagcctgctgaccctggagatgtggaggaggaggagatggacagcatcacagaggtgcctgccaactgcagcgtgctgcggagctccatgaggagcctgagccccttccgccgccacagctggggccctgggaagaatgctgccagtgatgctgagatgaaccacaggagcttcagcctggagggcctgactggaggagctggggtgggcaacaagcccagcagcagcctggaggtgagcagcgccaatgctgaggagctgcggcaccccttctctggagaggagcgggtggacagcctggtgtccctgtctgaggaggacctggagagtgaccagcgggagcacaggatgtttgaccagcagatctgccacaggagcaagcagcagggcttcaactactgcaccagcgccatcagcagccccctgaccaagagcatcagcctgatgaccatcagccaccctggcctggacaacagccggcccttccacagcaccttccacaacaccagcgccaacctgacagagagcatcacagaggagaactacaacttcctgccccacagccccagcaagaaggacagcgagtggaagagcggcaccaaggtgtccaggaccttctcctacatcaagaacaagatgagcagcagcaagaagagcaagtag

SEQ ID NO: 142074 - DNA, 8379 bp, synthetic construct
  misc_feature 1..8379: note = Description of Artificial Sequence: Synthetic coding sequence
  source 1..8379: mol_type = other DNA
aagctgctggagaagcagccccccattgaaggagactgtgtggtgacagtgctgctggccgaggaggacaaggccgaggatgatgtggtgttctacctggtgttcctgggcagcaccctgcggcactgcaccagcaccaggaaggtgtccagtgacaccctggagaccatcgcccctggccatgactgctgtgagaccgtgaaggtgcagctgtgtgccagcaaggagggcctgcctgtgtttgtggtggccgaggaggacttccactttgtgcaggatgaggcctatgatgctgcccagttcctggccaccagcgctggcaaccagcaggccctgaacttcacccgcttcctggaccagagcggccccccatctggagatgtgaacagcctggacaagaagctggtgctggccttccgccacctgaagctgcccacagagtggaatgtgctgggcacagaccagagcctgcatgatgctggcccccgggagaccctgatgcactttgctgtgcggctgggcctgctgcggctgacctggttcctgctgcagaagccaggcggccgcggggccctgagcatccacaaccaggagggcgccacccctgtgtccctggccctggagcggggctaccacaagctgcaccagctgctgacagaagaaaatgctggggagccagacagctggagcagcctgtcctatgagatcccctacggggactgcagcgtgcgccaccaccgggagctggacatctacaccctgaccagcgagagtgacagccaccacgagcaccccttccctggagatggctgcaccggccccatcttcaagctgatgaacatccagcagcagctgatgaagaccaacctgaagcagatggacagcctgatgcccctgatgatgacagcccaggaccccagcagcgcccctgagacagatggccagttcctgccctgtgcccctgagcccacagacccccagaggctgagcagcagcgaggagacagagagcacccagtgctgccccggcagccctgtggcccagacagagagcccctgtgacctgagcagcatcgtggaggaggagaacacagacaggagctgcaggaagaagaacaagggcgtggagaggaagggggaggaggtggagcccgcccccatcgtggacagcggcaccgtgtctgaccaggacagctgcctgcagagcctgcctgactgtggggtgaagggcacagagggcctgagcagctgtggcaacagaaatgaggagaccggcaccaagagcagcggcatgcccacagaccaggagagcctgagcagtggagatgctgtgctgcagagggacctggtgatggagcctggaacagcccagtacagcagcggcggggagctgggcggcatcagcaccaccaacgtgtccaccccagacacagctggggagatggagcacggcctgatgaacccagatgccaccgtgtggaagaatgtgctgcagggcggggagagcaccaaggagagatttgagaacagcaacatcggcacagctggggccagtgatgtgcacgtgaccagcaagcctgtggacaagatctctgtgcccaactgtgccccagctgccagcagcctggatggcaacaagccagctgagagcagcctggccttcagcaatgaggagaccagcacagagaagacagctgagacagagaccagccgcagccgggaggagagcgcagatgcccctgtggaccagaacagcgtggtgatcccagctgctgccaaggacaagatcagtgatggcctggagccctacaccctgctggccgccggcatcggggaggccatgagccccagcgacctggccctgctgggcctggaggaggatgtgatgccccaccagaacagcgagaccaacagcagccacgcccagagccagaagggcaagagcagccccatctgcagcaccactggagatgacaagctgtgtgccgacagcgcctgccagcagaacacagtgaccagcagcggggacctggtggccaagctgtgtgacaacatcgtgtctgagagcgagagcaccacagcccggcagcccagcagccaggaccccccagatgccagccactgtgaggacccccaggcccacacagtgaccagtgaccctgtgcgggacacccaggagagagctgacttctgccccttcaaggtggtggacaacaagggccagaggaaggatgtgaagctggacaagcccctgaccaacatgctggaggtggtgagccacccccaccctgtggtgcccaagatggagaaggagctggtgcctgaccaggccgtcatcagtgacagcaccttcagcctggccaacagccctggcagcgagagcgtgaccaaggatgatgccctgagctttgtgcccagccagaaggagaagggcacagccaccccagagctgcacacagccacagactacagagatggcccagatggcaacagcaatgaaccagacacccggcccctggaggacagagctgtgggcctgagcaccagcagcacagctgctgagctgcagcacggcatgggcaacaccagcctgaccggcctgggcggggagcacgagggccctgcccccccagccatccctgaggccctgaacatcaagggcaacacagacagcagcctgcagagcgtgggcaaggccaccctggccctggacagcgtgctgacagaggagggcaagctgctggtggtgtctgagagcagcgctgcccaggagcaggacaaggacaaggctgtgacctgcagcagcatcaaggaaaatgccctgagcagcggcaccctgcaggaggagcagaggaccccacctcctggccaggacacccagcagttccacgagaagagcatctctgctgactgtgccaaggacaaggccctgcagctgagcaacagccctggggccagcagcgccttcctgaaggccgagacagagcacaacaaggaggtggccccccaggtgtccctgctgacccagggcggggccgcccagagcctggtgcccccaggggccagcctggccacagagagccggcaggaggccctgggcgctgagcacaacagcagcgccctgctgccctgcctgctgcctgatggcagtgatggcagtgatgccctgaactgcagccagcccagccccctggatgtgggcgtgaagaacacccagagccagggcaagaccagcgcctgtgaggtgtctggagatgtgacagtggatgtgactggagtgaatgccctgcagggcatggccgagccccggcgggagaacatcagccacaacacccaggacatcctgatccccaacgtgctgctgagccaggagaagaatgctgtgctgggcctgcctgtggccctgcaggacaaggctgtgacagacccccagggcgtgggcaccccagagatgatccccctggactgggagaagggcaagctggagggcgctgaccacagctgcaccatgggagatgctgaggaggcccagattgatgatgaggcccaccctgtgctgctgcagcctgtggccaaggagctgcccacagacatggagctgagcgcccatgatgatggagccccagctggggtgcgggaggtgatgagggccccacccagcggccgggagaggagcacccccagcctgccctgcatggtgtctgcccaggatgcccccctgcccaagggagctgacctgattgaggaggccgccagccgcatcgtggatgctgtgattgagcaggtgaaggctgctggggccctgctgacagaaggagaggcctgccacatgagcctgagcagccctgagctgggccccctgaccaagggcctggagagcgccttcacagagaaggtgtccaccttccccccaggagagagcctgcccatgggcagcaccccagaggaggccaccggcagcctggccggctgctttgctggccgggaggagcctgagaagatcatcctgcctgtgcagggccctgagcctgctgctgagatgccagatgtgaaggcagaagatgaggtggacttccgggccagcagcatcagcgaggaggtggccgtgggcagcattgctgccaccctgaagatgaagcagggccccatgacccaggccatcaaccgggagaactggtgcaccatcgagccctgcccagatgctgccagcctgctggccagcaagcagagcccagaatgtgagaacttcctggatgtgggcctgggccgggagtgcaccagcaagcagggcgtgctgaagcgggagagcggcagtgacagcgacctcttccacagccccagtgatgacatggacagcatcatcttccccaagccagaggaggagcacctggcctgtgacatcaccggcagcagcagcagcacagatgacacagccagcctggacagacacagcagccacggcagtgatgtgtccctgagccagatcctgaagcccaacagaagccgggaccggcagagcctggatggcttctacagccacggcatgggcgctgagggccgggagagcgagagcgagcctgctgaccctggagatgtggaggaggaggagatggacagcatcacagaggtgcctgccaactgcagcgtgctgcggagctccatgaggagcctgagccccttcagaagacacagctggggccctgggaagaatgctgccagtgatgctgagatgaaccaccgctccttcagcctggagggcctgaccggcggggccggcgtgggcaacaagcccagcagcagcctggaggtgtcctctgccaatgctgaggagctgcggcaccccttcagcggggaggagcgggtggacagcctggtgtccctgtctgaggaggacctggagagtgaccagcgggagcacaggatgtttgaccagcagatctgccacaggagcaagcagcagggcttcaactactgcaccagcgccatcagcagccccctgaccaagagcatcagcctgatgaccatcagccaccctggcctggacaacagccggcccttccacagcaccttccacaacaccagcgccaacctgacagagagcatcacagaggagaactacaacttcctgccccacagccccagcaagaaggacagcgagtggaagagcggcaccaaggtgtccaggaccttctcctacatcaagaacaagatgagcagcagcaagaagagcaaggagaaggagaaggagaaggacaagatcaaggagaaggagaaggacagcaaggacaaggagaaggacaagaagacagtgaatggccacaccttcagcagcatccctgtggtgggccccatcagctgcagccagtgcatgaagcccttcaccaacaaggatgcctacacctgtgccaactgcagcgcctttgtgcacaagggctgccgggagagcctggccagctgtgccaaggtgaagatgaagcagcccaagggcagcctgcaggcccatgacaccagcagcctgcccaccgtcatcatgaggaacaagcccagccagcccaaggagcggcccaggtctgctgtgctgctggtggatgaaacagccaccacccccatctttgccaacagaagaagccagcagagcgtgtccctgagcaagtctgtgtccatccagaacatcaccggggtgggcaatgatgagaacatgagcaacacctggaagttcctgagccacagcacagacagcctgaacaagatcagcaaggtgaatgaaagcacagagagcctgacagatgagggcacagacatgaatgaaggccagctgctgggggactttgaaattgagagcaagcagctggaggccgagagctggagccgcatcatcgacagcaagttcctgaagcagcagaagaaggatgtggtgaagaggcaggaggtgatctatgagctgatgcagacagagttccaccacgtgaggaccctgaagatcatgtctggagtgtacagccagggcatgatggctgacctgctgtttgagcagcagatggtggagaagctgttcccctgcctggatgagctgatcagcatccacagccagttcttccagaggatcctggagaggaagaaggagagcctggtggacaagtctgagaagaacttcctgatcaagagaattggagatgtgctggtgaaccagttctctggagaaaatgctgagcggctgaagaagacctacggcaagttctgtggccagcacaaccagagcgtgaactacttcaaggacctgtatgccaaggacaagcgcttccaggcctttgtgaagaagaagatgagcagctctgtggtgcggcggctgggcatccctgagtgcatcctgctggtgacccagaggatcaccaagtaccctgtgctcttccagaggatcctgcagtgcaccaaggacaatgaggtggagcaggaggacctggcccagagcctgagcctggtgaaggatgtgattggagctgtggacagcaaggtggccagctatgagaagaaggtgcggctgaatgagatctacaccaagacagacagcaagagcatcatgaggatgaagagcggccagatgtttgccaaggaggacctgaagaggaagaagctggtgagagatggcagcgtcttcctgaagaatgctgctggccgcctgaaggaggtgcaggccgtgctgctgacagacatcctggtgttcctgcaggagaaggaccagaagtacatctttgccagcctggaccagaagagcaccgtcatcagcctgaagaagctgattgtgcgggaggtggcccacgaggagaagggcctcttcctgatctccatgggcatgacagatcctgagatggtggaggtgcacgccagcagcaaggaggagaggaacagctggatccagatcatccaggacaccatcaacaccctgaacagagatgaagatgagggcatccccagtgaaaatgaggaggagaagaagatgctggacacccgggcccgggagctgaaggagcagctgcaccagaaggaccagaagatcctgctgctgctggaggagaaggagatgatcttccgggacatggctgaatgttccacccccctgcctgaggactgcagccccacccacagcccccgggtgctcttccgcagcaacacagaggaggccctgaagggcggccccctgatgaagagcgccatcaatgaggtggagatcctgcagggcctggtgtctggcaacctgggcggcaccctgggccccaccgtgagcagccccatcgagcaggatgtggtgggccctgtgtccctgccccggcgggcagagacctttggaggctttgacagccaccagatgaatgccagcaaaggaggagagaaggaggagggagatgatggccaggacctgcggaggacagaaagtgacagcggcctgaagaagggcggcaatgccaacctggtgttcatgctgaagagaaattctgagcaggtggtgcagagcgtggtgcacctgtatgagctgctgagcgccctgcagggcgtggtgctgcagcaggacagctacatcgaggaccagaagctggtgctgtctgagcgggccctgaccaggagcctgagccggcccagcagcctcatcgagcaggagaagcagaggagcctggagaagcagaggcaggacctggccaacctgcagaagcagcaggcccagtacctggaggagaagagaagaagagagcgggagtgggaggcccgggagcgggagctgcgggagcgggaggccctgctggcccagcgggaggaggaggtgcagcagggccagcaggacctggagaaggagcgggaggagctgcagcagaagaagggcacctaccagtatgacctggagcggctgcgggccgcccagaagcagctggagcgggagcaggagcagctgcggcgggaggccgagcggctgagccagaggcagacagagcgggacctgtgccaggtgagccacccccacaccaagctgatgaggatccccagcttcttccccagccctgaggagccccccagccccagcgcccccagcatcgccaagagcggcagcctggacagcgagctgtctgtgagccccaagaggaacagcatcagcaggacccacaaggacaagggccccttccacatcctgagcagcaccagccagaccaacaagggccctgagggccagagccaggccccagccagcaccagcgccagcacccggctgtttggcctgaccaagcccaaggagaagaaggagaagaagaagaagaacaagaccagccgcagccagcctggagatggccctgccagcgaggtgtctgctgagggggaggagatcttctgctag

SEQ ID NO: 142075 - DNA, 5238 bp, synthetic construct
  misc_feature 1..5238: note = Description of Artificial Sequence: Synthetic coding sequence
  source 1..5238: mol_type = other DNA
atgaagctgaacccccagcaggcccccctgtatggagactgtgtggtgacagtgctgctggccgaggaggacaaggcagaagatgatgtggtgttctacctggtgttcctgggcagcaccctgcggcactgcaccagcaccaggaaggtgtccagtgacaccctggagaccatcgcccctggccatgactgctgtgaaacagtgaaggtgcagctgtgtgccagcaaggagggcctgcctgtgtttgtggtggccgaggaggacttccactttgtgcaggatgaggcctatgatgctgcccagttcctggccaccagcgctggcaaccagcaggccctgaacttcacccgcttcctggaccagagcggcccccccagcggagatgtgaacagcctggacaagaagctggtgctggccttccgccacctgaagctgcccacagagtggaatgtgctgggcacagaccagagcctgcatgatgctggcccccgggagaccctgatgcactttgctgtgcggctgggcctgctgcggctgacctggttcctgctgcagaagccaggcggccgcggggccctgagcatccacaaccaggagggcgccacccctgtgtccctggccctggagcggggctaccacaagctgcaccagctgctgacagaggagaatgctggggagccagacagctggagcagcctgtcctatgagatcccctatggagactgcagcgtgcgccaccaccgggagctggacatctacaccctgaccagcgagagtgacagccaccacgagcaccccttccctggagatggctgcaccggccccatcttcaagctgatgaacatccagcagcagctgatgaagaccaacctgaagcagatggacagcctgatgcccctgatgatgacagcccaggaccccagcagcgcccctgagacagatggccagttcctgccctgtgcccctgagcccacagacccccagaggctgagcagcagcgaggagacagagagcacccagtgctgccccggcagccctgtggcccagacagagagcccctgtgacctgagcagcatcgtggaggaggagaacacagacaggagctgcaggaagaagaacaagggcgtggagaggaaaggagaggaggtggagcccgcccccatcgtggacagcggcaccgtgtctgaccaggacagctgcctgcagagcctgcctgactgtggggtgaagggcacagagggcctgagcagctgtggcaacagaaatgaggagaccggcaccaagagcagcggcatgcccacagaccaggagagcctgagcagtggagatgctgtgctgcagagggacctggtgatggagcccggcacagcccagtacagcagtggaggagagctgggcggcatcagcaccaccaacgtgtccaccccagacacagctggggagatggagcacggcctgatgaacccagatgccaccgtgtggaagaatgtgctgcagggcggggagagcaccaaggagagatttgagaacagcaacattggaacagctggggccagtgatgtgcacgtgaccagcaagcctgtggacaagatctctgtgcccaactgtgccccagctgccagcagcctggatggcaacaagccagctgagagcagcctggccttcagcaatgaggagaccagcacagagaagacagctgagacagagaccagccgcagccgggaggagagcgcagatgcccctgtggaccagaacagcgtggtgatcccagctgctgccaaggacaagatcagtgatggcctggagccctacaccctgctggccgccggcattggagaggccatgagccccagcgacctggccctgctgggcctggaggaggatgtgatgccccaccagaacagcgagaccaacagcagccacgcccagagccagaagggcaagagcagccccatctgcagcaccactggagatgacaagctgtgtgccgacagcgcctgccagcagaacacagtgaccagcagcggggacctggtggccaagctgtgtgacaacatcgtgtctgagagcgagagcaccacagcccggcagcccagcagccaggaccccccagatgccagccactgtgaggacccccaggcccacacagtgaccagtgaccctgtgcgggacacccaggagagagctgacttctgccccttcaaggtggtggacaacaagggccagaggaaggatgtgaagctggacaagcccctgaccaacatgctggaggtggtgagccacccccaccctgtggtgcccaagatggagaaggagctggtgcctgaccaggccgtcatcagtgacagcaccttcagcctggccaacagccctggcagcgagagcgtgaccaaggatgatgccctgagctttgtgcccagccagaaggagaagggcacagccaccccagagctgcacacagccacagactacagagatggcccagatggcaacagcaatgaaccagacacccggcccctggaggacagagctgtgggcctgagcaccagcagcacagctgctgagctgcagcacggcatgggcaacaccagcctgaccggcctgggcggggagcacgagggccctgcccccccagccatccctgaggccctgaacatcaagggcaacacagacagcagcctgcagagcgtgggcaaggccaccctggccctggacagcgtgctgacagaggagggcaagctgctggtggtgtctgagagcagcgctgcccaggagcaggacaaggacaaggctgtgacctgcagcagcatcaaggaaaatgccctgagcagcggcaccctgcaggaggagcagaggaccccacctcctggccaggacacccagcagttccacgagaagagcatctctgctgactgtgccaaggacaaggccctgcagctgagcaacagccctggggccagcagcgccttcctgaaggccgagacagagcacaacaaggaggtggccccccaggtgtccctgctgacccagggcggggccgcccagagcctggtgcccccaggggccagcctggccacagagagccggcaggaggccctgggcgctgagcacaacagcagcgccctgctgccctgcctgctgcctgatggcagtgatggcagtgatgccctgaactgcagccagcccagccccctggatgtgggcgtgaagaacacccagagccagggcaagaccagcgcctgtgaggtgtctggagatgtgacagtggatgtgactggagtgaatgccctgcagggcatggccgagccccggcgggagaacatcagccacaacacccaggacatcctgatccccaacgtgctgctgagccaggagaagaatgctgtgctgggcctgcctgtggccctgcaggacaaggctgtgacagacccccagggcgtgggcaccccagagatgatccccctggactgggagaagggcaagctggagggcgctgaccacagctgcaccatgggagatgctgaggaggcccagattgatgatgaggcccaccctgtgctgctgcagcctgtggccaaggagctgcccacagacatggagctgagcgcccatgatgatggagccccagctggggtgcgggaggtgatgagggcccctccttctggccgggagaggagcacccccagcctgccctgcatggtgtctgcccaggatgcccccctgcccaagggagctgacctgattgaggaggccgccagcagaattgtggatgctgtgattgagcaggtgaaggccgccggggccctgctgacagaaggagaggcctgccacatgagcctgagcagccctgagctgggccccctgaccaagggcctggagagcgccttcacagagaaggtgtccaccttccccccaggagagagcctgcccatgggcagcaccccagaggaggccaccggcagcctggccggctgctttgctggccgggaggagcctgagaagatcatcctgcctgtgcagggccctgagcctgctgctgagatgccagatgtgaaggccgaggatgaggtggacttccgggccagcagcatcagcgaggaggtggccgtgggcagcattgctgccaccctgaagatgaagcagggccccatgacccaggccatcaaccgggagaactggtgcaccatcgagccctgcccagatgctgccagcctgctggccagcaagcagagcccagaatgtgagaacttcctggatgtgggcctgggcagagaatgtaccagcaagcagggcgtgctgaagcgggagagcggcagtgacagcgacctcttccacagccccagtgatgacatggacagcatcatcttccccaagccagaggaggagcacctggcctgtgacatcaccggcagcagcagcagcacagatgacacagccagcctggacagacacagcagccacggcagtgatgtgtccctgagccagatcctgaagcccaacagaagccgggaccggcagagcctggatggcttctacagccacggcatgggcgctgagggccgggagagcgagagcgagcctgctgaccctggagatgtggaggaggaggagatggacagcatcacagaggtgcctgccaactgcagcgtgctgcggagctccatgaggagcctgagccccttccgccgccacagctggggccctgggaagaatgctgccagtgatgctgagatgaaccacaggagcttcagcctggagggcctgactggaggagctggggtgggcaacaagcccagcagcagcctggaggtgagcagcgccaatgctgaggagctgcggcaccccttctctggagaggagcgggtggacagcctggtgtccctgtctgaggaggacctggagagtgaccagcgggagcacaggatgtttgaccagcagatctgccacaggagcaagcagcagggcttcaactactgcaccagcgccatcagcagccccctgaccaagagcatcagcctgatgaccatcagccaccctggcctggacaacagccggcccttccacagcaccttccacaacaccagcgccaacctgacagagagcatcacagaggagaactacaacttcctgccccacagccccagcaagaaggacagcgagtggaagagcggcaccaaggtgtccaggaccttctcctacatcaagaacaagatgagcagcagcaagaagagcaagtag

SEQ ID NO: 142076 - DNA, 828 bp, synthetic construct
  misc_feature 1..828: note = Description of Artificial Sequence: Synthetic coding sequence
  source 1..828: mol_type = other DNA
cccagtgatgacatggacagcatcatcttccccaagccagaggaggagcacctggcctgtgacatcaccggcagcagcagcagcacagatgacacagccagcctggacagacacagcagccacggcagtgatgtgtccctgagccagatcctgaagcccaacagaagccgggaccggcagagcctggatggcttctacagccacggcatgggcgctgagggccgggagagcgagagcgagcctgctgaccctggagatgtggaggaggaggagatggacagcatcacagaggtgcctgccaactgcagcgtgctgcggagctccatgaggagcctgagccccttccgccgccacagctggggccctgggaagaatgctgccagtgatgctgagatgaaccacaggagctccatgagggtgctgggagatgtggtgcggcggccccccatccaccggcgctccatgtcctggtgccccagcggcgtgcagtacagcgctggcctgtctgctgacttcaactaccgctccttcagcctggagggcctgactggaggagctggggtgggcaacaagcccagcagcagcctggaggtgagcagcgccaatgctgaggagctgcggcaccccttctctggagaggagcgggtggacagcctggtgtccctgtctgaggaggacctggagagtgaccagcgggagcacaggatgtttgaccagcagatctgccacaggagcaagcagcagggcttcaactactgcaccagcgccatcagcagccccctgaccaagagcatcagcctgatgaccatcagccaccctggcctgtag

SEQ ID NO: 142077 - DNA, 117 bp, synthetic construct
  misc_feature 1..117: note = Description of Artificial Sequence: Synthetic coding sequence
  source 1..117: mol_type = other DNA
atgaagctgaacccccagcaggcccccctgtatggagactgtgtggtgacagtgctgctggccgaggaggacaaggcagaagatgatgtggtgttctacctggtgttcctgggctag

SEQ ID NO: 142078 - DNA, 540 bp, synthetic construct
  misc_feature 1..540: note = Description of Artificial Sequence: Synthetic coding sequence
  source 1..540: mol_type = other DNA
atgaagctgaacccccagcaggcccccctgtatggagactgtgtggtgacagtgctgctggccgaggaggacaaggcagaagatgatgtggtgttctacctggtgttcctgggcagcaccctgcggcactgcaccagcaccaggaaggtgtccagtgacaccctggagaccatcgcccctggccatgactgctgtgaaacagtgaaggtgcagctgtgtgccagcaaggagggcctgcctgtgtttgtggtggccgaggaggacttccactttgtgcaggatgaggcctatgatgctgcccagttcctggccaccagcgctggcaaccagcaggccctgaacttcacccgcttcctggaccagagcggcccccccagcggagatgtgaacagcctggacaagaagctggtgctggccttccgccacctgaagctgcccacagagtggaatgtgctgggcacagaccagagcctgcatggagagaacctgtatgacctgcagacccacttcaagtttgtgatcttcctgctcttcttctag

SEQ ID NO: 142079 - DNA, 414 bp, synthetic construct
  misc_feature 1..414: note = Description of Artificial Sequence: Synthetic coding sequence
  source 1..414: mol_type = other DNA
atgtctgagacccagaacagcaccagccagaaggccatggatgaggacaacaaggccgccagccagaccatgcccaacacccaggacaagaactatgaagatgagctgacccaggtggccctggccctggtggaggatgtgatcaactatgctgtgaagatcgtggaggaggagaggaaccccctgaagaacatcaagtggatgacccacggggagttcaccgtggagaagggcctgaagcagattgatgagtacttcagtgatgcccccatcgtggtgtcctatgtgggggaccaccaggccctggtgcaccggcccggcatggtgcgcttccgggagaactggcagaagaacctgacagatgccaagtacagcttcatggagagcttccccttcctgttcaacagagtgtag

SEQ ID NO: 142080 - DNA, 270 bp, synthetic construct
  misc_feature 1..270: note = Description of Artificial Sequence: Synthetic coding sequence
  source 1..270: mol_type = other DNA
atgtctgagacccagaacagcaccagccagaaggccatggatgaggacaacaaggccgccagccagaccatgcccaacacccaggacaagaactatgaagatgagctgacccaggtggccctggccctggtggaggatgtgatcaactatgctgtgaagatcgtggaggaggagaggaaccccctgaagaacatcaagtggatgacccacggggagttcaccgtggagaagggcctgaagcagattgatgagtacttctctgtgtcctag

SEQ ID NO: 142081 - DNA, 417 bp, synthetic construct
  misc_feature 1..417: note = Description of Artificial Sequence: Synthetic coding sequence
  source 1..417: mol_type = other DNA
atgtctgagacccagaacagcaccagccagaaggccatggatgaggacaacaaggccgccagccagaccatgcccaacacccaggacaagaactatgaagatgagctgacccaggtggccctggccctggtggaggatgtgatcaactatgctgtgaagatcgtggaggaggagaggaaccccctgaagaacatcaagtggatgacccacggggagttcaccgtggagaagggcctgaagcagattgatgagtacttctccccagatgcccccatcgtggtgtcctatgtgggggaccaccaggccctggtgcacaggcctggcatggtgcgcttccgggagaactggcagaagaacctgacagatgccaagtacagcttcatggagagcttccccttcctgttcaacagagtgtag

SEQ ID NO: 142082 - DNA, 414 bp, synthetic construct; identical to SEQ ID NO: 142079
  misc_feature 1..414: note = Description of Artificial Sequence: Synthetic coding sequence
  source 1..414: mol_type = other DNA

SEQ ID NO: 142083 - DNA, 594 bp, synthetic construct
  misc_feature 1..594: note = Description of Artificial Sequence: Synthetic coding sequence
  source 1..594: mol_type = other DNA
atgtctgagacccagaacagcaccagccagaaggccatggatgaggacaacaaggccgccagccagaccatgcccaacacccaggacaagaactatgaagatgagctgacccaggtggccctggccctggtggaggatgtgatcaactatgctgtgaagatcgtggaggaggagaggaaccccctgaagaacatcaagtggatgacccacggggagttcaccgtggagaagggcctgaagcagattgatgagtacttcagcaaatgtgtgtccaagaagtgctgggcccatggagtggagtttgtggagaggaaggacctgatccacagcttcctgtacatctactacgtgcactggagcatcagcacagctgacctgcctgtggcccgcatctctgctggcacctacttcaccatgaaggtgtccaagaccaagcccccagatgcccccatcgtggtgtcctatgtgggggaccaccaggccctggtgcaccggcccggcatggtgcgcttccgggagaactggcagaagaacctgacagatgccaagtacagcttcatggagagcttccccttcctgttcaacagagtgtag

SEQ ID NO: 142084 - DNA, 270 bp, synthetic construct; identical to SEQ ID NO: 142080
  misc_feature 1..270: note = Description of Artificial Sequence: Synthetic coding sequence
  source 1..270: mol_type = other DNA

SEQ ID NO: 142085 - DNA, 2088 bp, synthetic construct
  misc_feature 1..2088: note = Description of Artificial Sequence: Synthetic coding sequence
  source 1..2088: mol_type = other DNA
atggctgctgccaccatcgtgcatgacaccagcgaggccgtggagctgtgcccagcctacggcctgtacctgaagcccatcaccaagatgaccatctctgtggccctgccccagctgaagcagcccgggaagagcatcagcaactgggaggtgatggagcggctgaagggcatggtgcagaaccaccagttcagcaccctgcgcatcagcaagagcaccatggacttcatccgctttgaaggagaggtggagaacaagagcctggtgaagagcttcctggcctgcctggatggcaagaccatcaagctgagcggcttcagtgacatcctgaaggtgcgggctgctgagttcaagattgacttccccaccaggcatgactgggacagcttcttcagagatgccaaggacatgaatgagaccctgcccggggagaggccagacaccatccacctggagggcctgccctgcaagtggtttgccctgaaggagagcggcagcgagaagcccagtgaagatgtgctggtgaaggtgtttgagaagtttggagagatcagaaatgtggacatccccatgctggacccctaccgggaggagatgacaggcaggaacttccacaccttctcctttggaggccacctgaactttgaggcctacgtgcagtaccgggagtacatgggcttcatccaggccatgtctgccctgcggggcatgaagctgatgtacaagggggaggatggcaaggctgtggcctgcaacatcaaggtgtcctttgacagcaccaagcacctgagtgatgccagcatcaagaagaggcagctggagcggcagaagctgcaggagctggagcagcagcgggaggagcagaagaggcgggagaaggaggccgaggagcggcagagagctgaggagaggaagcagaaggagctggaggagctggagcgggagaggaagcgggaggagaagctgaggaagcgggagcagaagcagagggaccgggagctgcggaggaaccagaagaagctggagaagctgcaggccgaggagcagaagcagctgcaggagaagatcaagctggaggagaggaagctgctgctggcccagaggaacctgcagagcatccggctgattgctgagctgctgagccgggccaaggctgtgaagctgcgggagcaggagcagaaggaggagaagctgcggctgcagcagcaggaggagcggcggcggctgcaggaggccgagctgcggcgggtggaggaggagaaggagcgggccctgggcctgcagaggaaggagcgggagctgcgggagcggctgctgagcatcctgctgagcaagaagccagatgacagccacacccatgatgagctgggcgtggcccatgctgacctgctgcagcctgtgctggacatcctgcagacagtgagcagcggctgtgtgtctgccaccaccctgcaccccctgggcggccagcccccagctggggcccccaaggagagccctgcccaccctgaggctgatggagcccccaagtctgtgaatggatctgtggccgaggaggccccctgcaaggaggtgcagagcagctgccgggtggtgcctgaagatggcagccctgagaagcgctgccctggaggagtgctgagctgcatcccagacaacaaccagcagcccaagggcatcccagcctgtgagcagaatgtgtccaggaaggacaccaggtctgagcaggacaagtgcaaccgggagcccagcaagggccggggccgggccactggagatggcctggccgacagacacaagcgggagaggagccgggcccggcgggccagcagcagagaagatggccggcccaggaaggagcggcggccccacaagaagcacgcctacaaggatgacagcccccggcggcgcagcaccagcccagaccacaccaggagcagaagaagccacagcaaggacagacaccggcgggagaggagccgggagcggcggggcagcgccagcaggaagcacagccgccacagaagaagaagtgagaggagccgcagccgcagccccagccgccacaggagcacctggaacagatag

SEQ ID NO: 142086 - DNA, 1341 bp, synthetic construct
  misc_feature 1..1341: note = Description of Artificial Sequence: Synthetic coding sequence
  source 1..1341: mol_type = other DNA
atggctgctgccaccatcgtgcatgacaccagcgaggccgtggagctgtgcccagcctacggcctgtacctgaagcccatcaccaagatgaccatctctgtggccctgccccagctgaagcagcccgggaagagcatcagcaactgggaggtgatggagcggctgaagggcatggtgcagaaccaccagttcagcaccctgcgcatcagcaagagcaccatggacttcatccgctttgaaggagaggtggagaacaagagcctggtgaagagcttcctggcctgcctggatggcaagaccatcaagctgagcggcttcagtgacatcctgaaggtgcgggctgctgagttcaagattgacttccccaccaggcatgactgggacagcttcttcagagatgccaaggacatgaatgagaccctgcccggggagaggccagacaccatccacctggagggcctgccctgcaagtggtttgccctgaaggagagcggcagcgagaagcccagtgaagatgtgctggtgaaggtgtttgagaagtttggagagatcagaaatgtggacatccccatgctggacccctaccgggaggagatgacaggcaggaacttccacaccttctcctttggaggccacctgaactttgaggcctacgtgcagtaccgggagtacatgggcttcatccaggccatgtctgccctgcggggcatgaagctgatgtacaagggggaggatggcaaggctgtggcctgcaacatcaaggtgtcctttgacagcaccaagcacctgagtgatgccagcatcaagaagaggcagctggagcggcagaagctgcaggagctggagcagcagcgggaggagcagaagaggcgggagaaggaggccgaggagcggcagagagctgaggagaggaagcagaaggagctggaggagctggagcgggagaggaagcgggaggagaagctgaggaagcgggagcagaagcagagggaccgggagctgcggaggaaccagaagaagctggagaagctgcaggccgaggagcagaagcagctgcaggagaagatcaagctggaggagaggaagctgctgctggcccagaggaacctgcagagcatccggctgattgctgagctgctgagccgggccaaggtgcctgggggcagcctgtgcagccggcagcccaggcctggctgcccccagtgcccccccctgaagtgtggcagaagacatggagctgtgagccccccagctgctgctgtggccaccaagccagccctgatgcccaggatgacagcccccagccgggagggcgtggccctggtgtgccgcagcaggtag

SEQ ID NO: 142087 - DNA, 2580 bp, synthetic construct
  misc_feature 1..2580: note = Description of Artificial Sequence: Synthetic coding sequence
  source 1..2580: mol_type = other DNA
atggagattgaggtgtctgtggccgagtgcaagtctgtgcccggcatcaccagcaccccccaccccatggaccaccccagcgccttctacagccccccccacaacggcctgctgacagaccaccacgagagcctggacaatgatgtggcccgggagatccgctacctggatgaggtgctggaggccaactgctgtgacagcgctgtggatggcacctacaacggcaccagcagccctgagcctggagctgtggtgctggtgggcggcctgagcccccctgtgcatgaggccacccagcctgagcccacagagaggacagccagccggcaggccccaccccacatcgagctgagcaacagcagcccagaccccatggccgaggccgagaggaccaacggccacagccccagccagcccagagatgccctgggggacagcctgcaggtgcctgtgagccccagcagcaccaccagcagccgctgcagcagcagagatggagagttcaccctgaccaccctgaagaaggaggccaagtttgagctgcgggccttccacgaggacaagaagcccagcaagctgtttgaagatgatgaacatgagaaggagcagtactgcatcaggaaggtgcggcccagcgaggagatgctggagctggagaaggagcggcgggagctgatccgcagccaggccgtgaagaagaaccctggcattgctgccaagtggtggaaccccccccaggagaagaccatcgaggagcagctggatgaggagcacctggagagccacaagaagtacaaggagaggaaggagcggcgggcccagcaggagcagctgctgctgcagaagcagctgcagcagcagcagcagcagccccccagccagctgtgcacagccccagccagcagccatgagcgggcctccatgattgacaaggccaaggaggacatcgtgacagagcagattgacttctctgctgccaggaagcagttccagctgatggagaacagccggcaggccgtggccaagggccagagcacccccaggctcttcagcatcaagcccttctaccggcccctgggctctgtgaacagcgacaagcccctgaccaaccccaggcctccttctgtgggcggccccccagaagattctggggccagcgctgccaagggccagaagagccctggggccctggagaccccatctgctgctggcagccagggcaacacagccagccagggcaaggagggcccctacagcgagcccagcaagaggggccccctgagcaagctgtgggccgaggatggagagttcaccagcgcccgggctgtgctgactgtggtgaaggatgatgaccacggcatcctggaccagttcagccgctctgtgaatgtgtccctgacccaggaggagctggacagcggcctggatgagctgtctgtgcgcagccaggacaccaccgtgctggagaccctgagcaatgacttctccatggacaacatcagtgacagcggggccagcaatgagaccaccaatgccctgcaggagaacagcctggccgacttcagcctgccccagaccccccagacagacaaccccagcgagggccgcggggagggcgtgtccaagagcttcagtgaccacggcttctacagccccagcagcaccctgggggacagccccctggtggatgaccccctggagtaccaggccggcctgctggtgcagaatgccatccagcaggccatcgccgagcaggtggacaaggctgtgtccaagaccagcagagatggagctgagcagcagggccctgaggccaccgtggaggaggccgaggccgccgcctttggaagtgagaagccccagagcatgtttgagcccccccaggtgagcagccctgtgcaggagaagagagatgtgctgcccaagatcctgcctgcagaagatcgggccctgcgggagcggggccccccccagcccctgcctgctgtgcagcccagcggccccatcaacatggaggagaccaggcctgagggcagctacttcagcaagtacagcgaggccgctgagctgcggagcacagccagcctgctggccacccaggagagtgatgtgatggtgggccccttcaagctgcggagcaggaagcagaggaccctgtccatgattgaggaggagatccgggccgcccaggagcgggaggaggagctgaagaggcagaggcaggtgctgcagagcacccagagccccaggaccaagaatgcccccagcctgcccagcaggacctgctacaagacagcccctgggaagattgagaaggtgaagcccccacccagccccaccacagagggccccagcctgcagcctgacctggcccctgaggaggccgccggcacccagaggcccaagaacctgatgcagaccctgatggaggactatgagacccacaagagcaagagaagagagaggatggatgacagctctgtgctggaggccaccagggtgaacagaaggaagagcgccctggccctgcgctgggaggccggcatctatgccaaccaggaggaggaggacaatgaatag

SEQ ID NO: 142088 - DNA, 2847 bp, synthetic construct
  misc_feature 1..2847: note = Description of Artificial Sequence: Synthetic coding sequence
  source 1..2847: mol_type = other DNA
atgcgctggccccagcccggggctgctgcccggctgcccccagagagccctggccccccagagagccctggccccccagagcgggaggccgccgccgcccggcgctggacaggagctgagccccaggactgtgcccctggcagcggccggcctgagaagccaccccagctgtctgaagatgacatctggctgaagtctgagggggacaactacagcgccaccctgctggagcctgctgccagcagcctgagcccagaccacaagaacatggagattgaggtgtctgtggccgagtgcaagtctgtgcccggcatcaccagcaccccccaccccatggaccaccccagcgccttctacagccccccccacaacggcctgctgacagaccaccacgagagcctggacaatgatgtggcccgggagatccgctacctggatgaggtgctggaggccaactgctgtgacagcgctgtggatggcacctacaacggcaccagcagccctgagcccggggctgtggtgctggtgggcggcctgagcccccctgtgcatgaggccacccagcctgagcccacagagaggacagccagccggcaggccccaccccacatcgagctgagcaacagcagcccagaccccatggccgaggccgagaggaccaacggccacagccccagccagcccagagatgccctgggggacagcctgcaggtgcctgtgagccccagcagcaccaccagcagccgctgcagcagcagagatggagagttcaccctgaccaccctgaagaaggaggccaagtttgagctgcgggccttccacgaggacaagaagcccagcaagctgtttgaagatgatgagcacgagaaggagcagtactgcatcaggaaggtgcggcccagcgaggagatgctggagctggagaaggagcggcgggagctgatccgcagccaggccgtgaagaagaaccctggcattgctgccaagtggtggaaccccccccaggagaagaccatcgaggagcagctggatgaggagcacctggagagccacaagaagtacaaggagaggaaggagcggcgggcccagcaggagcagctgctgctgcagaagcagctgcagcagcagcagcagcagccccccagccagctgtgcacagccccagccagcagccatgagcgggcctccatgattgacaaggccaaggaggacatcgtgacagagcagattgacttctctgctgccaggaagcagttccagctgatggagaacagccggcaggccgtggccaagggccagagcacccccaggctcttcagcatcaagcccttctaccggcccctgggctctgtgaacagcgacaagcccctgaccaacccccggccccccagcgtgggcggccccccagaggacagcggggccagcgctgccaagggccagaagagccctggggccctggagacccccagcgctgctggcagccagggcaacacagccagccagggcaaggagggcccctacagcgagcccagcaagaggggccccctgagcaagctgtgggccgaggatggagagttcaccagcgcccgggctgtgctgactgtggtgaaggatgatgaccacggcatcctggaccagttcagccgctctgtgaatgtgtccctgacccaggaggagctggacagcggcctggatgagctgtctgtgcgcagccaggacaccaccgtgctggagaccctgagcaatgacttctccatggacaacatcagtgacagcggggccagcaatgagaccaccaatgccctgcaggagaacagcctggccgacttcagcctgccccagaccccccagacagacaaccccagcgagggccgcggggagggcgtgtccaagagcttcagtgaccacggcttctacagccccagcagcaccctgggggacagccccctggtggatgaccccctggagtaccaggccggcctgctggtgcagaatgccatccagcaggccatcgccgagcaggtggacaaggctgtgtccaagaccagcagagatggagctgagcagcagggccctgaggccaccgtggaggaggccgaggccgccgccttcggcagcgagaagccccagagcatgtttgagcccccccaggtgagcagccctgtgcaggagaagagagatgtgctgcccaagatcctgcctgctgaggaccgggccctgcgggagcggggccccccccagcccctgcctgctgtgcagcccagcggccccatcaacatggaggagaccaggcctgagggcagctacttcagcaagtacagcgaggccgctgagctgcggagcacagccagcctgctggccacccaggagagtgatgtgatggtgggccccttcaagctgcggagcaggaagcagaggaccctgtccatgattgaggaggagatccgggccgcccaggagcgggaggaggagctgaagaggcagaggcaggtgctgcagagcacccagagccccaggaccaagaatgcccccagcctgcccagcaggacctgctacaagacagcccctgggaagattgagaaggtgaagcccccacccagccccaccacagagggccccagcctgcagcctgacctggcccctgaggaggccgccggcacccagaggcccaagaacctgatgcagaccctgatggaggactatgagacccacaagagcaagaggcgggagaggatggatgacagctctgtgctggaggccaccagggtgaacagaaggaagagcgccctggccctgcgctgggaggccggcatctatgccaaccaggaggaggaggacaatgaatag

SEQ ID NO: 142089 - DNA, 3273 bp, synthetic construct
  misc_feature 1..3273: note = Description of Artificial Sequence: Synthetic coding sequence
  source 1..3273: mol_type = other DNA
atggccgaggccgagctgcacaaggagcggctgcaggccatcgccgagaagaggaagaggcagacagaaattgagggcaagaggcagcagctggatgagcagatcctgctgctgcagcacagcaagagcaaggtgctgcgggagaagtggctgctgcagggcatcccagctggaacagctgaggaggaggaggcccggcggcggcagagcgaggaggatgagttccgggtgaagcagctggaggacaacatccagaggctggagcaggagatccagaccctggagagcgaggagagccagatcagcgccaaggagcagatcatcctggagaagctgaaggagacagagaagagcttcaaggacttccagaagggcttcagcagcacagatggagatgctgtgaactacatcagcagccagctgcctgacctgcccatcctgtgcagcaggacagctgagcccagccctggccaggacggcaccagcagagctgctggggtgggctgggagaatgtgctgctgaaggagggggagagcgccagcaatgccacagagaccagcggccctgacatgaccatcaagaagccaccccagctgtctgaagatgacatctggctgaagtctgagggggacaactacagcgccaccctgctggagcctgctgccagcagcctgagcccagaccacaagaacatggagattgaggtgtctgtggccgagtgcaagtctgtgcccggcatcaccagcaccccccaccccatggaccaccccagcgccttctacagccccccccacaacggcctgctgacagaccaccacgagagcctggacaatgatgtggcccgggagatccgctacctggatgaggtgctggaggccaactgctgtgacagcgctgtggatggcacctacaacggcaccagcagccctgagcccggggctgtggtgctggtgggcggcctgagcccccctgtgcatgaggccacccagcctgagcccacagagaggacagccagccggcaggccccaccccacatcgagctgagcaacagcagcccagaccccatggccgaggccgagaggaccaacggccacagccccagccagcccagagatgccctgggggacagcctgcaggtgcctgtgagccccagcagcaccaccagcagccgctgcagcagcagagatggagagttcaccctgaccaccctgaagaaggaggccaagtttgagctgcgggccttccacgaggacaagaagcccagcaagctgtttgaagatgatgagcacgagaaggagcagtactgcatcaggaaggtgcggcccagcgaggagatgctggagctggagaaggagcggcgggagctgatccgcagccaggccgtgaagaagaaccctggcattgctgccaagtggtggaaccccccccaggagaagaccatcgaggagcagctggatgaggagcacctggagagccacaagaagtacaaggagaggaaggagcggcgggcccagcaggagcagctgctgctgcagaagcagctgcagcagcagcagcagcagccccccagccagctgtgcacagccccagccagcagccatgagcgggcctccatgattgacaaggccaaggaggacatcgtgacagagcagattgacttctctgctgccaggaagcagttccagctgatggagaacagccggcaggccgtggccaagggccagagcacccccaggctcttcagcatcaagcccttctaccggcccctgggctctgtgaacagcgacaagcccctgaccaacccccggccccccagcgtgggcggccccccagaggacagcggggccagcgctgccaagggccagaagagccctggggccctggagacccccagcgctgctggcagccagggcaacacagccagccagggcaaggagggcccctacagcgagcccagcaagaggggccccctgagcaagctgtgggccgaggatggagagttcaccagcgcccgggctgtgctgactgtggtgaaggatgatgaccacggcatcctggaccagttcagccgctctgtgaatgtgtccctgacccaggaggagctggacagcggcctggatgagctgtctgtgcgcagccaggacaccaccgtgctggagaccctgagcaatgacttctccatggacaacatcagtgacagcggggccagcaatgagaccaccaatgccctgcaggagaacagcctggccgacttcagcctgccccagaccccccagacagacaaccccagcgagggccgcggggagggcgtgtccaagagcttcagtgaccacggcttctacagccccagcagcaccctgggggacagccccctggtggatgaccccctggagtaccaggccggcctgctggtgcagaatgccatccagcaggccatcgccgagcaggtggacaaggctgtgtccaagaccagcagagatggagctgagcagcagggccctgaggccaccgtggaggaggccgaggccgccgccttcggcagcgagaagccccagagcatgtttgagcccccccaggtgagcagccctgtgcaggagaagagagatgtgctgcccaagatcctgcctgctgaggaccgggccctgcgggagcggggccccccccagcccctgcctgctgtgcagcccagcggccccatcaacatggaggagaccaggcctgagggcagctacttcagcaagtacagcgaggccgctgagctgcggagcacagccagcctgctggccacccaggagagtgatgtgatggtgggccccttcaagctgcggagcaggaagcagaggaccctgtccatgattgaggaggagatccgggccgcccaggagcgggaggaggagctgaagaggcagaggcaggtgctgcagagcacccagagccccaggaccaagaatgcccccagcctgcccagcaggacctgctacaagacagcccctgggaagattgagaaggtgaagcccccacccagccccaccacagagggccccagcctgcagcctgacctggcccctgaggaggccgccggcacccagaggcccaagaacctgatgcagaccctgatggaggactatgagacccacaagagcaagaggcgggagaggatggatgacagctctgtgctggaggccaccagggtgaacagaaggaagagcgccctggccctgcgctgggaggccggcatctatgccaaccaggaggaggaggacaatgaatag

SEQ ID NO: 142090 - DNA, 3312 bp, synthetic construct
  misc_feature 1..3312: note = Description of Artificial Sequence: Synthetic coding sequence
  source 1..3312: mol_type = other DNA
atggccgaggccgagctgcacaaggagcggctgcaggccatcgccgagaagaggaagaggcagacagaaattgagggcaagaggcagcagctggatgagcagatcctgctgctgcagcacagcaagagcaaggtgctgcgggagaagtggctgctgcagggcatcccagctggaacagctgaggaggaggaggcccggcggcggcagagcgaggaggatgagttccgggtgaagcagctggaggacaacatccagaggctggagcaggagatccagaccctggagagcgaggagagccagatcagcgccaaggagcagatcatcctggagaagctgaaggagacagagaagagcttcaaggacttccagaagggcttcagcagcacagatggagatgctgtgaactacatcagcagccagctgcctgacctgcccatcctgtgcagcaggacagctgagcccagccctggccaggacggcaccagcagagctgctggggtgggctgggagaatgtgctgctgaaggagggggagagcgccagcaatgccacagagaccagcggccctgacatgaccatcaagaagccaccccagctgtctgaagatgacatctggctgaagtctgagggggacaactacagcgccaccctgctggagcctgctgccagcagcctgagcccagaccacaagaacatggagattgaggtgtctgtggccgagtgcaagtctgtgcccggcatcaccagcaccccccaccccatggaccaccccagcgccttctacagccccccccacaacggcctgctgacagaccaccacgagagcctggacaatgatgtggcccgggagatccgctacctggatgaggtgctggaggccaactgctgtgacagcgctgtggatggcacctacaacggcaccagcagccctgagcccggggctgtggtgctggtgggcggcctgagcccccctgtgcatgaggccacccagcctgagcccacagagaggacagccagccggcaggccccaccccacatcgagctgagcaacagcagcccagaccccatggccgaggccgagaggaccaacggccacagccccagccagcccagagatgccctgggggacagcctgcaggtgcctgtgagccccagcagcaccaccagcagccgctgcagcagcagagatggagagttcaccctgaccaccctgaagaaggaggccaagtttgagctgcgggccttccacgaggacaagaagcccagcaagctgtttgaagatgatgagcacgagaaggagcagtactgcatcaggaaggtgcggcccagcgaggagatgctggagctggagaaggagcggcgggagctgatccgcagccaggccgtgaagaagaaccctggcattgctgccaagtggtggaaccccccccaggagaagaccatcgaggagcagctggatgaggagcacctggagagccacaagaagtacaaggagaggaaggagcggcgggcccagcaggagcagctgctgctgcagaagcagctgcagcagcagcagcagcagccccccagccagctgtgcacagccccagccagcagccatgagcgggcctccatgattgacaaggccaaggaggacatcgtgacagagcagattgacttctctgctgccaggaagcagttccagctgatggagaacagccggcaggccgtggccaagggccagagcacccccaggctcttcagcatcaagcccttctaccggcccctgggctctgtgaacagcgacaagcccctgaccaacccccggccccccagcgtgggcggccccccagaggacagcggggccagcgctgccaagggccagaagagccctggggccctggagacccccagcgctgctggcagccagggcaacacagccagccagggcaaggagggcccctacagcgagcccagcaagaggggccccctgagcaagctgtgggccgaggatggagagttcaccagcgcccgggctgtgctgactgtggtgaaggatgatgaccacggcatcctggaccagttcagccgctctgtgaatgtgtccctgacccaggaggagctggacagcggcctggatgagctgtctgtgcgcagccaggacaccaccgtgctggagaccctgagcaatgacttctccatggacaacatcagtgacagcggggccagcaatgagaccaccaatgccctgcaggagaacagcctggccgacttcagcctgccccagaccccccagacagacaaccccagcgagggccgcggggagggcgtgtccaagagcttcagtgaccacggcttctacagccccagcagcaccctgggggacagccccctggtggatgaccccctggagtaccaggccggcctgctggtgcagaatgccatccagcaggccatcgccgagcaggtggacaaggctgtgtccaagaccagcagagatggagctgagcagcagggccctgaggccaccgtggaggaggccgaggccgccgccttcggcagcgagaagccccagagcatgtttgagcccccccaggtgagcagccctgtgcaggagaagagagatgtgctgcccaagatcctgcctgctgaggaccgggccctgcgggagcggggccccccccagcccctgcctgctgtgcagcccagcggccccatcaacatggaggagaccaggcctgagggcagctacttcagcaagtacagcgaggccgctgagctgcggagcacagccagcctgctggccacccaggagagtgatgtgatggtgggccccttcaagctgcggagcaggaagcagaggaccctgtccatgattgaggaggagatccgggccgcccaggagcgggaggaggagctgaagaggcagaggcaggtgctgcagagcacccagagccccaggaccaagaatgcccccagcctgcccagcaggacctgctacaagacagcccctgggaagattgagaaggtgaagcccccacccagccccaccacagagggccccagcctgcagcctgacctggcccctgaggaggccgccggcacccagaggcccaagaacctgatgcagaccctgatggaggactatgagacccacaagagcaagaggcgggagaggatggatgacagcagctacaccagcaagctgctgagctgcaaggtgaccagcgaggtgctggaggccaccagggtgaacagaaggaagagcgccctggccctgcgctgggaggccggcatctatgccaaccaggaggaggaggacaatgaatag

SEQ ID NO: 142091 - DNA, 2886 bp, synthetic construct
  misc_feature 1..2886: note = Description of Artificial Sequence: Synthetic coding sequence
  source 1..2886: mol_type = other DNA
atgcgctggccccagcccggggctgctgcccggctgcccccagagagccctggccccccagagagccctggccccccagagcgggaggccgccgccgcccggcgctggacaggagctgagccccaggactgtgcccctggcagcggccggcctgagaagccaccccagctgtctgaagatgacatctggctgaagtctgagggggacaactacagcgccaccctgctggagcctgctgccagcagcctgagcccagaccacaagaacatggagattgaggtgtctgtggccgagtgcaagtctgtgcccggcatcaccagcaccccccaccccatggaccaccccagcgccttctacagccccccccacaacggcctgctgacagaccaccacgagagcctggacaatgatgtggcccgggagatccgctacctggatgaggtgctggaggccaactgctgtgacagcgctgtggatggcacctacaacggcaccagcagccctgagcccggggctgtggtgctggtgggcggcctgagcccccctgtgcatgaggccacccagcctgagcccacagagaggacagccagccggcaggccccaccccacatcgagctgagcaacagcagcccagaccccatggccgaggccgagaggaccaacggccacagccccagccagcccagagatgccctgggggacagcctgcaggtgcctgtgagccccagcagcaccaccagcagccgctgcagcagcagagatggagagttcaccctgaccaccctgaagaaggaggccaagtttgagctgcgggccttccacgaggacaagaagcccagcaagctgtttgaagatgatgagcacgagaaggagcagtactgcatcaggaaggtgcggcccagcgaggagatgctggagctggagaaggagcggcgggagctgatccgcagccaggccgtgaagaagaaccctggcattgctgccaagtggtggaaccccccccaggagaagaccatcgaggagcagctggatgaggagcacctggagagccacaagaagtacaaggagaggaaggagcggcgggcccagcaggagcagctgctgctgcagaagcagctgcagcagcagcagcagcagccccccagccagctgtgcacagccccagccagcagccatgagcgggcctccatgattgacaaggccaaggaggacatcgtgacagagcagattgacttctctgctgccaggaagcagttccagctgatggagaacagccggcaggccgtggccaagggccagagcacccccaggctcttcagcatcaagcccttctaccggcccctgggctctgtgaacagcgacaagcccctgaccaacccccggccccccagcgtgggcggccccccagaggacagcggggccagcgctgccaagggccagaagagccctggggccctggagacccccagcgctgctggcagccagggcaacacagccagccagggcaaggagggcccctacagcgagcccagcaagaggggccccctgagcaagctgtgggccgaggatggagagttcaccagcgcccgggctgtgctgactgtggtgaaggatgatgaccacggcatcctggaccagttcagccgctctgtgaatgtgtccctgacccaggaggagctggacagcggcctggatgagctgtctgtgcgcagccaggacaccaccgtgctggagaccctgagcaatgacttctccatggacaacatcagtgacagcggggccagcaatgagaccaccaatgccctgcaggagaacagcctggccgacttcagcctgccccagaccccccagacagacaaccccagcgagggccgcggggagggcgtgtccaagagcttcagtgaccacggcttctacagccccagcagcaccctgggggacagccccctggtggatgaccccctggagtaccaggccggcctgctggtgcagaatgccatccagcaggccatcgccgagcaggtggacaaggctgtgtccaagaccagcagagatggagctgagcagcagggccctgaggccaccgtggaggaggccgaggccgccgccttcggcagcgagaagccccagagcatgtttgagcccccccaggtgagcagccctgtgcaggagaagagagatgtgctgcccaagatcctgcctgctgaggaccgggccctgcgggagcggggccccccccagcccctgcctgctgtgcagcccagcggccccatcaacatggaggagaccaggcctgagggcagctacttcagcaagtacagcgaggccgctgagctgcggagcacagccagcctgctggccacccaggagagtgatgtgatggtgggccccttcaagctgcggagcaggaagcagaggaccctgtccatgattgaggaggagatccgggccgcccaggagcgggaggaggagctgaagaggcagaggcaggtgctgcagagcacccagagccccaggaccaagaatgcccccagcctgcccagcaggacctgctacaagacagcccctgggaagattgagaaggtgaagcccccacccagccccaccacagagggccccagcctgcagcctgacctggcccctgaggaggccgccggcacccagaggcccaagaacctgatgcagaccctgatggaggactatgagacccacaagagcaagaggcgggagaggatggatgacagcagctacaccagcaagctgctgagctgcaaggtgaccagcgaggtgctggaggccaccagggtgaacagaaggaagagcgccctggccctgcgctgggaggccggcatctatgccaaccaggaggaggaggacaatgaatag

SEQ ID NO: 142092 - DNA, 2565 bp, synthetic construct
  misc_feature 1..2565: note = Description of Artificial Sequence: Synthetic coding sequence
  source 1..2565: mol_type = other DNA
atgatggcctacagcgacaccaccatgatgtctgatgacatcgactggctgcggagccaccggggcgtgtgcaaggtggacctgtacaaccctgagggccagcaggaccaggacaggaaggtgatctgctttgtggatgtgtccaccctgaatgtggaggacaaggactacaaggatgctgccagcagcagcagcgagggcaacctgaacctgggcagcctggaggagaaggagatcatcgtcatcaaggacacagagaagaaggaccagagcaagacagagggctctgtgtgcctcttcaagcaggcccccagcgaccctgtgtctgtgctgaactggctgctgagtgacctgcagaagtatgccctgggcttccagcacgccctgagccccagcaccagcacctgcaagcacaaggtgggggacacagaaggagagtaccaccgggccagcagcgagaactgctacagcgtgtatgctgaccaggtgaacatcgactacctgatgaaccggccccagaacctgcggctggagatgacagctgccaagaacaccaacaacaaccagagccccagcgcccccccagccaagccacccagcacccagagagctgtgatcagcccagatggagaatgttccattgatgacctgtccttctacgtgaaccggctgagcagcctggtgatccagatggcccacaaggagatcaaggagaagctggagggcaagagcaagtgcctgcaccacagcatctgccccagccctggcaacaaggagcgcatcagccccaggaccccagccagcaagatcgccagcgagatggcctatgaggccgtggagctgacagctgctgagatgaggggcactggagaggagagccgggagggcggccagaagagcttcctgtacagcgagctgagcaacaagagcaagagcggggacaagcagatgagccagcgggagagcaaggagtttgctgacagcatcagcaagggcctgatggtgtatgccaaccaggtggccagtgacatgatggtgtccctgatgaagaccctgaaggtgcacagcagcggcaagcccatcccagcctctgtggtgctgaagagggtgctgctgcggcacaccaaggagatcgtgtctgacctgattgacagctgcatgaagaacctgcacaacatcaccggggtgctgatgacagacagcgactttgtgtctgctgtgaagaggaacctcttcaaccagtggaagcagaatgccacagacatcatggaggccatgctgaagaggctggtgtctgccctgattggagaggagaaggagaccaagagccagagcctgtcctatgccagcctgaaggccggcagccatgaccccaagtgcaggaaccagagcctggagttcagcaccatgaaggccgagatgaaggagcgggacaagggcaagatgaagagtgacccctgcaagagcctgaccagcgctgagaaggtgggggagcacatcctgaaggagggcctgaccatctggaaccagaagcagggcaacagctgcaaggtggccaccaaggcctgcagcaacaaggatgagaagggggagaagatcaatgccagcacagacagcctggccaaggacctgattgtgtctgccctgaagctgatccagtaccacctgacccagcagaccaagggcaaggacacctgtgaggaggactgccccggcagcaccatgggctacatggcccagagcacccagtatgagaagtgtggcggcggccagagcgccaaggccctgtctgtgaagcagctggagagccaccgggcccctggccccagcacctgccagaaggagaaccagcacctggacagccagaagatggacatgagcaacatcgtgctgatgctgatccagaagctgctgaatgaaaaccccttcaagtgtgaggacccctgtgagggggagaacaagtgcagcgagccccgggccagcaaggccgcctccatgagcaacagaagtgacaaggccgaggagcagtgccaggagcaccaggagctggactgcaccagcggcatgaagcaggccaacggccagttcatcgacaagctggtggagagcgtgatgaagctgtgcctgatcatggccaagtacagcaatgatggagctgccctggccgagctggaggagcaggccgccagcgccaacaagcccaacttccggggcacccgctgcatccacagcggggccatgccccagaactaccaggacagcctgggccatgaagtcatcgtgaacaaccagtgcagcaccaacagcctgcagaagcagctgcaggccgtgctgcagtggattgctgccagccagttcaacgtgcccatgctgtacttcatgggagacaaggatggccagctggagaagctgccccaggtgtctgccaaggctgctgagaagggctacagcgtgggcggcctgctgcaggaggtgatgaagtttgccaaggagcggcagccagatgaagctgtgggcaaggtggccaggaagcagctgctggactggctgctggccaacctgtag

SEQ ID NO: 142093 - DNA, 2538 bp, synthetic construct
  misc_feature 1..2538: note = Description of Artificial Sequence: Synthetic coding sequence
  source 1..2538: mol_type = other DNA
atgtctgatgacatcgactggctgcggagccacagaggagtgtgcaaggtggacctgtacaaccctgagggccagcaggaccaggacaggaaggtgatctgctttgtggatgtgtccaccctgaatgtggaggacaaggactacaaggatgctgccagcagcagcagcgagggcaacctgaacctgggcagcctggaggagaaggagatcatcgtcatcaaggacacagagaagaaggaccagagcaagacagagggctctgtgtgcctcttcaagcaggcccccagcgaccctgtgtctgtgctgaactggctgctgagtgacctgcagaagtatgccctgggcttccagcacgccctgagccccagcaccagcacctgcaagcacaaggtgggggacacagaaggagagtaccaccgggccagcagcgagaactgctacagcgtgtatgctgaccaggtgaacatcgactacctgatgaaccggccccagaacctgcggctggagatgacagctgccaagaacaccaacaacaaccagagccccagcgcccccccagccaagccacccagcacccagagagctgtgatcagcccagatggagagtgcagcattgatgacctgtccttctacgtgaaccggctgagcagcctggtgatccagatggcccacaaggagatcaaggagaagctggagggcaagagcaagtgcctgcaccacagcatctgccccagccctggcaacaaggagcgcatcagccccaggaccccagccagcaagatcgccagcgagatggcctatgaagctgtggagctgacagctgctgagatgaggggcaccggggaggagagccgggagggcggccagaagagcttcctgtacagcgagctgagcaacaagagcaagagcggggacaagcagatgagccagcgggagagcaaggagtttgctgacagcatcagcaagggcctgatggtgtatgccaaccaggtggccagtgacatgatggtgtccctgatgaagaccctgaaggtgcacagcagcggcaagcccatcccagcctctgtggtgctgaagagggtgctgctgcggcacaccaaggagatcgtgtctgacctgattgacagctgcatgaagaacctgcacaacatcactggagtgctgatgacagacagcgactttgtgtctgctgtgaagaggaacctcttcaaccagtggaagcagaatgccacagacatcatggaggccatgctgaagaggctggtgtctgccctgattggagaggagaaggagaccaagagccagagcctgtcctatgccagcctgaaggccggcagccatgaccccaagtgcaggaaccagagcctggagttcagcaccatgaaggccgagatgaaggagcgggacaagggcaagatgaagagtgacccctgcaagagcctgaccagcgctgagaaggtgggggagcacatcctgaaggagggcctgaccatctggaaccagaagcagggcaacagctgcaaggtggccaccaaggcctgcagcaacaaggatgagaagggggagaagatcaatgccagcacagacagcctggccaaggacctgattgtgtctgccctgaagctgatccagtaccacctgacccagcagaccaagggcaaggacacctgtgaggaggactgccccggcagcaccatgggctacatggcccagagcacccagtatgaaaaatgtggcggcggccagagcgccaaggccctgtctgtgaagcagctggagagccaccgggcccctggccccagcacctgccagaaggagaaccagcacctggacagccagaagatggacatgagcaacatcgtgctgatgctgatccagaagctgctgaatgaaaaccccttcaagtgtgaggacccctgtgaaggagaaaataaatgttctgagccccgggccagcaaggccgcctccatgagcaacagaagtgacaaggccgaggagcagtgccaggagcaccaggagctggactgcaccagcggcatgaagcaggccaacggccagttcatcgacaagctggtggagagcgtgatgaagctgtgcctgatcatggccaagtacagcaatgatggagctgccctggccgagctggaggagcaggccgccagcgccaacaagcccaacttccggggcacccgctgcatccacagcggggccatgccccagaactaccaggacagcctgggccacgaggtgattgtgaacaaccagtgcagcaccaacagcctgcagaagcagctgcaggccgtgctgcagtggattgctgccagccagttcaacgtgcccatgctgtacttcatgggagacaaggatggccagctggagaagctgccccaggtgtctgccaaggctgctgagaagggctacagcgtgggcggcctgctgcaggaggtgatgaagtttgccaaggagcggcagccagatgaggccgtgggcaaggtggccaggaagcagctgctggactggctgctggccaacctgtag

SEQ ID NO: 142094 - DNA, 1416 bp, synthetic construct
  misc_feature 1..1416: note = Description of Artificial Sequence: Synthetic coding sequence
  source 1..1416: mol_type = other DNA
atgtctgatgacatcgactggctgcggagccacagaggagtgtgcaaggtggacctgtacaaccctgagggccagcaggaccaggacaggaaggtgatctgctttgtggatgtgtccaccctgaatgtggaggacaaggactacaaggatgctgccagcagcagcagcgagggcaacctgaacctgggcagcctggaggagaaggagatcatcgtcatcaaggacacagagaagaaggaccagagcaagacagagggctctgtgtgcctcttcaagcaggcccccagcgaccctgtgtctgtgctgaactggctgctgagtgacctgcagaagtatgccctgggcttccagcacgccctgagccccagcaccagcacctgcaagcacaaggtgggggacacagaaggagagtaccaccgggccagcagcgagaactgctacagcgtgtatgctgaccaggtgaacatcgactacctgatgaaccggccccagaacctgcggctggagatgacagctgccaagaacaccaacaacaaccagaacacctgtgaggaggactgccccggcagcaccatgggctacatggcccagagcacccagtatgaaaaatgtggcggcggccagagcgccaaggccctgtctgtgaagcagctggagagccaccgggcccctggccccagcacctgccagaaggagaaccagcacctggacagccagaagatggacatgagcaacatcgtgctgatgctgatccagaagctgctgaatgaaaaccccttcaagtgtgaggacccctgtgaaggagaaaataaatgttctgagccccgggccagcaaggccgcctccatgagcaacagaagtgacaaggccgaggagcagtgccaggagcaccaggagctggactgcaccagcggcatgaagcaggccaacggccagttcatcgacaagctggtggagagcgtgatgaagctgtgcctgatcatggccaagtacagcaatgatggagctgccctggccgagctggaggagcaggccgccagcgccaacaagcccaacttccggggcacccgctgcatccacagcggggccatgccccagaactaccaggacagcctgggccacgaggtgattgtgaacaaccagtgcagcaccaacagcctgcagaagcagctgcaggccgtgctgcagtggattgctgccagccagttcaacgtgcccatgctgtacttcatgggagacaaggatggccagctggagaagctgccccaggtgtctgccaaggctgctgagaagggctacagcgtgggcggcctgctgcaggaggtgatgaagtttgccaaggagcggcagccagatgaggccgtgggcaaggtggccaggaagcagctgctggactggctgctggccaacctgtag

SEQ ID NO: 142095 - DNA, 2538 bp, synthetic construct; identical to SEQ ID NO: 142093
  misc_feature 1..2538: note = Description of Artificial Sequence: Synthetic coding sequence
  source 1..2538: mol_type = other DNA

SEQ ID NO: 142096 - DNA, 765 bp, synthetic construct
  misc_feature 1..765: note = Description of Artificial Sequence: Synthetic coding sequence
  source 1..765: mol_type = other DNA
atgtctgatgacatcgactggctgcggagccacagaggagtgtgcaaggtggacctgtacaaccctgagggccagcaggaccaggacaggaaggtgatctgctttgtggatgtgtccaccctgaatgtggaggacaaggactacaaggatgctgccagcagcagcagcgagggcaacctgaacctgggcagcctggaggagaaggagatcatcgtcatcaaggacacagagaagaaggaccagagcaagacagagggctctgtgtgcctcttcaagcaggcccccagcgaccctgtgtctgtgctgaactggctgctgagtgacctgcagaagtatgccctgggcttccagcacgccctgagccccagcaccagcacctgcaagcacaaggtgggggacacagaaggagagtaccaccgggccagcagcgagaactgctacagcgtgtatgctgaccaggtgaacatcgactacctgatgaaccggccccagaacctgcggctggagatgacagctgccaagaacaccaacaacaaccagagccccagcgcccccccagccaagccacccagcacccagagagctgtgatcagcccagatggagagtgcagcattgatgacctgtccttctacgtgaaccggctgagcagcctggtgatccagatggcccacaaggagatcaaggagaagctggagggcaagagcaagtgcctgcaccacagcatctgccccagccctggcaacaaggagcgcatcagcccctag

SEQ ID NO: 142097 - DNA, 642 bp, synthetic construct
  misc_feature 1..642: note = Description of Artificial Sequence: Synthetic coding sequence
  source 1..642: mol_type = other DNA
atgtctgatgacatcgactggctgcggagccacagaggagtgtgcaaggtggacctgtacaaccctgagggccagcaggaccaggacaggaaggtgatctgctttgtggatgtgtccaccctgaatgtggaggacaaggactacaaggatgctgccagcagcagcagcgagggcaacctgaacctgggcagcctggaggagaaggagatcatcgtcatcaaggacacagagaagaaggaccagagcaagacagagggctctgtgtgcctcttcaagcaggcccccagcgaccctgtgtctgtgctgaactggctgctgagtgacctgcagaagtatgccctgggcttccagcacgccctgagccccagcaccagcacctgcaagcacaaggtgggggacacagaaggagagtaccaccgggccagcagcgagaactgctacagcgtgtatgctgaccaggtgaacatcgactacctgatgaaccggccccagaacctgcggctggagatgacagctgccaagaacaccaacaacaaccagaacacctgtgaggaggactgccccggcagcaccatgggctacatggcccagagcacccagtatgaaaaatgtggcggcggccagagcgccaaggccctgtag

SEQ ID NO: 142098 - DNA, 552 bp, synthetic construct
  misc_feature 1..552: note = Description of Artificial Sequence: Synthetic coding sequence
  source 1..552: mol_type = other DNA
atggacaactgcctggccgccgccgccctgaatggagtggacagaagaagcctgcagaggtctgcccggctggccctggaggtgctggagcgggccaagagaagagctgtggactggcacgccctggagcggcccaagggctgcatgggcgtgctggcccgggaggccccccacctggagaagcagcctgctgctggcccccagagggtgctgcccggggagaagtactacagctctgtgcctgaggagggcggggccacccacgtgtaccgctaccacagaggagagagcaagctgcacatgtgcctggacattggaaatggccagaggaaggacaggaagaagaccagcctgggccctgggggcagctaccagatcagcgagcacgcccctgaggccagccagcctgctgagaacatcagcaaggacctgtacatcgaggtgtacccaggcacctacagcgtgacagtgggcagcaatgacctgaccaagaagacccacgtggtggccgtggacagcggccagagcgtggacctggtgtttcctgtgtag

SEQ ID NO: 142099 - DNA, 552 bp, synthetic construct
  misc_feature 1..552: note = Description of Artificial Sequence: Synthetic coding sequence
  source 1..552: mol_type = other DNA
atggacaactgcctggccgccgccgccctgaatggagtggacagaagaagcctgcagaggtctgcccggctggccctggaggtgctggagcgggccaagagaagagctgtggactggcacgccctggagcggcccaagggctgcatgggcgtgctggcccgggaggccccccacctggagaagcagcctgctgctggcccccagagggtgctgcccggggagcgggaggagaggcctcccaccctgagcgccagcttccgcaccatggccgagttcatggactacaccagcagccagtgtgggaagtactacagctctgtgcctgaggagggcggggccacccacgtgtaccgctaccacagaggagagagcaagctgcacatgtgcctggacattggaaatggccaggccgagaacatcagcaaggacctgtacatcgaggtgtacccaggcacctacagcgtgacagtgggcagcaatgacctgaccaagaagacccacgtggtggccgtggacagcggccagagcgtggacctggtgtttcctgtgtag

SEQ ID NO: 142100 - DNA, 633 bp, synthetic construct
  misc_feature 1..633: note = Description of Artificial Sequence: Synthetic coding sequence
  source 1..633: mol_type = other DNA
atggacaactgcctggccgccgccgccctgaatggagtggacagaagaagcctgcagaggtctgcccggctggccctggaggtgctggagcgggccaagagaagagctgtggactggcacgccctggagcggcccaagggctgcatgggcgtgctggcccgggaggccccccacctggagaagcagcctgctgctggcccccagagggtgctgcccggggagcgggaggagaggcctcccaccctgagcgccagcttccgcaccatggccgagttcatggactacaccagcagccagtgtgggaagtactacagctctgtgcctgaggagggcggggccacccacgtgtaccgctaccacagaggagagagcaagctgcacatgtgcctggacattggaaatggccagaggaaggacaggaagaagaccagcctgggccctgggggcagctaccagatcagcgagcacgcccctgaggccagccagcctgctgagaacatcagcaaggacctgtacatcgaggtgtacccaggcacctacagcgtgacagtgggcagcaatgacctgaccaagaagacccacgtggtggccgtggacagcggccagagcgtggacctggtgtttcctgtgtag

SEQ ID NO: 142101 - DNA, 552 bp, synthetic construct; identical to SEQ ID NO: 142098
  misc_feature 1..552: note = Description of Artificial Sequence: Synthetic coding sequence
  source 1..552: mol_type = other DNA

SEQ ID NO: 142102 - DNA, 633 bp, synthetic construct; identical to SEQ ID NO: 142100
  misc_feature 1..633: note = Description of Artificial Sequence: Synthetic coding sequence
  source 1..633: mol_type = other DNA

SEQ ID NO: 142103 - DNA, 1479 bp, synthetic construct
  misc_feature 1..1479: note = Description of Artificial Sequence: Synthetic coding sequence
  source 1..1479: mol_type = other DNA
atgggcttccagaggcgcttcttccaccaggaccagagccctgtgggcggcctgacagcagaagatattgagaaggcccggcaggccaaggcccggcctgagaacaagcagcacaagcagaccctgtctgaacatgcccgggagaggaaggtgcctgtgacccgcatcggccgcctggccaactttggaggcctggccgtgggcctgggctttggagccctggccgaggtggccaagaagagcctgcggtctgaggaccccagcggcaagaaggctgtgctgggcagcagccccttcctgtctgaggccaatgctgagcgcatcgtgaggaccctgtgcaaggtgcggggggccgccctgaagctgggccagatgctgagcatccaggatgatgccttcatcaacccccacctggccaagatctttgagcgggtgcggcagagcgctgacttcatgcccctgaagcagatgatgaagaccctgaacaatgacctgggccccaactggagggacaagctggagtactttgaggagcggccctttgctgctgccagcatcggccaggtgcacctggccaggatgaagggcggccgggaggtggccatgaagatccagtacccaggagtggcccagagcatcaacagtgatgtgaacaacctgatggctgtgctgaacatgagcaacatgctgcctgagggcctcttccctgagcacctgattgatgtgctgcggcgggagctggccctggagtgtgactaccagcgggaggccgcctgtgccaggaagttccgggacctgctgaagggccaccccttcttctacgtgcctgagatcgtggatgagctgtgcagcccccacgtgctgaccacagagctggtgtctggcttccccctggaccaggccgagggcctgagccaggagatcagaaatgagatctgctacaacatcctggtgctgtgcctgcgggagctgtttgagttccacttcatgcagacagaccccaactggagcaacttcttctatgacccccagcagcacaaggtggccctgctggactttggagccacccgggagtatgacaggagcttcacagacctgtacatccagatcatccgggctgctgctgaccgggaccgggagaccgtgcgggccaagagcattgagatgaagttcctgaccggctatgaggtgaaggtgatggaggatgcccacctggatgccatcctgatcctgggggaggcctttgccagtgatgagccctttgattttggcacccagagcaccacagagaagatccacaacctgatccctgtgatgctgcggcaccggctggtgcccccacctgaggagacctacagcctgcacaggaagatgggcggcagcttcctgatctgcagcaagctgaaggcccgcttcccctgcaaggccatgtttgaggaggcctacagcaactactgcaagaggcaggcccagcagtag

SEQ ID NO: 142104 - DNA, 1719 bp, synthetic construct
  misc_feature 1..1719: note = Description of Artificial Sequence: Synthetic coding sequence
  source 1..1719: mol_type = other DNA
atggccgccatcctgggggacaccatcatggtggccaagggcctggtgaagctgacccaggccgctgtggagacccacctgcagcacctgggcatcggcggggagctgatcatgggccctgccccagcctacgtggccagcggccccttccgggaggccggcttccctggccaggccagcagccccctgggccgggccaacggccgcctgtttgccaacccccgggacagcttcagcgccatgggcttccagaggcgcttcttccaccaggaccagagccctgtgggcggcctgacagcagaagatattgagaaggcccggcaggccaaggcccggcctgagaacaagcagcacaagcagaccctgtctgaacatgcccgggagaggaaggtgcctgtgacccgcatcggccgcctggccaactttggaggcctggccgtgggcctgggctttggagccctggccgaggtggccaagaagagcctgcggtctgaggaccccagcggcaagaaggctgtgctgggcagcagccccttcctgtctgaggccaatgctgagcgcatcgtgaggaccctgtgcaaggtgcggggggccgccctgaagctgggccagatgctgagcatccaggatgatgccttcatcaacccccacctggccaagatctttgagcgggtgcggcagagcgctgacttcatgcccctgaagcagatgatgaagaccctgaacaatgacctgggccccaactggagggacaagctggagtactttgaggagcggccctttgctgctgccagcatcggccaggtgcacctggccaggatgaagggcggccgggaggtggccatgaagatccagtacccaggagtggcccagagcatcaacagtgatgtgaacaacctgatggctgtgctgaacatgagcaacatgctgcctgagggcctcttccctgagcacctgattgatgtgctgcggcgggagctggccctggagtgtgactaccagcgggaggccgcctgtgccaggaagttccgggacctgctgaagggccaccccttcttctacgtgcctgagatcgtggatgagctgtgcagcccccacgtgctgaccacagagctggtgtctggcttccccctggaccaggccgagggcctgagccaggagatcagaaatgagatctgctacaacatcctggtgctgtgcctgcgggagctgtttgagttccacttcatgcagacagaccccaactggagcaacttcttctatgacccccagcagcacaaggtggccctgctggactttggagccacccgggagtatgacaggagcttcacagacctgtacatccagatcatccgggctgctgctgaccgggaccgggagaccgtgcgggccaagagcattgagatgaagttcctgaccggctatgaggtgaaggtgatggaggatgcccacctggatgccatcctgatcctgggggaggcctttgccagtgatgagccctttgattttggcacccagagcaccacagagaagatccacaacctgatccctgtgatgctgcggcaccggctggtgcccccacctgaggagacctacagcctgcacaggaagatgggcggcagcttcctgatctgcagcaagctgaaggcccgcttcccctgcaaggccatgtttgaggaggcctacagcaactactgcaagaggcaggcccagcagtag

SEQ ID NO: 142105 - DNA, 1944 bp, synthetic construct
  misc_feature 1..1944: note = Description of Artificial Sequence: Synthetic coding sequence
  source 1..1944: mol_type = other DNA
atggccgccatcctgggggacaccatcatggtggccaagggcctggtgaagctgacccaggccgctgtggagacccacctgcagcacctgggcatcggcggggagctgatcatggccgcccgggccctgcagagcacagctgtggagcagatcggcatgttcctgggcaaggtgcagggccaggacaagcatgaggagtactttgctgagaactttggaggccctgagggggagttccacttctctgtgccccacgccgccggggccagcacagacttcagcagcgccagcgccccagaccagagcgccccacccagcctgggccacgcccacagcgagggccctgccccagcctacgtggccagcggccccttccgggaggccggcttccctggccaggccagcagccccctgggccgggccaacggccgcctgtttgccaacccccgggacagcttcagcgccatgggcttccagaggcgcttcttccaccaggaccagagccctgtgggcggcctgacagctgaggacatcgagaaggcccggcaggccaaggcccggcctgagaacaagcagcacaagcagaccctgtctgagcacgcccgggagaggaaggtgcctgtgaccagaattggccgcctggccaactttggaggcctggccgtgggcctgggctttggagccctggccgaggtggccaagaagagcctgcggtctgaggaccccagcggcaagaaggctgtgctgggcagcagccccttcctgtctgaggccaatgctgagagaattgtgaggaccctgtgcaaggtgagaggagctgccctgaagctgggccagatgctgagcatccaggatgatgccttcatcaacccccacctggccaagatctttgagcgggtgcggcagagcgctgacttcatgcccctgaagcagatgatgaagaccctgaacaatgacctgggccccaactggagggacaagctggagtactttgaggagcggccctttgctgctgccagcatcggccaggtgcacctggccaggatgaagggcggccgggaggtggccatgaagatccagtacccaggagtggcccagagcatcaacagtgatgtgaacaacctgatggctgtgctgaacatgagcaacatgctgcctgagggcctcttccctgagcacctgattgatgtgctgcggcgggagctggccctggagtgtgactaccagcgggaggccgcctgtgccaggaagttccgggacctgctgaagggccaccccttcttctacgtgcctgagatcgtggatgagctgtgcagcccccacgtgctgaccacagagctggtgtctggcttccccctggaccaggccgagggcctgagccaggagatcagaaatgagatctgctacaacatcctggtgctgtgcctgcgggagctgtttgagttccacttcatgcagacagaccccaactggagcaacttcttctatgacccccagcagcacaaggtggccctgctggactttggagccacccgggagtatgaccgctccttcacagacctgtacatccagatcatccgggctgctgctgaccgggaccgggagaccgtgcgggccaagagcattgagatgaagttcctgaccggctatgaggtgaaggtgatggaggatgcccacctggatgccatcctgatcctgggggaggcctttgccagtgatgagccctttgattttggcacccagagcaccacagagaagatccacaacctgatccctgtgatgctgcggcaccggctggtgcccccacctgaggagacctacagcctgcacaggaagatgggcggcagcttcctgatctgcagcaagctgaaggcccgcttcccctgcaaggccatgtttgaggaggcctacagcaactactgcaagaggcaggcccagcagtag

SEQ ID NO: 142106 - DNA, 1788 bp, synthetic construct
  misc_feature 1..1788: note = Description of Artificial Sequence: Synthetic coding sequence
  source 1..1788: mol_type = other DNA
atgttcctgggcaaggtgcagggccaggacaagcatgaggagtactttgctgagaactttggaggccctgagggggagttccacttctctgtgccccacgccgccggggccagcacagacttcagcagcgccagcgccccagaccagagcgccccacccagcctgggccacgcccacagcgagggccctgccccagcctacgtggccagcggccccttccgggaggccggcttccctggccaggccagcagccccctgggccgggccaacggccgcctgtttgccaacccccgggacagcttcagcgccatgggcttccagaggcgcttcttccaccaggaccagagccctgtgggcggcctgacagctgaggacatcgagaaggcccggcaggccaaggcccggcctgagaacaagcagcacaagcagaccctgtctgagcacgcccgggagaggaaggtgcctgtgaccagaattggccgcctggccaactttggaggcctggccgtgggcctgggctttggagccctggccgaggtggccaagaagagcctgcggtctgaggaccccagcggcaagaaggctgtgctgggcagcagccccttcctgtctgaggccaatgctgagagaattgtgaggaccctgtgcaaggtgagaggagctgccctgaagctgggccagatgctgagcatccaggatgatgccttcatcaacccccacctggccaagatctttgagcgggtgcggcagagcgctgacttcatgcccctgaagcagatgatgaagaccctgaacaatgacctgggccccaactggagggacaagctggagtactttgaggagcggccctttgctgctgccagcatcggccaggtgcacctggccaggatgaagggcggccgggaggtggccatgaagatccagtacccaggagtggcccagagcatcaacagtgatgtgaacaacctgatggctgtgctgaacatgagcaacatgctgcctgagggcctcttccctgagcacctgattgatgtgctgcggcgggagctggccctggagtgtgactaccagcgggaggccgcctgtgccaggaagttccgggacctgctgaagggccaccccttcttctacgtgcctgagatcgtggatgagctgtgcagcccccacgtgctgaccacagagctggtgtctggcttccccctggaccaggccgagggcctgagccaggagatcagaaatgagatctgctacaacatcctggtgctgtgcctgcgggagctgtttgagttccacttcatgcagacagaccccaactggagcaacttcttctatgacccccagcagcacaaggtggccctgctggactttggagccacccgggagtatgaccgctccttcacagacctgtacatccagatcatccgggctgctgctgaccgggaccgggagaccgtgcgggccaagagcattgagatgaagttcctgaccggctatgaggtgaaggtgatggaggatgcccacctggatgccatcctgatcctgggggaggcctttgccagtgatgagccctttgattttggcacccagagcaccacagagaagatccacaacctgatccctgtgatgctgcggcaccggctggtgcccccacctgaggagacctacagcctgcacaggaagatgggcggcagcttcctgatctgcagcaagctgaaggcccgcttcccctgcaaggccatgtttgaggaggcctacagcaactactgcaagaggcaggcccagcagtag

SEQ ID NO: 142107 - DNA, 1944 bp, synthetic construct; identical to SEQ ID NO: 142105
  misc_feature 1..1944: note = Description of Artificial Sequence: Synthetic coding sequence
  source 1..1944: mol_type = other DNA

SEQ ID NO: 142108 - DNA, 1797 bp, synthetic construct
  misc_feature 1..1797: note = Description of Artificial Sequence: Synthetic coding sequence
  source 1..1797: mol_type = other DNA
atggccgcccgggccctgcagagcacagctgtggagcagatcggcatgttcctgggcaaggtgcagggccaggacaagcatgaggagtactttgctgaaaattttggaggccctgagggggagttccacttcagcagcgccagcgccccagaccagagcgccccacccagcctgggccacgcccacagcgagggccctgccccagcctacgtggccagcggccccttccgggaggccggcttccctggccaggccagcagccccctgggccgggccaacggccgcctgtttgccaacccccgggacagcttcagcgccatgggcttccagaggcgcttcttccaccaggaccagagccctgtgggcggcctgacagcagaagatattgagaaggcccggcaggccaaggcccggcctgagaacaagcagcacaagcagaccctgtctgaacatgcccgggagaggaaggtgcctgtgacccgcatcggccgcctggccaactttggaggcctggccgtgggcctgggctttggagccctggccgaggtggccaagaagagcctgcggtctgaggaccccagcggcaagaaggctgtgctgggcagcagccccttcctgtctgaggccaatgctgagcgcatcgtgaggaccctgtgcaaggtgcggggggccgccctgaagctgggccagatgctgagcatccaggatgatgccttcatcaacccccacctggccaagatctttgagcgggtgcggcagagcgctgacttcatgcccctgaagcagatgatgaagaccctgaacaatgacctgggccccaactggagggacaagctggagtactttgaggagcggccctttgctgctgccagcatcggccaggtgcacctggccaggatgaagggcggccgggaggtggccatgaagatccagtacccaggagtggcccagagcatcaacagtgatgtgaacaacctgatggctgtgctgaacatgagcaacatgctgcctgagggcctcttccctgagcacctgattgatgtgctgcggcgggagctggccctggagtgtgactaccagcgggaggccgcctgtgccaggaagttccgggacctgctgaagggccaccccttcttctacgtgcctgagatcgtggatgagctgtgcagcccccacgtgctgaccacagagctggtgtctggcttccccctggaccaggccgagggcctgagccaggagatcagaaatgagatctgctacaacatcctggtgctgtgcctgcgggagctgtttgagttccacttcatgcagacagaccccaactggagcaacttcttctatgacccccagcagcacaaggtggccctgctggactttggagccacccgggagtatgacaggagcttcacagacctgtacatccagatcatccgggctgctgctgaccgggaccgggagaccgtgcgggccaagagcattgagatgaagttcctgaccggctatgaggtgaaggtgatggaggatgcccacctggatgccatcctgatcctgggggaggcctttgccagtgatgagccctttgattttggcacccagagcaccacagagaagatccacaacctgatccctgtgatgctgcggcaccggctggtgcccccacctgaggagacctacagcctgcacaggaagatgggcggcagcttcctgatctgcagcaagctgaaggcccgcttcccctgcaaggccatgtttgaggaggcctacagcaactactgcaagaggcaggcccagcagtag

SEQ ID NO: 142109 - DNA, 966 bp, synthetic construct
  misc_feature 1..966: note = Description of Artificial Sequence: Synthetic coding sequence
  source 1..966: mol_type = other DNA
atgctgagcatccaggatgatgccttcatcaacccccacctggccaagatctttgagcgggtgcggcagagcgctgacttcatgcccctgaagcagatgatgtacccaggagtggcccagagcatcaacagtgatgtgaacaacctgatggctgtgctgaacatgagcaacatgctgcctgagggcctcttccctgagcacctgattgatgtgctgcggcgggagctggccctggagtgtgactaccagcgggaggccgcctgtgccaggaagttccgggacctgctgaagggccaccccttcttctacgtgcctgagatcgtggatgagctgtgcagcccccacgtgctgaccacagagctggtgtctggcttccccctggaccaggccgagggcctgagccaggagatcagaaatgagatctgctacaacatcctggtgctgtgcctgcgggagctgtttgagttccacttcatgcagacagaccccaactggagcaacttcttctatgacccccagcagcacaaggtggccctgctggactttggagccacccgggagtatgaccgctccttcacagacctgtacatccagatcatccgggctgctgctgaccgggaccgggagaccgtgcgggccaagagcattgagatgaagttcctgaccggctatgaggtgaaggtgatggaggatgcccacctggatgccatcctgatcctgggggaggcctttgccagtgatgagccctttgattttggcacccagagcaccacagagaagatccacaacctgatccctgtgatgctgcggcaccggctggtgcccccacctgaggagacctacagcctgcacaggaagatgggcggcagcttcctgatctgcagcaagctgaaggcccgcttcccctgcaaggccatgtttgaggaggcctacagcaactactgcaagaggcaggcccagcagtag

SEQ ID NO: 142110 - DNA, 1107 bp, synthetic construct
  misc_feature 1..1107: note = Description of Artificial Sequence: Synthetic coding sequence
  source 1..1107: mol_type = other DNA
atgctgagcatccaggatgatgccttcatcaacccccacctggccaagatctttgagcgggtgcggcagagcgctgacttcatgcccctgaagcagatgatgaagaccctgaacaatgacctgggccccaactggagggacaagctggagtactttgaggagcggccctttgctgctgccagcatcggccaggtgcacctggccaggatgaagggcggccgggaggtggccatgaagatccagtacccaggagtggcccagagcatcaacagtgatgtgaacaacctgatggctgtgctgaacatgagcaacatgctgcctgagggcctcttccctgagcacctgattgatgtgctgcggcgggagctggccctggagtgtgactaccagcgggaggccgcctgtgccaggaagttccgggacctgctgaagggccaccccttcttctacgtgcctgagatcgtggatgagctgtgcagcccccacgtgctgaccacagagctggtgtctggcttccccctggaccaggccgagggcctgagccaggagatcagaaatgagatctgctacaacatcctggtgctgtgcctgcgggagctgtttgagttccacttcatgcagacagaccccaactggagcaacttcttctatgacccccagcagcacaaggtggccctgctggactttggagccacccgggagtatgacaggagcttcacagacctgtacatccagatcatccgggctgctgctgaccgggaccgggagaccgtgcgggccaagagcattgagatgaagttcctgaccggctatgaggtgaaggtgatggaggatgcccacctggatgccatcctgatcctgggggaggcctttgccagtgatgagccctttgattttggcacccagagcaccacagagaagatccacaacctgatccctgtgatgctgcggcaccggctggtgcccccacctgaggagacctacagcctgcacaggaagatgggcggcagcttcctgatctgcagcaagctgaaggcccgcttcccctgcaaggccatgtttgaggaggcctacagcaactactgcaagaggcaggcccagcagtag

SEQ ID NO: 142111 - DNA, 3591 bp, synthetic construct
  misc_feature 1..3591: note = Description of Artificial Sequence: Synthetic coding sequence
  source 1..3591: mol_type = other DNA
atgcccacagctgagagcgaggccaaggtgaagaccaaggtgcgctttgaggagctgctgaagacccacagcgacctgatgagggagaagaagaagctgaagaagaagctggtgcgctctgaggagaacatcagcccagacaccatccgcagcaacctgcactacatgaaggagaccaccagtgatgatcctgacaccatccgcagcaacctgccccacatcaaggagaccaccagtgatgatgtgtctgctgccaacaccaacaacctgaagaagagcaccagggtgaccaagaacaagctgaggaacacccagctggccacagagaaccccaatggagatgcctctgtggaggaggacaagcagggcaagcccaacaagaaggtgatcaagacagtgccccagctgaccacccaggacctgaagccagagaccccagagaacaaggtggacagcacccaccagaagacccacaccaagccccagcccggggtggaccaccagaagtctgagaaggccaatgaaggccgggaggagacagacctggaggaggatgaggagctgatgcaggcctaccagtgccacgtgacagaggagatggccaaggagatcaagaggaagatcaggaagaagctgaaggagcagctgacctacttccccagcgacaccctcttccatgatgacaagctgagcagcgagaagaggaagaagaagaaggaggtgcctgtgttcagcaaggccgagaccagcaccctgaccatcagcggggacacagtggagggggagcagaagaaggagagctctgtgcgctctgtgtccagtgacagccaccaggatgatgagatcagctccatggagcagagcacagaggacagcatgcaggatgacaccaagcccaagcccaagaagaccaagaagaagaccaaggctgtggccgacaacaatgaagatgtggatggagatggagtgcatgagatcaccagccgggacagccctgtgtaccccaagtgcctgctggatgatgacctggtgctgggcgtgtacatccacaggacagaccggctgaagagtgacttcatgatcagccaccccatggtgaagatccacgtggtggatgagcacacaggccagtatgtgaagaaggatgacagcggccggcctgtgagcagctactatgagaaggaaaatgtggactacatcctgcccatcatgacccagccctatgacttcaagcagctgaagagccggctgcctgagtgggaggagcagatcgtgttcaatgaaaacttcccctacctgctgcggggcagtgatgagagccccaaggtgatcctcttctttgagatcctggacttcctgtctgtggatgagatcaagaacaacagcgaggtgcagaaccaggagtgtggcttcaggaagatcgcctgggccttcctgaagctgctgggcgccaatggaaatgccaacatcaacagcaagctgcggctgcagctgtactacccacccaccaagcccaggagccccctgtctgtggtggaggcctttgagtggtggagcaagtgccccaggaaccactaccccagcaccctgtatgtgacagtgcggggcctgaaggtgcctgactgcatcaagcccagctaccgctccatgatggccctgcaggaggagaagggcaagcctgtgcactgtgagcggcaccacgagagcagctctgtggacacagagcccggcctggaggagagcaaggaggtgatcaagtggaagaggctgcccggccaggcctgccgcatccccaacaagcacctgttcagcctgaatgctggggagcggggctgcttctgcctggacttcagccacaacggccgcatcctggccgccgcctgtgccagcagagatggctaccccatcatcctgtatgagatccccagcggccgcttcatgagggagctgtgtggccacctgaacatcatctatgacctgtcctggagcaaggatgaccactacatcctgaccagcagcagtgatggaacagcccgcatctggaagaatgagatcaacaacaccaacaccttccgggtgctgccccaccccagctttgtgtacacagccaagttccaccctgctgtgcgggagctggtggtgacaggctgctatgacagcatgatccgcatctggaaggtggagatgagagaagattctgccatcctggtgcggcagtttgatgtgcacaagagcttcatcaacagcctgtgctttgacacagagggccaccacatgtacagcggggactgcacaggagtcatcgtggtgtggaacacctacgtgaagatcaatgacctggagcacagcgtgcaccactggaccatcaacaaggagatcaaggagacagagttcaagggcatccccatctcctacctggagatccaccccaacgggaagaggctgctgatccacaccaaggacagcaccctgcgcatcatggacctgcgcatcctggtggccaggaagtttgtgggcgccgccaactaccgggagaagatccacagcaccctgaccccctgtggcaccttcctgtttgctggctctgaagatggcatcgtgtatgtgtggaaccctgagaccggggagcaggtggccatgtacagcgacctgcccttcaagagccccatccgggacatctcctaccacccctttgagaacatggtggccttctgtgccttcggccagaatgagcccatcctgctgtacatctatgacttccacgtggcccagcaggaggccgagatgttcaagcgctacaacggcaccttccccctgcccggcatccaccagagccaggatgccctgtgcacctgccccaagctgccccaccagggcagcttccagattgatgaatttgtgcacacagagagcagcagcaccaagatgcagctggtgaagcagaggctggagaccgtgacagaggtgatccgcagctgtgccgccaaggtgaacaagaacctgtccttcaccagccccccagctgtgagcagccagcagagcaagctgaagcagagcaacatgctgacagcccaggagatcctgcaccagtttggcttcacccagacaggcatcatcagcattgaaaggaagccctgcaaccaccaggtggacacagcccccaccgtggtggccctgtatgactacacagccaacagaagtgatgagctgaccatccacagaggagacatcatccgggtcttcttcaaggacaatgaagactggtggtacggcagcatcggcaagggccaggagggctacttccctgccaaccacgtggccagcgagaccctgtaccaggagctgcccccagagatcaaggagaggagcccccccctgagccctgaggagaagaccaagattgagaagagccctgccccccagaagcagagcatcaacaagaacaagagccaggacttccggctgggcagcgagagcatgacccacagcgagatgaggaaggagcagagccatgaggaccagggccacatcatggacaccaggatgaggaagaacaagcaggccggcaggaaggtgaccctgattgaatag

SEQ ID NO: 142112 - DNA, 3162 bp, synthetic construct
  misc_feature 1..3162: note = Description of Artificial Sequence: Synthetic coding sequence
  source 1..3162: mol_type = other DNA
atgcccacagctgagagcgaggccaaggtgaagaccaaggtgcgctttgaggagctgctgaagacccacagcgacctgatgagggagaagaagaagctgaagaagaagctggtgcgctctgaggagaacatcagcccagacaccatccgcagcaacctgcactacatgaaggagaccaccagtgatgatcctgacaccatccgcagcaacctgccccacatcaaggagaccaccagtgatgatgtgtctgctgccaacaccaacaacctgaagaagagcaccagggtgaccaagaacaagctgaggaacacccagctggccacagagaaccccaatggagatgcctctgtggaggaggacaagcagggcaagcccaacaagaaggtgatcaagacagtgccccagctgaccacccaggacctgaagccagagaccccagagaacaaggtggacagcacccaccagaagacccacaccaagccccagcccggggtggaccaccagaagtctgagaaggccaatgaaggccgggaggagacagacctggaggaggatgaggagctgatgcaggcctaccagtgccacgtgacagaggagatggccaaggagatcaagaggaagatcaggaagaagctgaaggagcagctgacctacttccccagcgacaccctcttccatgatgacaagctgagcagcgagaagaggaagaagaagaaggaggtgcctgtgttcagcaaggccgagaccagcaccctgaccatcagcggggacacagtggagggggagcagaagaaggagagctctgtgcgctctgtgtccagtgacagccaccaggatgatgagatcagctccatggagcagagcacagaggacagcatgcaggatgacaccaagcccaagcccaagaagaccaagaagaagaccaaggctgtggccgacaacaatgaagatgtggatggagatggagtgcatgagatcaccagccgggacagccctgtgtaccccaagtgcctgctggatgatgacctggtgctgggcgtgtacatccacaggacagaccggctgaagagtgacttcatgatcagccaccccatggtgaagatccacgtggtggatgagcacacaggccagtatgtgaagaaggatgacagcggccggcctgtgagcagctactatgagaaggaaaatgtggactacatcctgcccatcatgacccagccctatgacttcaagcagctgaagagccggctgcctgagtgggaggagcagatcgtgttcaatgaaaacttcccctacctgctgcggggcagtgatgagagccccaaggtgatcctcttctttgagatcctggacttcctgtctgtggatgagatcaagaacaacagcgaggtgcagaaccaggagtgtggcttcaggaagatcgcctgggccttcctgaagctgctgggcgccaatggaaatgccaacatcaacagcaagctgcggctgcagctgtactacccacccaccaagcccaggagccccctgtctgtggtggaggcctttgagtggtggagcaagtgccccaggaaccactaccccagcaccctgtatgtgacagtgcggggcctgaaggtgcctgactgcatcaagcccagctaccgctccatgatggccctgcaggaggagaagggcaagcctgtgcactgtgagcggcaccacgagagcagctctgtggacacagagcccggcctggaggagagcaaggaggtgatcaagtggaagaggctgcccggccaggcctgccgcatccccaacaagcacctgttcagcctgaatgctggggagcggggctgcttctgcctggacttcagccacaacggccgcatcctggccgccgcctgtgccagcagagatggctaccccatcatcctgtatgagatccccagcggccgcttcatgagggagctgtgtggccacctgaacatcatctatgacctgtcctggagcaaggatgaccactacatcctgaccagcagcagtgatggaacagcccgcatctggaagaatgagatcaacaacaccaacaccttccgggtgctgccccaccccagctttgtgtacacagccaagttccaccctgctgtgcgggagctggtggtgacaggctgctatgacagcatgatccgcatctggaaggtggagatgagagaagattctgccatcctggtgcggcagtttgatgtgcacaagagcttcatcaacagcctgtgctttgacacagagggccaccacatgtacagcggggactgcacaggagtcatcgtggtgtggaacacctacgtgaagatcaatgacctggagcacagcgtgcaccactggaccatcaacaaggagatcaaggagacagagttcaagggcatccccatctcctacctggagatccaccccaacgggaagaggctgctgatccacaccaaggacagcaccctgcgcatcatggacctgcgcatcctggtggccaggaagtttgtgggcgccgccaactaccgggagaagatccacagcaccctgaccccctgtggcaccttcctgtttgctggctctgaagatggcatcgtgtatgtgtggaaccctgagaccggggagcaggtggccatgtacagcgacctgcccttcaagagccccatccgggacatctcctaccacccctttgagaacatggtggccttctgtgccttcggccagaatgagcccatcctgctgtacatctatgacttccacgtggcccagcaggaggccgagatgttcaagcgctacaacggcaccttccccctgcccggcatccaccagagccaggatgccctgtgcacctgccccaagctgccccaccagggcagcttccagattgatgaatttgtgcacacagagagcagcagcaccaagatgcagctggtgaagcagaggctggagaccgtgacagaggtgatccgcagctgtgccgccaaggtgaacaagaacctgtccttcaccagccccccagctgtgagcagccagcagagcaagctgaagcagagcaacatgctgacagcccaggagatcctgcaccagtttggcttcacccagacagacagccactttgctgagttcaacacctgcatcctgtggtggaagaagcactag

SEQ ID NO: 142113 - DNA, 165 bp, synthetic construct
  misc_feature 1..165: note = Description of Artificial Sequence: Synthetic coding sequence
  source 1..165: mol_type = other DNA
atgcccacagctgagagcgaggccaaggtgaagaccaaggtgcgctttgaggagctgctgaagacccacagcgacctgatgagggagaagaagaagctgaagaagaagctggtgcgctctgaggagaacatcagcaaccaggagaagtccatggctgtgtggtag

SEQ ID NO: 142114 - DNA, 3591 bp, synthetic construct; identical to SEQ ID NO: 142111
  misc_feature 1..3591: note = Description of Artificial Sequence: Synthetic coding sequence
  source 1..3591: mol_type = other DNA

SEQ ID NO: 142115 - DNA, 3162 bp, synthetic construct
  misc_feature 1..3162: note = Description of Artificial Sequence: Synthetic coding sequence
  source 1..3162: mol_type = other DNA
atgcccaccacagagagcgaggccaaggtgaagaccaaggtgcgctttgaggagctgctgaagacccacagcgacctgatgagggagaagaagaagctgaagaagaagctggtgcgctctgaggagaacatcagcccagacaccatccgcagcaacctgcactacatgaaggagaccaccagtgatgatcctgacaccatccgcagcaacctgccccacatcaaggagaccaccagtgatgatgtgtctgctgccaacaccaacaacctgaagaagagcaccagggtgaccaagaacaagctgaggaacacccagctggccacagagaaccccaatggagatgcctctgtggaggaggacaagcagggcaagcccaacaagaaggtgatcaagacagtgccccagctgaccacccaggacctgaagccagagaccccagagaacaaggtggacagcacccaccagaagacccacaccaagccccagcccggggtggaccaccagaagtctgagaaggccaatgaaggccgggaggagacagacctggaggaggatgaggagctgatgcaggcctaccagtgccacgtgacagaggagatggccaaggagatcaagaggaagatcaggaagaagctgaaggagcagctgacctacttccccagcgacaccctcttccatgatgacaagctgagcagcgagaagaggaagaagaagaaggaggtgcctgtgttcagcaaggccgagaccagcaccctgaccatcagcggggacacagtggagggggagcagaagaaggagagctctgtgcgctctgtgtccagtgacagccaccaggatgatgagatcagctccatggagcagagcacagaggacagcatgcaggatgacaccaagcccaagcccaagaagaccaagaagaagaccaaggctgtggccgacaacaatgaagatgtggatggagatggagtgcatgagatcaccagccgggacagccctgtgtaccccaagtgcctgctggatgatgacctggtgctgggcgtgtacatccacaggacagaccggctgaagagtgacttcatgatcagccaccccatggtgaagatccacgtggtggatgagcacacaggccagtatgtgaagaaggatgacagcggccggcctgtgagcagctactatgagaaggaaaatgtggactacatcctgcccatcatgacccagccctatgacttcaagcagctgaagagccggctgcctgagtgggaggagcagatcgtgttcaatgaaaacttcccctacctgctgcggggcagtgatgagagccccaaggtgatcctcttctttgagatcctggacttcctgtctgtggatgagatcaagaacaacagcgaggtgcagaaccaggagtgtggcttcaggaagatcgcctgggccttcctgaagctgctgggcgccaatggaaatgccaacatcaacagcaagctgcggctgcagctgtactacccacccaccaagcccaggagccccctgtctgtggtggaggcctttgagtggtggagcaagtgccccaggaaccactaccccagcaccctgtatgtgacagtgcggggcctgaaggtgcctgactgcatcaagcccagctaccgctccatgatggccctgcaggaggagaagggcaagcctgtgcactgtgagcggcaccacgagagcagctctgtggacacagagcccggcctggaggagagcaaggaggtgatcaagtggaagaggctgcccggccaggcctgccgcatccccaacaagcacctgttcagcctgaatgctggggagcggggctgcttctgcctggacttcagccacaacggccgcatcctggccgccgcctgtgccagcagagatggctaccccatcatcctgtatgagatccccagcggccgcttcatgagggagctgtgtggccacctgaacatcatctatgacctgtcctggagcaaggatgaccactacatcctgaccagcagcagtgatggaacagcccgcatctggaagaatgagatcaacaacaccaacaccttccgggtgctgccccaccccagctttgtgtacacagccaagttccaccctgctgtgcgggagctggtggtgacaggctgctatgacagcatgatccgcatctggaaggtggagatgagagaagattctgccatcctggtgcggcagtttgatgtgcacaagagcttcatcaacagcctgtgctttgacacagagggccaccacatgtacagcggggactgcacaggagtcatcgtggtgtggaacacctacgtgaagatcaatgacctggagcacagcgtgcaccactggaccatcaacaaggagatcaaggagacagagttcaagggcatccccatctcctacctggagatccaccccaacgggaagaggctgctgatccacaccaaggacagcaccctgcgcatcatggacctgcgcatcctggtggccaggaagtttgtgggcgccgccaactaccgggagaagatccacagcaccctgaccccctgtggcaccttcctgtttgctggctctgaagatggcatcgtgtatgtgtggaaccctgagaccggggagcaggtggccatgtacagcgacctgcccttcaagagccccatccgggacatctcctaccacccctttgagaacatggtggccttctgtgccttcggccagaatgagcccatcctgctgtacatctatgacttccacgtggcccagcaggaggccgagatgttcaagcgctacaacggcaccttccccctgcccggcatccaccagagccaggatgccctgtgcacctgccccaagctgccccaccagggcagcttccagattgatgaatttgtgcacacagagagcagcagcaccaagatgcagctggtgaagcagaggctggagaccgtgacagaggtgatccgcagctgtgccgccaaggtgaacaagaacctgtccttcaccagccccccagctgtgagcagccagcagagcaagctgaagcagagcaacatgctgacagcccaggagatcctgcaccagtttggcttcacccagacagacagccactttgctgagttcaacacctgcatcctgtggtggaagaagcactag

SEQ ID NO: 142116 - DNA, 1497 bp, synthetic construct
  misc_feature 1..1497: note = Description of Artificial Sequence: Synthetic coding sequence
  source 1..1497: mol_type = other DNA
atgagggagctgtgtggccacctgaacatcatctatgacctgtcctggagcaaggatgaccactacatcctgaccagcagcagtgatggaacagcccgcatctggaagaatgagatcaacaacaccaacaccttccgggtgctgccccaccccagctttgtgtacacagccaagttccaccctgctgtgcgggagctggtggtgacaggctgctatgacagcatgatccgcatctggaaggtggagatgagagaagattctgccatcctggtgcggcagtttgatgtgcacaagagcttcatcaacagcctgtgctttgacacagagggccaccacatgtacagcggggactgcacaggagtcatcgtggtgtggaacacctacgtgaagatcaatgacctggagcacagcgtgcaccactggaccatcaacaaggagatcaaggagacagagttcaagggcatccccatctcctacctggagatccaccccaacgggaagaggctgctgatccacaccaaggacagcaccctgcgcatcatggacctgcgcatcctggtggccaggaagtttgtgggcgccgccaactaccgggagaagatccacagcaccctgaccccctgtggcaccttcctgtttgctggctctgaagatggcatcgtgtatgtgtggaaccctgagaccggggagcaggtggccatgtacagcgacctgcccttcaagagccccatccgggacatctcctaccacccctttgagaacatggtggccttctgtgccttcggccagaatgagcccatcctgctgtacatctatgacttccacgtggcccagcaggaggccgagatgttcaagcgctacaacggcaccttccccctgcccggcatccaccagagccaggatgccctgtgcacctgccccaagctgccccaccagggcagcttccagattgatgaatttgtgcacacagagagcagcagcaccaagatgcagctggtgaagcagaggctggagaccgtgacagaggtgatccgcagctgtgccgccaaggtgaacaagaacctgtccttcaccagccccccagctgtgagcagccagcagagcaagctgaagcagagcaacatgctgacagcccaggagatcctgcaccagtttggcttcacccagacaggcatcatcagcattgaaaggaagccctgcaaccaccaggtggacacagcccccaccgtggtggccctgtatgactacacagccaacagaagtgatgagctgaccatccacagaggagacatcatccgggtcttcttcaaggacaatgaagactggtggtacggcagcatcggcaagggccaggagggctacttccctgccaaccacgtggccagcgagaccctgtaccaggagctgcccccagagatcaaggagaggagcccccccctgagccctgaggagaagaccaagattgagaagagccctgccccccagaaggtgaagtag

SEQ ID NO: 142117 - DNA, 3591 bp, synthetic construct; identical to SEQ ID NO: 142111
  misc_feature 1..3591: note = Description of Artificial Sequence: Synthetic coding sequence
  source 1..3591: mol_type = other DNA

SEQ ID NO: 142118 - DNA, 1218 bp, synthetic construct
  misc_feature 1..1218: note = Description of Artificial Sequence: Synthetic coding sequence
  source 1..1218: mol_type = other DNA
atgctgagcagcttcctgagcccccagaatggcacctgggccgacaccttcagcctgctgctggccctggccgtggccctgtacctgggctactactgggcctgtgtgctgcagaggccccggctggtggccggcccccagttcctggccttcctggagccccactgcagcatcaccacagagaccttctaccccaccctgtggtgctttgagggccgcctgcagagcatcttccaggtgctgctgcagagccagcccctggtgctgtaccagagcgacatcctgcagaccccagatggcggccagctgctgctggactgggccaagcagcctgacagcagccaggaccctgaccccaccacccagcccatcgtgctgctgctgcccggcatcaccggcagcagccaggacacctacgtgctgcacctggtgaaccaggccctgagagatggctaccaggccgtggtgttcaacaacagaggctgccgcggggaggagctgcggacccaccgggccttctgtgccagcaacacagaggacctggagaccgtggtgaaccacatcaagcaccgctacccccaggcccccctgctggccgtgggcatcagctttggaggcatcctggtgctgaaccacctggcccaggcccggcaggccgccggcctggtggccgccctgaccctgagcgcctgctgggacagctttgagaccaccaggagcctggagacccccctgaacagcctgctcttcaaccagcccctgacagctggcctgtgccagctggtggagaggaacaggaaggtgattgagaaggtggtggacatcgactttgtgctgcaggcccggaccatccggcagtttgatgagcgctacacctctgtggccttcggctaccaggactgtgtgacctactacaaggccgccagccccaggaccaagattgatgccatccgcatccctgtgctgtacctgtctgctgctgatgaccccttcagccctgtgtgtgccctgcccatccaggccgcccagcacagcccctacgtggccctgctgatcacagcccggggcggccacatcggcttcctggagggcctgctgccctggcagcactggtacatgagccggctgctgcaccagtatgccaaggccatcttccaggaccctgagggcctgcctgacctgcgggccctgctgcccagtgaagatagaaacagctag

SEQ ID NO: 142119 - DNA, 1197 bp, synthetic construct
  misc_feature 1..1197: note = Description of Artificial Sequence: Synthetic coding sequence
  source 1..1197: mol_type = other DNA
atgaggaagaggacagagcctgtggccctggagcacgagcgctgtgccgccgccggcagcagcagcagcggcagcgctgctgctgccctggatgctgactgccgcctgaagcagaacctgcggctgactggacctgctgctgctgagccccgctgtgccgcagatgctggcatgaagagggccctgggccgcaggaagggcgtgtggctgcggctgaggaagatcctcttctgtgtgctgggcctgtacatcgccatccccttcctgatcaagctgtgccccggcatccaggccaagctgatcttcctgaactttgtgcgggtgccctacttcatcgacctgaagaagccccaggaccagggcctgaaccacacctgcaactactacctgcagcctgaggaggatgtgaccatcggcgtgtggcacacagtgcctgctgtgtggtggaagaatgcccagggcaaggaccagatgtggtatgaagatgccctggccagcagccaccccatcatcctgtacctgcatggaaatgccggcacccggggcggggaccaccgggtggagctgtacaaggtgctgagcagcctgggctaccacgtggtgacctttgactaccggggctggggagacagcgtgggcacccccagcgagcggggcatgacctatgatgccctgcacgtgtttgactggatcaaggcccggagcggggacaaccctgtgtacatctggggccacagcctgggcactggagtggccaccaacctggtgcggcggctgtgtgagcgggagaccccaccagatgccctgatcctggagagccccttcaccaacatccgggaggaggccaagagccaccccttcagcgtcatctaccgctacttccctggctttgactggttcttcctggaccccatcaccagcagcggcatcaagtttgccaatgatgaaaatgtgaagcacatcagctgccccctgctgatcctgcacgcagaagatgatcctgtggtgcccttccagctgggcaggaagctgtacagcattgctgccccagcccgctccttccgggacttcaaggtgcagtttgtgcccttccacagcgacctgggctaccgccacaagtacatctacaagagccctgagctgccccgcatcctgcgggagttcctgggcaagtctgagcctgagcaccagcactag

SEQ ID NO: 142120 - DNA, 1215 bp, synthetic construct
  misc_feature 1..1215: note = Description of Artificial Sequence: Synthetic coding sequence
  source 1..1215: mol_type = other DNA
atgaggaagaggacagagcctgtggccctggagcacgagcgctgtgccgccgccggcagcagcagcagcggcagcgctgctgctgccctggatgctgactgccgcctgaagcagaacctgcggctgactggacctgctgctgctgagccccgctgtgccgcagatgctggcatgaagagggccctgggccgcaggaagggcgtgtggctgcggctgaggaagatcctcttctgtgtgctgggcctgtacatcgccatccccttcctgatcaagctgtgccccggcatccaggccaagctgatcttcctgaactttgtgcgggtgccctacttcatcgacctgaagaagccccaggaccagggcctgaaccacacctgcaactactacctgcagcctgaggaggatgtgaccatcggcgtgtggcacacagtgcctgctgtgtggtggaagaatgcccagggcaaggaccagatgtggtatgaagatgccctggccagcagccaccccatcatcctgtacctgcatggaaatgccggcacccggggcggggaccaccgggtggagctgtacaaggtgctgagcagcctgggctaccacgtggtgacctttgactaccggggctggggagacagcgtgggcacccccagcgagcggggcatgacctatgatgccctgcacgtgtttgactggatcaaggcccggagcggggacaaccctgtgtacatctggggccacagcctgggcactggagtggccaccaacctggtgcggcggctgtgtgagcgggagaccccaccagatgccctgatcctggagagccccttcaccaacatccgggaggaggccaagagccaccccttcagcgtcatctaccgctacttccctggctttgactggttcttcctggaccccatcaccagcagcggcatcaagtttgccaatgatgaaaatgtgaagcacatcagctgccccctgctgatcctgcacgcagaagatgatcctgtggtgcccttccagctgggcaggaagctgtacagcattgctgccccagcccgctccttccgggacttcaaggtgcagtttgtgcccttccacagcgacctgggctaccgccacaagtacatctacaagagccctgagctgccccgcatcctgcggccccagcagggccctggcagcagcccagaccccagcatgtggagcgagctggtgtag

SEQ ID NO: 142121 - DNA, 564 bp, synthetic construct
  misc_feature 1..564: note = Description of Artificial Sequence: Synthetic coding sequence
  source 1..564: mol_type = other DNA
atgtctgggggcggccacggcggcgtgtgcttcctgtgctgcatcctgctgcagggcaggaaaggagtgtggctgcggctgaggaagatcctcttctgtgtgctgggcctgtacatcgccatccccttcctgatcaagctgtgccccggcatccaggccaagctgatcttcctgaactttgtgcgggtgccctacttcatcgacctgaagaagccccaggaccagggcctgaaccacacctgcaactactacctgcagccagaagaagatgtgaccatcggcgtgtggcacacagtgcctgctgtgtggtggaagaatgcccagggcaaggaccagatgtggtatgaagatgccctggccagcagccaccccatcatcctgtacctgcacggcaatgccggcacccggggcggggaccaccgggtggagctgtacaaggtgctgagcagcctgggctaccacgtggtgacctttgactaccggggctggggagacagcgtgggcaccccatctgagcggggcatgacctatgatgccctgcacgtgtttgactggatcaagtag

SEQ ID NO: 142122 - DNA, 1083 bp, synthetic construct
  misc_feature 1..1083: note = Description of Artificial Sequence: Synthetic coding sequence
  source 1..1083: mol_type = other DNA
atgaggaagaggacagagcctgtggccctggagccccgctgtgccgcagatgctggcatgaagagggccctgggccgcaggaagggcgtgtggctgcggctgaggaagatcctcttctgtgtgctgggcctgtacatcgccatccccttcctgatcaagctgtgccccggcatccaggccaagctgatcttcctgaactttgtgcgggtgccctacttcatcgacctgaagaagccccaggaccagggcctgaaccacacctgcaactactacctgcagcctgaggaggatgtgaccatcggcgtgtggcacacagtgcctgctgtgtggtggaagaatgcccagggcaaggaccagatgtggtatgaagatgccctggccagcagccaccccatcatcctgtacctgcatggaaatgccggcacccggggcggggaccaccgggtggagctgtacaaggtgctgagcagcctgggctaccacgtggtgacctttgactaccggggctggggagacagcgtgggcacccccagcgagcggggcatgacctatgatgccctgcacgtgtttgactggatcaaggcccggagcggggacaaccctgtgtacatctggggccacagcctgggcactggagtggccaccaacctggtgcggcggctgtgtgagcgggagaccccaccagatgccctgatcctggagagccccttcaccaacatccgggaggaggccaagagccaccccttcagcgtcatctaccgctacttccctggctttgactggttcttcctggaccccatcaccagcagcggcatcaagtttgccaatgatgaaaatgtgaagcacatcagctgccccctgctgatcctgcacgcagaagatgatcctgtggtgcccttccagctgggcaggaagctgtacagcattgctgccccagcccgctccttccgggacttcaaggtgcagtttgtgcccttccacagcgacctgggctaccgccacaagtacatctacaagagccctgagctgccccgcatcctgcgggagttcctgggcaagtctgagcctgagcaccagcactag

SEQ ID NO: 142123 - DNA, 1020 bp, synthetic construct
  misc_feature 1..1020: note = Description of Artificial Sequence: Synthetic coding sequence
  source 1..1020: mol_type = other DNA
atgctgtacccaggctctgtgtacctgctgcagaaggccctgatgcctgtgctgctgcagggccaggcccggctggtggaggagtgcaatggccggcgggccaagctgctggcctgtgatggaaatgaaattgacaccatgtttgtggacagaagaggaacagctgagccccagggccagaagctggtgatctgctgtgagggcaatgccggcttctatgaggtgggctgtgtgtccacccccctggaggccggctacagcgtgctgggctggaaccaccctggctttgctggcagcactggagtgcccttcccccagaatgaggccaatgccatggatgtggtggtgcagtttgccatccaccggctgggcttccagccccaggacatcatcatctatgcctggagcattggaggcttcaccgccacctgggccgccatgagctacccagatgtgtctgccatgatcctggatgccagctttgatgacctggtgcccctggccctgaaggtgatgccagacagctggaggggcctggtgaccaggacagtgcggcagcacctgaacctgaacaatgctgagcagctgtgccgctaccagggccctgtgctgctgatccggaggaccaaggatgagatcatcaccaccaccgtgcctgaggacatcatgagcaacagaggaaatgacctgctgctgaagctgctgcagcaccgctacccccgggtgatggccgaggagggcctgcgggtggtgcggcagtggctggaggccagcagccagctggaggaggccagcatctacagccgctgggaggtggaggaggactggtgcctgtctgtgctgcggagctaccaggccgagcacggccctgacttcccctggagcgtgggggaggacatgtctgcagatggaagacggcagctggccctcttcctggccaggaagcacctgcacaactttgaggccacccactgcacccccctgcctgcccagaacttccagatgccctggcacctgtag

SEQ ID NO: 142124 - DNA, 1677 bp, synthetic construct
  misc_feature 1..1677: note = Description of Artificial Sequence: Synthetic coding sequence
  source 1..1677: mol_type = other DNA
atggccaagctgctgagctgtgtgctgggcccccggctgtacaagatctaccgggagcgggacagcgagcgggccccagcctctgtgcctgagacccccacagctgtgacagccccccacagcagctcctgggacacctactaccagccccgggccctggagaagcatgctgacagcatcctggccctggcctctgtgttctggagcatctcctactacagcagcccctttgccttcttctacctgtacaggaagggctacctgagcctgagcaaggtggtgcccttcagccactacgccggcaccctgctgctgctgctggccggcgtggcctgcctgcggggcatcggccgctggaccaacccccagtaccggcagttcatcaccatcctggaggccacccacaggaaccagagcagcgagaacaagaggcagctggccaactacaactttgacttccgctcctggcctgtggacttccactgggaggagcccagcagcaggaaggagagcagaggaggccccagcagaagaggagtggccctgctgcggcctgagcccctgcaccggggcacagctgacaccctgctgaacagagtgaagaagctgccctgccagatcaccagctacctggtggcccacaccctgggccgcaggatgctgtacccaggctctgtgtacctgctgcagaaggccctgatgcctgtgctgctgcagggccaggcccggctggtggaggagtgcaatggaagaagagccaagctgctggcctgtgatggaaatgaaattgacaccatgtttgtggaccggcggggcacagctgagccccagggccagaagctggtgatctgctgtgagggcaatgccggcttctatgaggtgggctgtgtgtccacccccctggaggccggctacagcgtgctgggctggaaccaccctggctttgctggcagcactggagtgcccttcccccagaatgaggccaatgccatggatgtggtggtgcagtttgccatccaccggctgggcttccagccccaggacatcatcatctatgcctggagcatcggcggcttcaccgccacctgggccgccatgagctacccagatgtgtctgccatgatcctggatgccagctttgatgacctggtgcccctggccctgaaggtgatgccagacagctggaggggcctggtgaccaggacagtgcggcagcacctgaacctgaacaatgctgagcagctgtgccgctaccagggccctgtgctgctgatccggaggaccaaggatgagatcatcaccaccaccgtgcctgaggacatcatgagcaacagaggaaatgacctgctgctgaagctgctgcagcaccgctacccccgggtgatggccgaggagggcctgcgggtggtgcggcagtggctggaggccagcagccagctggaggaggccagcatctacagccgctgggaggtggaggaggactggtgcctgtctgtgctgcggagctaccaggccgagcacggccctgacttcccctggagcgtgggggaggacatgtctgcagatggccggcggcagctggccctcttcctggccaggaagcacctgcacaactttgaggccacccactgcacccccctgcctgcccagaacttccagatgccctggcacctgtag

SEQ ID NO: 142125 - DNA, 1806 bp, synthetic construct
  misc_feature 1..1806: note = Description of Artificial Sequence: Synthetic coding sequence
  source 1..1806: mol_type = other DNA
atgagccagctggccaggagaagaagccgctatggcctgaccagccgggcccacaacaccagcgaggccggccgggccggccctgctgggggccctgctgctggccgggccgccgcccgggccggggccatggccaagctgctgagctgtgtgctgggcccccggctgtacaagatctaccgggagcgggacagcgagcgggccccagcctctgtgcctgagacccccacagctgtgacagccccccacagcagctcctgggacacctactaccagccccgggccctggagaagcacgccgacagcatcctggccctggccagcgtcttctggagcatctcctactacagcagcccctttgccttcttctacctgtacaggaagggctacctgagcctgagcaaggtggtgcccttcagccactacgccggcaccctgctgctgctgctggccggcgtggcctgcctgcggggcatcggccgctggaccaacccccagtaccggcagttcatcaccatcctggaggccacccacaggaaccagagcagcgagaacaagaggcagctggccaactacaactttgacttccgctcctggcctgtggacttccactgggaggagcccagcagcaggaaggagagccggggcggccccagccggcggggcgtggccctgctgcggcctgagcccctgcaccggggcacagctgacaccctgctgaacagagtgaagaagctgccctgccagatcaccagctacctggtggcccacaccctgggccgcaggatgctgtacccaggctctgtgtacctgctgcagaaggccctgatgcctgtgctgctgcagggccaggcccggctggtggaggagtgcaatggccggcgggccaagctgctggcctgtgatggaaatgaaattgacaccatgtttgtggacagaagaggaacagctgagccccagggccagaagctggtgatctgctgtgagggcaatgccggcttctatgaggtgggctgtgtgtccacccccctggaggccggctacagcgtgctgggctggaaccaccctggctttgctggcagcactggagtgcccttcccccagaatgaggccaatgccatggatgtggtggtgcagtttgccatccaccggctgggcttccagccccaggacatcatcatctatgcctggagcattggaggcttcaccgccacctgggccgccatgagctacccagatgtgtctgccatgatcctggatgccagctttgatgacctggtgcccctggccctgaaggtgatgccagacagctggaggggcctggtgaccaggacagtgcggcagcacctgaacctgaacaatgctgagcagctgtgccgctaccagggccctgtgctgctgatccggaggaccaaggatgagatcatcaccaccaccgtgcctgaggacatcatgagcaacagaggaaatgacctgctgctgaagctgctgcagcaccgctacccccgggtgatggccgaggagggcctgcgggtggtgcggcagtggctggaggccagcagccagctggaggaggccagcatctacagccgctgggaggtggaggaggactggtgcctgtctgtgctgcggagctaccaggccgagcacggccctgacttcccctggagcgtgggggaggacatgtctgcagatggaagacggcagctggccctcttcctggccaggaagcacctgcacaactttgaggccacccactgcacccccctgcctgcccagaacttccagatgccctggcacctgtag

SEQ ID NO: 142126 - DNA, 795 bp, synthetic construct
  misc_feature 1..795: note = Description of Artificial Sequence: Synthetic coding sequence
  source 1..795: mol_type = other DNA
atgcctcctccagccctcttcctgagcagcctgtacccccggctggagttccagaatgacttctaccgcagctgcatcagaagaagcagcccccagcccccacccaacctggcctggaggcctgagagcctgtacagcggggagctggccggcggcggctacctgagcctgagcaaggtggtgcccttcagccactacgccggcaccctgctgctgctgctggccggcgtggcctgcctgcggggcatcggccgctggaccaacccccagtaccggcagttcatcaccatcctggaggccacccacaggaaccagagcagcgagaacaagaggcagctggccaactacaactttgacttccgctcctggcctgtggacttccactgggaggagcccagcagcaggaaggagagccggggcggccccagccggcggggcgtggccctgctgcggcctgagcccctgcaccggggcacagctgacaccctgctgaacagagtgaagaagctgccctgccagatcaccagctacctggtggcccacaccctgggccgcaggatgctgtacccaggctctgtgtacctgctgcagaaggccctgatgcctgtgctgctgcagggccaggcccggctggtggaggagtgcaatggccggcgggccaagctgctggcctgtgatggaaatgaaattgacaccatgtttgtggacagaagaggaacagctgagccccagggccagaagctggtgatctgctgtgagggcaatgccggcttctatgaggtgggctgtgtgtag

SEQ ID NO: 142127 - DNA, 795 bp, synthetic construct; identical to SEQ ID NO: 142126
  misc_feature 1..795: note = Description of Artificial Sequence: Synthetic coding sequence
  source 1..795: mol_type = other DNA

SEQ ID NO: 142128 - DNA, 795 bp, synthetic construct; identical to SEQ ID NO: 142126
  misc_feature 1..795: note = Description of Artificial Sequence: Synthetic coding sequence
  source 1..795: mol_type = other DNA

SEQ ID NO: 142129 - DNA, 1806 bp, synthetic construct; identical to SEQ ID NO: 142125
  misc_feature 1..1806: note = Description of Artificial Sequence: Synthetic coding sequence
  source 1..1806: mol_type = other DNA

SEQ ID NO: 142130 - DNA, 795 bp, synthetic construct; identical to SEQ ID NO: 142126
  misc_feature 1..795: note = Description of Artificial Sequence: Synthetic coding sequence
  source 1..795: mol_type = other DNA

SEQ ID NO: 142131 - DNA, 1806 bp, synthetic construct; identical to SEQ ID NO: 142125
  misc_feature 1..1806: note = Description of Artificial Sequence: Synthetic coding sequence
  source 1..1806: mol_type = other DNA

SEQ ID NO: 142132 - DNA, 795 bp, synthetic construct; identical to SEQ ID NO: 142126
  misc_feature 1..795: note = Description of Artificial Sequence: Synthetic coding sequence
  source 1..795: mol_type = other DNA

SEQ ID NO: 142133 - DNA, 1806 bp, synthetic construct; identical to SEQ ID NO: 142125
  misc_feature 1..1806: note = Description of Artificial Sequence: Synthetic coding sequence
  source 1..1806: mol_type = other DNA

SEQ ID NO: 142134 - DNA, 795 bp, synthetic construct; identical to SEQ ID NO: 142126
  misc_feature 1..795: note = Description of Artificial Sequence: Synthetic coding sequence
  source 1..795: mol_type = other DNA

SEQ ID NO: 142135 - DNA, 1677 bp, synthetic construct; identical to SEQ ID NO: 142124
  misc_feature 1..1677: note = Description of Artificial Sequence: Synthetic coding sequence
  source 1..1677: mol_type = other DNA

SEQ ID NO: 142136 - DNA, 1806 bp, synthetic construct; identical to SEQ ID NO: 142125
  misc_feature 1..1806: note = Description of Artificial Sequence: Synthetic coding sequence
  source 1..1806: mol_type = other DNA

SEQ ID NO: 142137 - DNA, 438 bp, synthetic construct
  misc_feature 1..438: note = Description of Artificial Sequence: Synthetic coding sequence
  source 1..438: mol_type = other DNA
atgctgggccactgctgctacttctggcaggtgtggccagccagcgaggccctggccgccggccccacccccagcacaggcagcagcagccccagctggaagcagcacatcggcaccagcctgcagaagacccggggcagcctgcccaccaccaccctgaccagcggggccggccagagcaccagcacaggcaagaacccagctgctggccgcagcctggagggcgccctgcctgctggggtgtggccctgctttgcccagagcccctgcacaggaggccagcagacccccagcagcacaggcctgcggagctgcctggtgcgcagccctgggggcaagcagcagagaggagaggcccactggggcggcggggccatctctggagtgctgtgggagtgggccctgcactgcaagattgctgtgacccactgggcctag

SEQ ID NO: 142138 - DNA, 1677 bp, synthetic construct; identical to SEQ ID NO: 142124
  misc_feature 1..1677: note = Description of Artificial Sequence: Synthetic coding sequence
  source 1..1677: mol_type = other DNA

SEQ ID NO: 142139 - DNA, 1677 bp, synthetic construct; identical to SEQ ID NO: 142124
  misc_feature 1..1677: note = Description of Artificial Sequence: Synthetic coding sequence
  source 1..1677: mol_type = other DNA

SEQ ID NO: 142140 - DNA, 1677 bp, synthetic construct; identical to SEQ ID NO: 142124
  misc_feature 1..1677: note = Description of Artificial Sequence: Synthetic coding sequence
  source 1..1677: mol_type = other DNA

SEQ ID NO: 142141 - DNA, 438 bp, synthetic construct; identical to SEQ ID NO: 142137
  misc_feature 1..438: note = Description of Artificial Sequence: Synthetic coding sequence
  source 1..438: mol_type = other DNA

SEQ ID NO: 142142 - DNA, 438 bp, synthetic construct; identical to SEQ ID NO: 142137
  misc_feature 1..438: note = Description of Artificial Sequence: Synthetic coding sequence
  source 1..438: mol_type = other DNA

SEQ ID NO: 142143 - DNA, 438 bp, synthetic construct; identical to SEQ ID NO: 142137
  misc_feature 1..438: note = Description of Artificial Sequence: Synthetic coding sequence
  source 1..438: mol_type = other DNA

SEQ ID NO: 142144 - DNA, 1578 bp, synthetic construct
  misc_feature 1..1578: note = Description of Artificial Sequence: Synthetic coding sequence
  source 1..1578: mol_type = other DNA
atgcctcctccagccctcttcctgagcagcctgtacccccggctggagttccagaatgacttctaccgcagctgcatcagaagaagcagcccccagcccccacccaacctggcctggaggcctgagagcctgtacagcggggagctggccggcggcggctacctgagcctgagcaaggtggtgcccttcagccactacgccggcaccctgctgctgctgctggccggcgtggcctgcctgcggggcatcggccgctggaccaacccccagtaccggcagttcatcaccatcctggaggccacccacaggaaccagagcagcgagaacaagaggcagctggccaactacaactttgacttccgctcctggcctgtggacttccactgggaggagcccagcagcaggaaggagagccggggcggccccagccggcggggcgtggccctgctgcggcctgagcccctgcaccggggcacagctgacaccctgctgaacagagtgaagaagctgccctgccagatcaccagctacctggtggcccacaccctgggccgcaggatgctgtacccaggctctgtgtacctgctgcagaaggccctgatgcctgtgctgctgcagggccaggcccggctggtggaggagtgcaatggccggcgggccaagctgctggcctgtgatggaaatgaaattgacaccatgtttgtggacagaagaggaacagctgagccccagggccagaagctggtgatctgctgtgagggcaatgccggcttctatgaggtgggctgtgtgtccacccccctggaggccggctacagcgtgctgggctggaaccaccctggctttgctggcagcactggagtgcccttcccccagaatgaggccaatgccatggatgtggtggtgcagtttgccatccaccggctgggcttccagccccaggacatcatcatctatgcctggagcattggaggcttcaccgccacctgggccgccatgagctacccagatgtgtctgccatgatcctggatgccagctttgatgacctggtgcccctggccctgaaggtgatgccagacagctggaggggcctggtgaccaggacagtgcggcagcacctgaacctgaacaatgctgagcagctgtgccgctaccagggccctgtgctgctgatccggaggaccaaggatgagatcatcaccaccaccgtgcctgaggacatcatgagcaacagaggaaatgacctgctgctgaagctgctgcagcaccgctacccccgggtgatggccgaggagggcctgcgggtggtgcggcagtggctggaggccagcagccagctggaggaggccagcatctacagccgctgggaggtggaggaggactggtgcctgtctgtgctgcggagctaccaggccgagcacggccctgacttcccctggagcgtgggggaggacatgtctgcagatggaagacggcagctggccctcttcctggccaggaagcacctgcacaactttgaggccacccactgcacccccctgcctgcccagaacttccagatgccctggcacctgtag

SEQ ID NO: 142145 - DNA, 1677 bp, synthetic construct; identical to SEQ ID NO: 142124
  misc_feature 1..1677: note = Description of Artificial Sequence: Synthetic coding sequence
  source 1..1677: mol_type = other DNA

SEQ ID NO: 142146 - DNA, 1578 bp, synthetic construct; identical to SEQ ID NO: 142144
  misc_feature 1..1578: note = Description of Artificial Sequence: Synthetic coding sequence
  source 1..1578: mol_type = other DNA

SEQ ID NO: 142147 - DNA, 1578 bp, synthetic construct; identical to SEQ ID NO: 142144
  misc_feature 1..1578: note = Description of Artificial Sequence: Synthetic coding sequence
  source 1..1578: mol_type = other DNA

SEQ ID NO: 142148 - DNA, 438 bp, synthetic construct; identical to SEQ ID NO: 142137
  misc_feature 1..438: note = Description of Artificial Sequence: Synthetic coding sequence
  source 1..438: mol_type = other DNA

SEQ ID NO: 142149 - DNA, 1578 bp, synthetic construct; identical to SEQ ID NO: 142144
  misc_feature 1..1578: note = Description of Artificial Sequence: Synthetic coding sequence
  source 1..1578: mol_type = other DNA

SEQ ID NO: 142150 - DNA, 1677 bp, synthetic construct; identical to SEQ ID NO: 142124
  misc_feature 1..1677: note = Description of Artificial Sequence: Synthetic coding sequence
  source 1..1677: mol_type = other DNA

SEQ ID NO: 142151 - DNA, 1578 bp, synthetic construct; identical to SEQ ID NO: 142144
  misc_feature 1..1578: note = Description of Artificial Sequence: Synthetic coding sequence
  source 1..1578: mol_type = other DNA

SEQ ID NO: 142152 - DNA, 438 bp, synthetic construct; identical to SEQ ID NO: 142137
  misc_feature 1..438: note = Description of Artificial Sequence: Synthetic coding sequence
  source 1..438: mol_type = other DNA

SEQ ID NO: 142153 - DNA, 1578 bp, synthetic construct; identical to SEQ ID NO: 142144
  misc_feature 1..1578: note = Description of Artificial Sequence: Synthetic coding sequence
  source 1..1578: mol_type = other DNA

SEQ ID NO: 142154 - DNA, 438 bp, synthetic construct; identical to SEQ ID NO: 142137
  misc_feature 1..438: note = Description of Artificial Sequence: Synthetic coding sequence
  source 1..438: mol_type = other DNA

SEQ ID NO: 142155 - DNA, 1578 bp, synthetic construct; identical to SEQ ID NO: 142144
  misc_feature 1..1578: note = Description of Artificial Sequence: Synthetic coding sequence
  source 1..1578: mol_type = other DNA

SEQ ID NO: 142156 - DNA, 1278 bp, synthetic construct
  misc_feature 1..1278: note = Description of Artificial Sequence: Synthetic coding sequence
  source 1..1278: mol_type = other DNA
atgaatgccatgctggagaccccagagctgcctgctgtgtttgatggagtgaagctggccgctgtggccgctgtgctgtatgtgattgtgcgctgcctgaacctgaagagccccacagcccccccagacctgtacttccaggacagcggcctgagccgcttcctgctgaagagctgccccctgctgaccaaggagtacatccccccactcatctggggcaagagcggccacatccagacagccctgtatggcaagatgggccgggtgcgcagcccccacccctacggccacaggaagttcatcaccatgtctgatggagccaccagcacctttgacctgtttgagcccctggccgagcactgtgtgggagatgacatcaccatggtgatctgccccggcatcgccaaccacagcgagaagcagtacatccgcacctttgtggactatgcccagaagaatggctaccgctgtgctgtgctgaaccacctgggcgccctgcccaacatcgagctgaccagccccaggatgttcacctacggctgcacctgggagtttggagccatggtgaactacatcaagaagacctaccccctgacccagctggtggtggtgggcttcagcctgggcggcaacatcgtgtgcaagtacctgggggagacccaggccaaccaggagaaggtgctgtgctgcgtgtctgtgtgccagggctacagcgccctgcgggcccaggagaccttcatgcagtgggaccagtgccgccgcttctacaacttcctgatggctgacaacatgaagaagatcatcctgagccaccggcaggccctgtttggagaccacgtgaagaagccccagagcctggaggacacagacctgagccggctgtacacagccaccagcctgatgcagattgatgacaacgtgatgaggaagttccacggctacaacagcctgaaggagtactatgaggaggagagctgcatgagatacctgcaccgcatctacgtgcccctgatgctggtgaatgctgctgatgaccccctggtgcatgagagcctgctgaccatccccaagagcctgtctgagaagcgggagaatgtgatgtttgtgctgcccctgcatggaggccacctgggcttctttgagggctctgtgctcttccctgagcccctgacctggatggacaagctggtggtggagtatgccaatgccatctgccagtgggagaggaacaagctgcagtgcagcgacacagagcaggtggaggccgacctggagtag

SEQ ID NO: 142157 - DNA, 1278 bp, synthetic construct; identical to SEQ ID NO: 142156
  misc_feature 1..1278: note = Description of Artificial Sequence: Synthetic coding sequence
  source 1..1278: mol_type = other DNA

SEQ ID NO: 142158 - DNA, 1230 bp, synthetic construct
  misc_feature 1..1230: note = Description of Artificial Sequence: Synthetic coding sequence
  source 1..1230: mol_type = other DNA
atgcagaggctggccatggacctgaggatgctgagccgggagctgagcctgtacctggagcaccaggtgcgggtgggcttcttcggcagcggcgtgggcctgagcctcatcctgggcttctctgtggcctatgccttctactacctgagcagcatcgccaagaagccccagctggtgactggaggagagagcttcagccgcttcctgcaggaccactgccctgtggtgacagagacctactaccccaccgtgtggtgctgggagggccggggccagaccctgctgcggcccttcatcaccagcaagccccctgtgcagtacagaaatgaactcatcaagacagcagatggcggccagatcagcctggactggtttgacaatgacaacagcacctgctacatggatgccagcacccggcccaccatcctgctgctgcccggcctgaccggcaccagcaaggagagctacatcctgcacatgatccacctgtctgaggagctgggctaccgctgtgtggtgttcaacaacagaggagtggccggggagaacctgctgacccccaggacctactgctgtgccaacacagaggacctggagaccgtcatccaccacgtgcacagcctgtaccccagcgcccccttcctggccgccggcgtgtccatgggcggcatgctgctgctgaactacctgggcaagattggcagcaagacccccctgatggccgccgccaccttctctgtgggctggaacacctttgcctgcagcgagagcctggagaagcccctgaactggctgctcttcaactactacctgaccacctgcctgcagagctctgtgaacaagcaccgccacatgtttgtgaagcaggtggacatggaccacgtgatgaaggccaagagcatccgggagtttgacaagcgcttcacctctgtgatgtttggctaccagaccattgatgactactacacagatgccagccccagcccccggctgaagtctgtgggcatccctgtgctgtgcctgaacagcgtggatgatgtgttcagccccagccacgccatccccatcgagacagccaagcagaaccccaacgtggccctggtgctgaccagctatggaggccacatcggcttcctggagggcatctggccccggcagagcacctacatggacagagtcttcaagcagtttgtgcaggccatggtggagcacggccacgagctgtcctag

SEQ ID NO: 142159 - DNA, 1050 bp, synthetic construct
  misc_feature 1..1050: note = Description of Artificial Sequence: Synthetic coding sequence
  source 1..1050: mol_type = other DNA
atggctgctgaggaggaggaggtggacagcgctgacacaggagagaggagcggctggctgaccggctggctgcccacctggtgccccaccagcatcagccacctgaaggaggccgaggagaagatgctgaagtgtgtgccctgcacctacaagaaggagcctgtgcgcatcagcaatggaaacaagatctggaccctgaagttcagccacaacatcagcaacaagacccccctggtgctgctgcacggctttggaggcggcctgggcctgtgggccctgaactttggagacctgtgcaccaacagacctgtgtatgcctttgacctgctgggcttcggccgcagcagccggcccaggtttgacagtgatgctgaggaggtggagaaccagtttgtggagagcattgaggagtggaggtgtgccctgggcctggacaagatgatcctgctgggccacaacctgggcggcttcctggccgccgcctacagcctgaagtaccccagccgggtgaaccacctgatcctggtggagccctggggcttccctgagaggccagacctggccgaccaggaccggcccatccctgtgtggatccgggccctgggcgccgccctgacccccttcaaccccctggccggcctgagaattgctggccccttcggcctgagcctggtgcagaggctgcggccagacttcaagaggaagtacagctccatgtttgaagatgacacagtgacagagtacatctaccactgcaatgtgcagacccccagcggggagacagccttcaagaacatgaccatcccctacggctgggccaagaggcccatgctgcagagaattggcaagatgcacccagacatccctgtgtctgtcatctttggagcccggagctgcattgatggcaacagcggcaccagcatccagagcctgcggccccacagctatgtgaagaccatcgccatcctgggcgccggccactacgtgtatgctgaccagcctgaggagttcaaccagaaggtgaaggagatctgtgacacagtggactag

SEQ ID NO: 142160 - DNA, 1491 bp, synthetic construct
  misc_feature 1..1491: note = Description of Artificial Sequence: Synthetic coding sequence
  source 1..1491: mol_type = other DNA
atggccgagctgcagatgctgctggaggaggagatccccagcggcaagagggccctgattgagagctaccagaacctgaccagggtggccgactactgtgagaacaactacatccagagacatggctttgctgtgctgctgtgcctgctgagcaacagctggccccaggccacagacaagaggaaggccctggaggagaccaaggcctacaccacccagagcctggcctctgtggcctaccagatcaatgccctggccaacaacgtgctgcagctgctggacatccaggccagccagctgcggaggatggagagcagcatcaaccacatcagccagacagtggacatccacaaggagaaggtggcccggcgggagatcggcatcctgaccaccaacaagaacaccagcaggacccacaagatcatcgccccagccaacatggagaggcctgtgcgctacatcaggaagcccatcgactacacagtgctggatgatgtgggccacggcgtgaagtggctgaaggccaagcacggcaacaaccagcctgccaggacaggcaccctgagcaggaccaacccccccacccagaagccacccagcccccccatgagcggccggggcaccctgggcaggaacaccccctacaagaccctggagcctgtgaagcccccaacagtgcccaatgactacatgaccagccctgcccggctgggcagccagcacagccctggccgcacagccagcctgaaccagaggcccaggacccacagcggcagcagcggcggcagcggcagcagagaaaattctggcagcagcagcatcggcatccccatcgctgtgcccacccccagcccccccaccatcggccctgagaacatctctgtgcccccaccttctggggcccccccagccccacccctggcccccctgctgcctgtgtccacagtgattgctgcccctggcagcgcccctggcagccagtatggcaccatgacccggcagatcagccgccacaacagcaccaccagcagcaccagcagcggcggctacagaaggaccccatctgtgacagcccagttcagcgcccagccccacgtgaatggaggccccctgtacagccagaacagcattgctgacagccccaccccacctcctcctcctcctccagatgacatccccatgtttgatgacagccccccacctcctcctcctcctcctgtggactatgaagatgaggaggccgctgtggtgcagtacaatgacccctatgcagatggagaccctgcctgggcccccaagaactacatcgagaaggtggtggccatctatgactacaccaaggacaaggatgatgagctgtccttcatggagggcgccatcatctacgtgatcaagaagaatgatgatggctggtatgagggcgtgtgcaacagagtgacaggcctcttccctggcaactacgtggagagcatcatgcactacacagactag

SEQ ID NO: 142161 - DNA, 1530 bp, synthetic construct
  misc_feature 1..1530: note = Description of Artificial Sequence: Synthetic coding sequence
  source 1..1530: mol_type = other DNA
atggccgagctgcagatgctgctggaggaggagatccccagcggcaagagggccctgattgagagctaccagaacctgaccagggtggccgactactgtgagaacaactacatccaggccacagacaagaggaaggccctggaggagaccaaggcctacaccacccagagcctggcctctgtggcctaccagatcaatgccctggccaacaacgtgctgcagctgctggacatccaggccagccagctgcggaggatggagagcagcatcaaccacatcagccagacagtggacatccacaaggagaaggtggcccggcgggagatcggcatcctgaccaccaacaagaacaccagcaggacccacaagatcatcgccccagccaacatggagaggcctgtgcgctacatcaggaagcccatcgactacacagtgctggatgatgtgggccatggagtgaagaagtggcacaagatcatccacggcaacaaccagcctgccaggacaggcaccctgagcaggaccaacccccccacccagaagccacccagcccccccatgagcggccggggcaccctgggcaggaacaccccctacaagaccctggagcctgtgaagcccccaacagtgcccaatgactacatgaccagccctgcccggctgggcagccagcacagccctggccgcacagccagcctgaaccagaggcccaggacccacagcggcagcagcggcggcagcggcagcagagaaaattctggcagcagcagcatcggcatccccatcgctgtgcccacccccagcccccccaccatcggccctgagaacatctctgtgcccccaccttctggggcccccccagccccacccctggcccccctgctgcctgtgtccacagtgattgctgcccctggcagcgcccctggcagccagtatggcaccatgacccggcagatcagccgccacaacagcaccaccagcagcaccagcagcggcggctacagaaggaccccatctgtgacagcccagttcagcgcccagccccacgtgaatggaggccccctgtacagccagaacagcatcagcatcgcccctcctcctccacccatgccccagctgaccccccagatccccctgaccggctttgtggcccgggtgcaggagaacattgctgacagccccaccccacctcctcctcctcctccagatgacatccccatgtttgatgacagccccccacctcctcctcctcctcctgtggactatgaagatgaggaggccgctgtggtgcagtacaatgacccctatgcagatggagaccctgcctgggcccccaagaactacatcgagaaggtggtggccatctatgactacaccaaggacaaggatgatgagctgtccttcatggagggcgccatcatctacgtgatcaagaagaatgatgatggctggtatgaaggagtgtgcaacagagtgacaggcctcttccctggcaactacgtggagagcatcatgcactacacagactag

SEQ ID NO: 142162 - DNA, 1443 bp, synthetic construct
  misc_feature 1..1443: note = Description of Artificial Sequence: Synthetic coding sequence
  source 1..1443: mol_type = other DNA
atggccgagctgcagatgctgctggaggaggagatccccagcggcaagagggccctgattgagagctaccagaacctgaccagggtggccgactactgtgagaacaactacatccaggccacagacaagaggaaggccctggaggagaccaaggcctacaccacccagagcctggcctctgtggcctaccagatcaatgccctggccaacaacgtgctgcagctgctggacatccaggccagccagctgcggaggatggagagcagcatcaaccacatcagccagacagtggacatccacaaggagaaggtggcccggcgggagatcggcatcctgaccaccaacaagaacaccagcaggacccacaagatcatcgccccagccaacatggagaggcctgtgcgctacatcaggaagcccatcgactacacagtgctggatgatgtgggccatggagtgaagtggctgaaggccaagcacggcaacaaccagcctgccaggacaggcaccctgagcaggaccaacccccccacccagaagccacccagcccccccatgagcggccggggcaccctgggcaggaacaccccctacaagaccctggagcctgtgaagccacccaccgtgcccaatgactacatgaccagccctgcccggctgggcagccagcacagccctggccgcacagccagcctgaaccagaggcccaggacccacagcggcagcagcggcggcagcggcagccgggagaacagcggcagcagcagcatcggcatccccatcgctgtgcccacccccagcccccccaccatcggccctgcccctggcagcgcccctggcagccagtatggcaccatgacccggcagatcagccgccacaacagcaccaccagcagcaccagcagcggcggctacagaaggacccccagcgtgacagcccagttcagcgcccagccccacgtgaatggaggccccctgtacagccagaacagcatcagcatcgcccctcctcctccacccatgccccagctgaccccccagatccccctgactggatttgtggcccgggtgcaggagaacattgctgacagccccaccccacctcctcctcctcctccagatgacatccccatgtttgatgacagccccccacctcctcctcctcctcctgtggactatgaagatgaggaggccgctgtggtgcagtacaatgacccctatgcagatggagaccctgcctgggcccccaagaactacatcgagaaggtggtggccatctatgactacaccaaggacaaggatgatgagctgtccttcatggagggcgccatcatctacgtgatcaagaagaatgatgatggctggtatgagggcgtgtgcaacagagtgacaggcctcttccctggcaactacgtggagagcatcatgcactacacagactag

SEQ ID NO: 142163 - DNA, 1449 bp, synthetic construct
  misc_feature 1..1449: note = Description of Artificial Sequence: Synthetic coding sequence
  source 1..1449: mol_type = other DNA
atggccgagctgcagatgctgctggaggaggagatccccagcggcaagagggccctgattgagagctaccagaacctgaccagggtggccgactactgtgagaacaactacatccaggccacagacaagaggaaggccctggaggagaccaaggcctacaccacccagagcctggcctctgtggcctaccagatcaatgccctggccaacaacgtgctgcagctgctggacatccaggccagccagctgcggaggatggagagcagcatcaaccacatcagccagacagtggacatccacaaggagaaggtggcccggcgggagatcggcatcctgaccaccaacaagaacaccagcaggacccacaagatcatcgccccagccaacatggagaggcctgtgcgctacatcaggaagcccatcgactacacagtgctggatgatgtgggccatggagtgaagaagtggcacaagatcatccacggcaacaaccagcctgccaggacaggcaccctgagcaggaccaacccccccacccagaagccacccagcccccccatgagcggccggggcaccctgggcaggaacaccccctacaagaccctggagcctgtgaagcccccaacagtgcccaatgactacatgaccagccctgcccggctgggcagccagcacagccctggccgcacagccagcctgaaccagaggcccaggacccacagcggcagcagcggcggcagcggcagcagagaaaattctggcagcagcagcatcggcatccccatcgctgtgcccacccccagcccccccaccatcggccctgctgcccctggcagcgcccctggcagccagtatggcaccatgacccggcagatcagccgccacaacagcaccaccagcagcaccagcagcggcggctacagaaggacccccagcgtgacagcccagttcagcgcccagccccacgtgaatggaggccccctgtacagccagaacagcatcagcatcgcccctcctcctccacccatgccccagctgaccccccagatccccctgactggatttgtggcccgggtgcaggagaacattgctgacagccccaccccacctcctcctcctcctccagatgacatccccatgtttgatgacagccccccacctcctcctcctcctcctgtggactatgaagatgaggaggccgctgtggtgcagtacaatgacccctatgcagatggagaccctgcctgggcccccaagaactacatcgagaaggtggtggccatctatgactacaccaaggacaaggatgatgagctgtccttcatggagggcgccatcatctacgtgatcaagaagaatgatgatggctggtatgagggcgtgtgcaacagagtgacaggcctcttccctggcaactacgtggagagcatcatgcactacacagactag

SEQ ID NO: 142164 - DNA, 1272 bp, synthetic construct
  misc_feature 1..1272: note = Description of Artificial Sequence: Synthetic coding sequence
  source 1..1272: mol_type = other DNA
atggccgagctgcagatgctgctggaggaggagatccccagcggcaagagggccctgattgagagctaccagaacctgaccagggtggccgactactgtgagaacaactacatccaggccacagacaagaggaaggccctggaggagaccaaggcctacaccacccagagcctggcctctgtggcctaccagatcaatgccctggccaacaacgtgctgcagctgctggacatccaggccagccagctgcggaggatggagagcagcatcaaccacatcagccagacagtggacatccacaaggagaaggtggcccggcgggagatcggcatcctgaccaccaacaagaacaccagcaggacccacaagatcatcgccccagccaacatggagaggcctgtgcgctacatcaggaagcccatcgactacacagtgctggatgatgtgggccatggagtgaagaagtggcacaagatcatccacggcaacaaccagcctgccaggacaggcaccctgagcaggaccaacccccccacccagaagccacccagcccccccatgagcggccggggcaccctgggcaggaacaccccctacaagaccctggagcctgtgaagcccccaacagtgcccaatgactacatgaccagccctgcccggctgggcagccagcacagccctggccgcacagccagcctgaaccagaggcccaggacccacagcggcagcagcggcggcagcggcagcagagaaaattctggcagcagcagcatcggcatccccatcgctgtgcccacccccagcccccccaccatcggccctgtgtccatcgcccctcctcctccacccatgccccagctgaccccccagatccccctgaccggctttgtggcccgggtgcaggagaacattgctgacagccccaccccacctcctcctcctcctccagatgacatccccatgtttgatgacagccccccacctcctcctcctcctcctgtggactatgaagatgaggaggccgctgtggtgcagtacaatgacccctatgcagatggagaccctgcctgggcccccaagaactacatcgagaaggtggtggccatctatgactacaccaaggacaaggatgatgagctgtccttcatggagggcgccatcatctacgtgatcaagaagaatgatgatggctggtatgaaggagtgtgcaacagagtgacaggcctcttccctggcaactacgtggagagcatcatgcactacacagactag

SEQ ID NO: 142165 - DNA, 1359 bp, synthetic construct
  misc_feature 1..1359: note = Description of Artificial Sequence: Synthetic coding sequence
  source 1..1359: mol_type = other DNA
atggccgagctgcagatgctgctggaggaggagatccccagcggcaagagggccctgattgagagctaccagaacctgaccagggtggccgactactgtgagaacaactacatccaggccacagacaagaggaaggccctggaggagaccaaggcctacaccacccagagcctggcctctgtggcctaccagatcaatgccctggccaacaacgtgctgcagctgctggacatccaggccagccagctgcggaggatggagagcagcatcaaccacatcagccagacagtggacatccacaaggagaaggtggcccggcgggagatcggcatcctgaccaccaacaagaacaccagcaggacccacaagatcatcgccccagccaacatggagaggcctgtgcgctacatcaggaagcccatcgactacacagtgctggatgatgtgggccatggagtgaagtggctgaaggccaagcacggcaacaaccagcctgccaggacaggcaccctgagcaggaccaacccccccacccagaagccacccagcccccccatgagcggccggggcaccctgggcaggaacaccccctacaagaccctggagcctgtgaagccacccaccgtgcccaatgactacatgaccagccctgcccggctgggcagccagcacagccctggccgcacagccagcctgaaccagaggcccaggacccacagcggcagcagcggcggcagcggcagccgggagaacagcggcagcagcagcatcggcatccccatcgctgtgcccacccccagcccccccaccatcggccctgctgcccctggcagcgcccctggcagccagtatggcaccatgacccggcagatcagccgccacaacagcaccaccagcagcaccagcagcggcggctacagaaggaccccatctgtgacagcccagttcagcgcccagccccacgtgaatggaggccccctgtacagccagaacagcattgctgacagccccaccccacctcctcctcctcctccagatgacatccccatgtttgatgacagccccccacctcctcctcctcctcctgtggactatgaagatgaggaggccgctgtggtgcagtacaatgacccctatgcagatggagaccctgcctgggcccccaagaactacatcgagaaggtggtggccatctatgactacaccaaggacaaggatgatgagctgtccttcatggagggcgccatcatctacgtgatcaagaagaatgatgatggctggtatgagggcgtgtgcaacagagtgacaggcctcttccctggcaactacgtggagagcatcatgcactacacagactag

SEQ ID NO: 142166 - DNA, 1431 bp, synthetic construct
  misc_feature 1..1431: note = Description of Artificial Sequence: Synthetic coding sequence
  source 1..1431: mol_type = other DNA
atggccgagctgcagatgctgctggaggaggagatccccagcggcaagagggccctgattgagagctaccagaacctgaccagggtggccgactactgtgagaacaactacatccaggccacagacaagaggaaggccctggaggagaccaaggcctacaccacccagagcctggcctctgtggcctaccagatcaatgccctggccaacaacgtgctgcagctgctggacatccaggccagccagctgcggaggatggagagcagcatcaaccacatcagccagacagtggacatccacaaggagaaggtggcccggcgggagatcggcatcctgaccaccaacaagaacaccagcaggacccacaagatcatcgccccagccaacatggagaggcctgtgcgctacatcaggaagcccatcgactacacagtgctggatgatgtgggccatggagtgaagcacggcaacaaccagcctgccaggacaggcaccctgagcaggaccaacccccccacccagaagccacccagcccccccatgagcggccggggcaccctgggcaggaacaccccctacaagaccctggagcctgtgaagcccccaacagtgcccaatgactacatgaccagccctgcccggctgggcagccagcacagccctggccgcacagccagcctgaaccagaggcccaggacccacagcggcagcagcggcggcagcggcagcagagaaaattctggcagcagcagcatcggcatccccatcgctgtgcccacccccagcccccccaccatcggccctgctgcccctggcagcgcccctggcagccagtatggcaccatgacccggcagatcagccgccacaacagcaccaccagcagcaccagcagcggcggctacagaaggacccccagcgtgacagcccagttcagcgcccagccccacgtgaatggaggccccctgtacagccagaacagcatcagcatcgcccctcctcctccacccatgccccagctgaccccccagatccccctgactggatttgtggcccgggtgcaggagaacattgctgacagccccaccccacctcctcctcctcctccagatgacatccccatgtttgatgacagccccccacctcctcctcctcctcctgtggactatgaagatgaggaggccgctgtggtgcagtacaatgacccctatgcagatggagaccctgcctgggcccccaagaactacatcgagaaggtggtggccatctatgactacaccaaggacaaggatgatgagctgtccttcatggagggcgccatcatctacgtgatcaagaagaatgatgatggctggtatgagggcgtgtgcaacagagtgacaggcctcttccctggcaactacgtggagagcatcatgcactacacagactag

SEQ ID NO: 142167 - DNA, 1446 bp, synthetic construct
  misc_feature 1..1446: note = Description of Artificial Sequence: Synthetic coding sequence
  source 1..1446: mol_type = other DNA
atggccgagctgcagatgctgctggaggaggagatccccagcggcaagagggccctgattgagagctaccagaacctgaccagggtggccgactactgtgagaacaactacatccaggccacagacaagaggaaggccctggaggagaccaaggcctacaccacccagagcctggcctctgtggcctaccagatcaatgccctggccaacaacgtgctgcagctgctggacatccaggccagccagctgcggaggatggagagcagcatcaaccacatcagccagacagtggacatccacaaggagaaggtggcccggcgggagatcggcatcctgaccaccaacaagaacaccagcaggacccacaagatcatcgccccagccaacatggagaggcctgtgcgctacatcaggaagcccatcgactacacagtgctggatgatgtgggccatggagtgaagtggctgaaggccaagcacggcaacaaccagcctgccaggacaggcaccctgagcaggaccaacccccccacccagaagccacccagcccccccatgagcggccggggcaccctgggcaggaacaccccctacaagaccctggagcctgtgaagccacccaccgtgcccaatgactacatgaccagccctgcccggctgggcagccagcacagccctggccgcacagccagcctgaaccagaggcccaggacccacagcggcagcagcggcggcagcggcagccgggagaacagcggcagcagcagcatcggcatccccatcgctgtgcccacccccagcccccccaccatcggccctgctgcccctggcagcgcccctggcagccagtatggcaccatgacccggcagatcagccgccacaacagcaccaccagcagcaccagcagcggcggctacagaaggaccccatctgtgacagcccagttcagcgcccagccccacgtgaatggaggccccctgtacagccagaacagcatcagcatcgcccctcctcctccacccatgccccagctgaccccccagatccccctgaccggctttgtggcccgggtgcaggagaacattgctgacagccccaccccacctcctcctcctcctccagatgacatccccatgtttgatgacagccccccacctcctcctcctcctcctgtggactatgaagatgaggaggccgctgtggtgcagtacaatgacccctatgcagatggagaccctgcctgggcccccaagaactacatcgagaaggtggtggccatctatgactacaccaaggacaaggatgatgagctgtccttcatggagggcgccatcatctacgtgatcaagaagaatgatgatggctggtatgaaggagtgtgcaacagagtgacaggcctcttccctggcaactacgtggagagcatcatgcactacacagactag

SEQ ID NO: 142168 - DNA, 1527 bp, synthetic construct
  misc_feature 1..1527: note = Description of Artificial Sequence: Synthetic coding sequence
  source 1..1527: mol_type = other DNA
atggccgagctgcagatgctgctggaggaggagatccccagcggcaagagggccctgattgagagctaccagaacctgaccagggtggccgactactgtgagaacaactacatccaggccacagacaagaggaaggccctggaggagaccaaggcctacaccacccagagcctggcctctgtggcctaccagatcaatgccctggccaacaacgtgctgcagctgctggacatccaggccagccagctgcggaggatggagagcagcatcaaccacatcagccagacagtggacatccacaaggagaaggtggcccggcgggagatcggcatcctgaccaccaacaagaacaccagcaggacccacaagatcatcgccccagccaacatggagaggcctgtgcgctacatcaggaagcccatcgactacacagtgctggatgatgtgggccatggagtgaagtggctgaaggccaagcacggcaacaaccagcctgccaggacaggcaccctgagcaggaccaacccccccacccagaagccacccagcccccccatgagcggccggggcaccctgggcaggaacaccccctacaagaccctggagcctgtgaagccacccaccgtgcccaatgactacatgaccagccctgcccggctgggcagccagcacagccctggccgcacagccagcctgaaccagaggcccaggacccacagcggcagcagcggcggcagcggcagccgggagaacagcggcagcagcagcatcggcatccccatcgctgtgcccacccccagcccccccaccatcggccctgagaacatctctgtgcccccacccagcggggcccccccagccccacccctggcccccctgctgcctgtgtccacagtgattgctgcccctggcagcgcccctggcagccagtatggcaccatgacccggcagatcagccgccacaacagcaccaccagcagcaccagcagcggcggctacagaaggacccccagcgtgacagcccagttcagcgcccagccccacgtgaatggaggccccctgtacagccagaacagcatcagcatcgcccctcctcctccacccatgccccagctgaccccccagatccccctgactggatttgtggcccgggtgcaggagaacattgctgacagccccaccccacctcctcctcctcctccagatgacatccccatgtttgatgacagccccccacctcctcctcctcctcctgtggactatgaagatgaggaggccgctgtggtgcagtacaatgacccctatgcagatggagaccctgcctgggcccccaagaactacatcgagaaggtggtggccatctatgactacaccaaggacaaggatgatgagctgtccttcatggagggcgccatcatctacgtgatcaagaagaatgatgatggctggtatgagggcgtgtgcaacagagtgacaggcctcttccctggcaactacgtggagagcatcatgcactacacagactag

SEQ ID NO: 142169 - DNA, 1428 bp, synthetic construct
  misc_feature 1..1428: note = Description of Artificial Sequence: Synthetic coding sequence
  source 1..1428: mol_type = other DNA
atggccgagctgcagatgctgctggaggaggagatccccagcggcaagagggccctgattgagagctaccagaacctgaccagggtggccgactactgtgagaacaactacatccaggccacagacaagaggaaggccctggaggagaccaaggcctacaccacccagagcctggcctctgtggcctaccagatcaatgccctggccaacaacgtgctgcagctgctggacatccaggccagccagctgcggaggatggagagcagcatcaaccacatcagccagacagtggacatccacaaggagaaggtggcccggcgggagatcggcatcctgaccaccaacaagaacaccagcaggacccacaagatcatcgccccagccaacatggagaggcctgtgcgctacatcaggaagcccatcgactacacagtgctggatgatgtgggccatggagtgaagcacggcaacaaccagcctgccaggacaggcaccctgagcaggaccaacccccccacccagaagccacccagcccccccatgagcggccggggcaccctgggcaggaacaccccctacaagaccctggagcctgtgaagcccccaacagtgcccaatgactacatgaccagccctgcccggctgggcagccagcacagccctggccgcacagccagcctgaaccagaggcccaggacccacagcggcagcagcggcggcagcggcagcagagaaaattctggcagcagcagcatcggcatccccatcgctgtgcccacccccagcccccccaccatcggccctgcccctggcagcgcccctggcagccagtatggcaccatgacccggcagatcagccgccacaacagcaccaccagcagcaccagcagcggcggctacagaaggaccccatctgtgacagcccagttcagcgcccagccccacgtgaatggaggccccctgtacagccagaacagcatcagcatcgcccctcctcctccacccatgccccagctgaccccccagatccccctgaccggctttgtggcccgggtgcaggagaacattgctgacagccccaccccacctcctcctcctcctccagatgacatccccatgtttgatgacagccccccacctcctcctcctcctcctgtggactatgaagatgaggaggccgctgtggtgcagtacaatgacccctatgcagatggagaccctgcctgggcccccaagaactacatcgagaaggtggtggccatctatgactacaccaaggacaaggatgatgagctgtccttcatggagggcgccatcatctacgtgatcaagaagaatgatgatggctggtatgaaggagtgtgcaacagagtgacaggcctcttccctggcaactacgtggagagcatcatgcactacacagactag

SEQ ID NO: 142170 - DNA, 1341 bp, synthetic construct
  misc_feature 1..1341: note = Description of Artificial Sequence: Synthetic coding sequence
  source 1..1341: mol_type = other DNA
atggccgagctgcagatgctgctggaggaggagatccccagcggcaagagggccctgattgagagctaccagaacctgaccagggtggccgactactgtgagaacaactacatccaggccacagacaagaggaaggccctggaggagaccaaggcctacaccacccagagcctggcctctgtggcctaccagatcaatgccctggccaacaacgtgctgcagctgctggacatccaggccagccagctgcggaggatggagagcagcatcaaccacatcagccagacagtggacatccacaaggagaaggtggcccggcgggagatcggcatcctgaccaccaacaagaacaccagcaggacccacaagatcatcgccccagccaacatggagaggcctgtgcgctacatcaggaagcccatcgactacacagtgctggatgatgtgggccatggagtgaagcacggcaacaaccagcctgccaggacaggcaccctgagcaggaccaacccccccacccagaagccacccagcccccccatgagcggccggggcaccctgggcaggaacaccccctacaagaccctggagcctgtgaagcccccaacagtgcccaatgactacatgaccagccctgcccggctgggcagccagcacagccctggccgcacagccagcctgaaccagaggcccaggacccacagcggcagcagcggcggcagcggcagcagagaaaattctggcagcagcagcatcggcatccccatcgctgtgcccacccccagcccccccaccatcggccctgcccctggcagcgcccctggcagccagtatggcaccatgacccggcagatcagccgccacaacagcaccaccagcagcaccagcagcggcggctacagaaggaccccatctgtgacagcccagttcagcgcccagccccacgtgaatggaggccccctgtacagccagaacagcattgctgacagccccaccccacctcctcctcctcctccagatgacatccccatgtttgatgacagccccccacctcctcctcctcctcctgtggactatgaagatgaggaggccgctgtggtgcagtacaatgacccctatgcagatggagaccctgcctgggcccccaagaactacatcgagaaggtggtggccatctatgactacaccaaggacaaggatgatgagctgtccttcatggagggcgccatcatctacgtgatcaagaagaatgatgatggctggtatgagggcgtgtgcaacagagtgacaggcctcttccctggcaactacgtggagagcatcatgcactacacagactag

SEQ ID NO: 142171 - DNA, 1356 bp, synthetic construct
  misc_feature 1..1356: note = Description of Artificial Sequence: Synthetic coding sequence
  source 1..1356: mol_type = other DNA
atggccgagctgcagatgctgctggaggaggagatccccagcggcaagagggccctgattgagagctaccagaacctgaccagggtggccgactactgtgagaacaactacatccaggccacagacaagaggaaggccctggaggagaccaaggcctacaccacccagagcctggcctctgtggcctaccagatcaatgccctggccaacaacgtgctgcagctgctggacatccaggccagccagctgcggaggatggagagcagcatcaaccacatcagccagacagtggacatccacaaggagaaggtggcccggcgggagatcggcatcctgaccaccaacaagaacaccagcaggacccacaagatcatcgccccagccaacatggagaggcctgtgcgctacatcaggaagcccatcgactacacagtgctggatgatgtgggccatggagtgaagtggctgaaggccaagcacggcaacaaccagcctgccaggacaggcaccctgagcaggaccaacccccccacccagaagccacccagcccccccatgagcggccggggcaccctgggcaggaacaccccctacaagaccctggagcctgtgaagccacccaccgtgcccaatgactacatgaccagccctgcccggctgggcagccagcacagccctggccgcacagccagcctgaaccagaggcccaggacccacagcggcagcagcggcggcagcggcagccgggagaacagcggcagcagcagcatcggcatccccatcgctgtgcccacccccagcccccccaccatcggccctgcccctggcagcgcccctggcagccagtatggcaccatgacccggcagatcagccgccacaacagcaccaccagcagcaccagcagcggcggctacagaaggacccccagcgtgacagcccagttcagcgcccagccccacgtgaatggaggccccctgtacagccagaacagcattgctgacagccccaccccacctcctcctcctcctccagatgacatccccatgtttgatgacagccccccacctcctcctcctcctcctgtggactatgaagatgaggaggccgctgtggtgcagtacaatgacccctatgcagatggagaccctgcctgggcccccaagaactacatcgagaaggtggtggccatctatgactacaccaaggacaaggatgatgagctgtccttcatggagggcgccatcatctacgtgatcaagaagaatgatgatggctggtatgaaggagtgtgcaacagagtgacaggcctcttccctggcaactacgtggagagcatcatgcactacacagactag

SEQ ID NO: 142172 - DNA, 990 bp, synthetic construct
  misc_feature 1..990: note = Description of Artificial Sequence: Synthetic coding sequence
  source 1..990: mol_type = other DNA
atggccgagctgcagatgctgctggaggaggagatccccagcggcaagagggccctgattgagagctaccagaacctgaccagggtggccgactactgtgagaacaactacatccaggccacagacaagaggaaggccctggaggagaccaaggcctacaccacccagagcctggcctctgtggcctaccagatcaatgccctggccaacaacgtgctgcagctgctggacatccaggccagccagctgcggaggatggagagcagcatcaaccacatcagccagcacggcaacaaccagcctgccaggacaggcaccctgagcaggaccaacccccccacccagaagccacccagcccccccatgagcggccggggcaccctgggcaggaacaccccctacaagaccctggagcctgtgaagccacccaccgtgcccaatgactacatgaccagccctgcccggctgggcagccagcacagccctggccgcacagccagcctgaaccagaggcccaggacccacagcggcagcagcggcggcagcggcagccgggagaacagcggcagcagcagcatcggcatccccatcgctgtgcccacccccagcccccccaccatcggccctgtggccgacagccccaccccacctcctcctcctcctccagatgacatccccatgtttgatgacagccccccacctcctcctcctcctcctgtggactatgaagatgaggaggccgctgtggtgcagtacaatgacccctatgcagatggagaccctgcctgggcccccaagaactacatcgagaaggtggtggccatctatgactacaccaaggacaaggatgatgagctgtccttcatggagggcgccatcatctacgtgatcaagaagaatgatgatggctggtatgaaggagtgtgcaacagagtgacaggcctcttccctggcaactacgtggagagcatcatgcactacacagactag

SEQ ID NO: 142173 - DNA, 1185 bp, synthetic construct
  misc_feature 1..1185: note = Description of Artificial Sequence: Synthetic coding sequence
  source 1..1185: mol_type = other DNA
atggccgagctgcagatgctgctggaggaggagatccccagcggcaagagggccctgattgagagctaccagaacctgaccagggtggccgactactgtgagaacaactacatccaggccacagacaagaggaaggccctggaggagaccaaggcctacaccacccagagcctggcctctgtggcctaccagatcaatgccctggccaacaacgtgctgcagctgctggacatccaggccagccagctgcggaggatggagagcagcatcaaccacatcagccagacagtggacatccacaaggagaaggtggcccggcgggagatcggcatcctgaccaccaacaagaacaccagcaggacccacaagatcatcgccccagccaacatggagaggcctgtgcgctacatcaggaagcccatcgactacacagtgctggatgatgtgggccatggagtgaagaagtggcacaagatcatccacggcaacaaccagcctgccaggacaggcaccctgagcaggaccaacccccccacccagaagccacccagcccccccatgagcggccggggcaccctgggcaggaacaccccctacaagaccctggagcctgtgaagcccccaacagtgcccaatgactacatgaccagccctgcccggctgggcagccagcacagccctggccgcacagccagcctgaaccagaggcccaggacccacagcggcagcagcggcggcagcggcagcagagaaaattctggcagcagcagcatcggcatccccatcgctgtgcccacccccagcccccccaccatcggccctgtggccgacagccccaccccacctcctcctcctcctccagatgacatccccatgtttgatgacagccccccacctcctcctcctcctcctgtggactatgaagatgaggaggccgctgtggtgcagtacaatgacccctatgcagatggagaccctgcctgggcccccaagaactacatcgagaaggtggtggccatctatgactacaccaaggacaaggatgatgagctgtccttcatggagggcgccatcatctacgtgatcaagaagaatgatgatggctggtatgagggcgtgtgcaacagagtgacaggcctcttccctggcaactacgtggagagcatcatgcactacacagactag

SEQ ID NO: 142174 - DNA, 3993 bp, synthetic construct
  misc_feature 1..3993: note = Description of Artificial Sequence: Synthetic coding sequence
  source 1..3993: mol_type = other DNA
atgcccctgagccccccagcccagggcgaccctggagagcccagcccctgcaggcctcccaagaagcacaccaccttccacctgtggaggagcaagaagaagcagcagcctgcccccccagactgtggggtgtttgtgccccaccccctgcctgccccagctggggaggcccgggccctggatgtggtggatggcaagtatgtggtgcgggacagccaggagttccccctgcactgtggggagagccagttcttccacaccaccagcgaggccctgggcagcctgctgctggagagcggcatcttcaagaagagccgggcccagcccccagaggacaacagaaggaagcctgtgctgggcaagctgggcaccctcttcaccgctggaagaagaagaaacagcagaaatggcctggagagccccaccaggagcaatgccaagcccctgagccccaaggatgtggtggccagccccaagctgcctgagcgggagagcgagaggagccgcagccagagcagccagctgaagcagacagacaccagcgaggagggcagcccccgggagaacccccgggaggccgagggggagctgcctgagagcggcggccctgctgcccccccagatgctgagctgagcccccgctggagcagcagcgctgctgctgtggccgtgcagcagtgccatgaaaatgacagcccccagctggagcccctggaggccgagggggagcccttcccagatgccaccaccacagccaagcagctgcacagcagccctggcaacagcagccggcaggagaatgctgagaccccagcccggagccctggagaagatgccagccctggagctggccacgagcaggaggccttcctgggcgtgcggggggcccctggcagccccacccaggagaggcctgctgggggcctgggggaggcccccaacggggcccccagcgtgtgtgccgaggagggcagcctgggccccagaaatgcccggagccagccccccaagggggccagtgacctgcctggagagcccccagctgagggcgccgcccacacagccagcagcgcccaggccgactgcacagcccggcccaagggccacgcccacccagccaaggtgctgaccctggacatctacctgagcaagacagaaggagcccaggtggatgagcctgtggtgatcacccccagggctgaggactgtggggactgggatgacatggagaagaggagcagcggccgccgcagcggcagaagaagaggcagccagaagagcacagacagccctggagcagatgctgagctgcctgagagcgctgccagagatgatgctgtgtttgatgatgaggtggccccaaatgctgccagtgacaatgccagcgctgagaagaaggtgaagagcccccgggccgccctggatggaggagtggccagcgctgccagccctgagagcaagcccagccctggcaccaagggccagctgcggggggagagtgacaggagcaagcagcccccaccagccagcagccccaccaagaggaagggccgcagccgggccctggaggccgtgcctgcccccccagccagcggcccccgggccccagccaaggagagcccccccaagagggtgcctgaccccagccctgtgaccaagggcacagctgctgagagcggggaggaggccgcccgggccatcccccgggagctgcctgtgaagagcagcagcctgctgcctgagatcaagccagagcacaagaggggccccctgcccaaccacttcaacggccgggcagagggcggccgcagccgggagctgggccgggctgctggggcccctggggccagtgatgctgatggcctgaagcccaggaaccactttggagtgggccgcagcacagtgaccaccaaggtgaccctgcctgccaagcccaagcacgtggagctgaacctgaagacccccaagaacctggacagcctgggcaatgagcacaaccccttcagccagcctgtgcacaagggcaacacagccaccaagatcagcctgtttgagaacaagaggaccaacagcagccccaggcacacagacatccggggccagaggaacaccccagccagcagcaagacctttgtgggccgggccaagctgaacctggccaagaaggccaaggagatggagcagcctgagaagaaggtgatgcccaacagcccccagaatggagtgctggtgaaggagacagccatcgagaccaaggtgacagtgtctgaggaggagatcctgcctgccacccggggcatgaatggagacagcagcgagaaccaggccctgggcccccagcccaaccaggatgacaaggcagatgtgcagacagatgctggctgcctgtctgagcctgtggccagcgccctgatccctgtgaaggaccacaagctgctggagaaggaggacagcgaggccgctgacagcaagagcctggtgctggagaatgtgacagacacagcccaggacatccccaccaccgtggacaccaaggacctgcccccaacagccatgcccaagccccagcacaccttcagtgacagccagagccctgctgagagcagccctggccccagcctgagcctgagcgccccagcccctggagatgtgcccaaggacacctgtgtgcagagccccatcagcagcttcccctgcacagacctgaaggtgtctgagaaccacaagggctgtgtgctgcctgtgtcccggcagaacaatgagaagatgcccctgctggagctgggcggggagaccaccccacccctgagcacagagaggagccctgaggccgtgggcagcgagtgccccagccgggtgctggtgcaggtgcgcagctttgtgctgcctgtggagagcacccaggatgtgagcagccaggtgattcctgagagcagcgaggtgcgggaggtgcagctgcccacctgccacagcaatgaacctgaggtggtgtctgtggccagctgtgccccaccccaggaggaggtgctgggcaatgagcacagccactgcacagctgagctggccgccaagagcggcccccaggtgattcctccagccagcgagaagaccctgcccatccaggcccagagccagggcagcaggacccccctgatggccgagagcagccccaccaacagccccagcagcggcaaccacctggccaccccccagaggccagaccagacagtgaccaacggccaggacagccctgccagcctgctgaacatctctgctggcagtgatgattctgtgtttgacagcagcagtgacatggagaagttcacagagatcatcaagcagatggattctgctgtgtgcatgcccatgaagaggaagaaggccaggatgcccaacagccctgccccccactttgccatgccacccatccacgaggaccacctggagaaggtgtttgaccccaaggtgttcaccttcggcctgggcaagaagaaggagagccagcctgagatgagccctgccctgcacctgatgcagaacctggacaccaagagcaagctgcggcccaagagggccagcgctgagcagagcgtgctcttcaagagcctgcacaccaacaccaacggcaacagcgagcccctggtgatgcctgagatcaatgacaaggaaaatagagatgtgaccaatggaggcatcaagaggagccggctggagaagagcgccctcttcagcagcctgctgagcagcctgccccaggacaagatcttcagccccagcgtgacctctgtgaacaccatgaccacagccttcagcaccagccagaatggcagcctgagccagagctctgtgtcccagcccaccacagagggcgccccaccctgtggcctgaacaaggagcagagcaacctgctgcctgacaacagcctgaaggtgttcaacttcaacagcagcagcaccagccacagcagcctgaagagccccagccacatgtag

SEQ ID NO: 142175 - DNA, 5172 bp, synthetic construct
  misc_feature 1..5172: note = Description of Artificial Sequence: Synthetic coding sequence
  source 1..5172: mol_type = other DNA
atggagaagaggagcagcggccgccgcagcggcagaagaagaggcagccagaagagcacagacagccctggagcagatgctgagctgcctgagagcgctgccagagatgatgctgtgtttgatgatgaggtggccccaaatgctgccagtgacaatgccagcgctgagaagaaggtgaagagcccccgggccgccctggatggaggagtggccagcgctgccagccctgagagcaagcccagccctggcaccaagggccagctgcggggggagagtgacaggagcaagcagcccccaccagccagcagccccaccaagaggaagggccgcagccgggccctggaggccgtgcctgcccccccagccagcggcccccgggccccagccaaggagagcccccccaagagggtgcctgaccccagccctgtgaccaagggcacagctgctgagagcggggaggaggccgcccgggccatcccccgggagctgcctgtgaagagcagcagcctgctgcctgagatcaagccagagcacaagaggggccccctgcccaaccacttcaacggccgggcagagggcggccgcagccgggagctgggccgggctgctggggcccctggggccagtgatgctgatggcctgaagcccaggaaccactttggagtgggccgcagcacagtgaccaccaaggtgaccctgcctgccaagcccaagcacgtggagctgaacctgaagacccccaagaacctggacagcctgggcaatgagcacaaccccttcagccagcctgtgcacaagggcaacacagccaccaagatcagcctgtttgagaacaagaggaccaacagcagccccaggcacacagacatccggggccagaggaacaccccagccagcagcaagacctttgtgggccgggccaagctgaacctggccaagaaggccaaggagatggagcagcctgagaagaaggtgatgcccaacagcccccagaatggagtgctggtgaaggagacagccatcgagaccaaggtgacagtgtctgaggaggagatcctgcctgccacccggggcatgaatggagacagcagcgagaaccaggccctgggcccccagcccaaccaggatgacaaggcagatgtgcagacagatgctggctgcctgtctgagcctgtggccagcgccctgatccctgtgaaggaccacaagctgctggagaaggaggacagcgaggccgctgacagcaagagcctggtgctggagaatgtgacagacacagcccaggacatccccaccaccgtggacaccaaggacctgcccccaacagccatgcccaagccccagcacaccttcagtgacagccagagccctgctgagagcagccctggccccagcctgagcctgagcgccccagcccctggagatgtgcccaaggacacctgtgtgcagagccccatcagcagcttcccctgcacagacctgaaggtgtctgagaaccacaagggctgtgtgctgcctgtgtcccggcagaacaatgagaagatgcccctgctggagctgggcggggagaccaccccacccctgagcacagagaggagccctgaggccgtgggcagcgagtgccccagccgggtgctggtgcaggtgcgcagctttgtgctgcctgtggagagcacccaggatgtgagcagccaggtgattcctgagagcagcgaggtgcgggaggtgcagctgcccacctgccacagcaatgaacctgaggtggtgtctgtggccagctgtgccccaccccaggaggaggtgctgggcaatgagcacagccactgcacagctgagctggccgccaagagcggcccccaggtgattcctccagccagcgagaagaccctgcccatccaggcccagagccagggcagcaggacccccctgatggccgagagcagccccaccaacagccccagcagcggcaaccacctggccaccccccagaggccagaccagacagtgaccaacggccaggacagccctgccagcctgctgaacatctctgctggcagtgatgattctgtgtttgacagcagcagtgacatggagaagttcacagagatcatcaagcagatggattctgctgtgtgcatgcccatgaagaggaagaaggccaggatgcccaacagccctgccccccactttgccatgccacccatccacgaggaccacctggagaaggtgtttgaccccaaggtgttcaccttcggcctgggcaagaagaaggagagccagcctgagatgagccctgccctgcacctgatgcagaacctggacaccaagagcaagctgcggcccaagagggccagcgctgagcagagcgtgctcttcaagagcctgcacaccaacaccaacggcaacagcgagcccctggtgatgcctgagatcaatgacaaggaaaatagagatgtgaccaatggaggcatcaagaggagccggctggagaagagcgccctcttcagcagcctgctgagcagcctgccccaggacaagatcttcagccccagcgtgacctctgtgaacaccatgaccacagccttcagcaccagccagaatggcagcctgagccagagctctgtgtcccagcccaccacagagggcgccccaccctgtggcctgaacaaggagcagagcaacctgctgcctgacaacagcctgaaggtgttcaacttcaacagcagcagcaccagccacagcagcctgaagagccccagccacatggagaagtacccccagaaggagaagaccaaggaggacctggacagccgcagcaacctgcacctgcctgagaccaagttcagcgagctgagcaagctgaagaatgatgacatggagaaggccaaccacattgaatctgtcatcaagagcaacctgcccaactgtgccaacagcgacacagacttcatgggcctcttcaagagcagccgctatgaccccagcatctccttcagcggcatgagcctgagtgacaccatgaccctgcggggctctgtgcagaacaagctgaaccccaggcctgggaaggtggtgatctacagcgagccagatgtgtctgagaagtgcatcgaggtgttcagtgacatccaggactgcagctcctggagcctgagccctgtgatcctgatcaaggtggtgcggggctgctggatcctgtatgagcagcccaactttgagggccacagcatccccctggaggagggggagctggagctgagcggcctgtggggcatcgaggacatcctggagagacatgaggaggccgagagtgacaagcctgtggtgattggcagcatcagacatgtggtgcaggactacagagtgagccacatcgacctcttcacagagcctgagggcctgggcatcctgagcagctactttgatgacacagaggagatgcagggcttcggcgtgatgcagaagacctgcagcatgaaggtgcactggggcacctggctgatctatgaggagcccggcttccagggcgtgcccttcatcctggagcctggagagtacccagacctgtccttctgggacacagaggaggcctacatcggctccatgaggcccctgaagatgggcggcaggaaggtggagttccccacagaccccaaggtggtggtgtatgagaagcccttctttgagggcaaatgtgtggagctggagaccggcatgtgcagctttgtgatggagggcggggagacagaggaggccactggagatgaccacctgcccttcacctctgtgggctccatgaaggtgctgcggggcatctgggtggcctatgagaagccaggcttcaccggccaccagtacctgctggaggagggggagtacagagactggaaggcctggggcggctacaatggagagctgcagagcctgcggcccatcctgggggacttcagcaatgcccacatgatcatgtacagcgagaagaactttggcagcaagggcagcagcattgatgtgctgggcatcgtggccaacctgaaggagaccggctacggcgtgaagacccagagcatcaacgtgctgtctggagtgtgggtggcctatgagaacccagacttcaccggggagcagtacatcctggacaagggcttctacaccagctttgaggactggggcggcaagaactgcaagatcagctctgtgcagcccatctgcctggacagcttcaccggccccaggagaagaaaccagatccacctgttcagcgagccccagttccagggccacagccagagctttgaggagaccaccagccagattgatgacagcttcagcaccaagagctgccgggtgtctgggggctcctgggtggtgtatgatggagagaacttcaccggcaaccagtatgtgctggaggagggccactacccctgcctgagcgccatgggctgccccccaggggccaccttcaagagcctgcgcttcattgatgtggagttcagcgagcccaccatcatcctgtttgagcgggaggacttcaagggcaagaagattgagctgaatgctgagaccgtgaacctgcggagcctgggcttcaacacccagatccgctctgtgcaggtgattggaggcatctgggtgacctatgaatatggcagctaccggggccggcagttcctgctgagccctgctgaggtgcccaactggtatgagttcagcggctgccggcagatcggcagcctgcggccctttgtgcagaagaggatctacttccggctgaggaacaaggccaccggcctcttcatgagcaccaacggcaacctggaggacctgaagctgctgcgcatccaggtgatggaggatgtgggcgcagatgaccagatctggatctaccaggagggctgcatcaagtgcagaattgctgaggactgctgcctgaccatcgtgggcagcctggtgaccagcggcagcaagctgggcctggccctggaccagaatgctgacagccagttctggagcctgaagagtgatggccgcatctacagcaagctgaagcccaacctggtgctggacatcaagggcggcacccagtatgaccagaaccacatcatcctgaacacagtgtccaaggagaagttcacccaggtgtgggaggccatggtgctgtacacctag

SEQ ID NO: 142176 - DNA, 951 bp, synthetic construct
  misc_feature 1..951: note = Description of Artificial Sequence: Synthetic coding sequence
  source 1..951: mol_type = other DNA
atgcagaagcccaagacagtggcctgggagaacctgggccctgagatgtctgccctgggcacagccttcagccgggagggcggcaggaaggtggagttccccacagaccccaaggtggtggtgtatgagaagcccttctttgagggcaaatgtgtggagctggagaccggcatgtgcagctttgtgatggagggcggggagacagaggaggccactggagatgaccacctgcccttcacctctgtgggctccatgaaggtgctgcggggcatctgggtggcctatgagaagccaggcttcaccggccaccagtacctgctggaggagggggagtacagagactggaaggcctggggcggctacaacggggagctgcagagcctgcggcccatcctgggggacttcagcaatgcccacatgatcatgtacagcgagaagaactttggcagcaagggcagcagcattgatgtgctgggcatcgtggccaacctgaaggagaccggctatggagtgaagacccagagcatcaacgtgctgagcggcgtgtgggtggcctatgaaaatccagacttcaccggggagcagtacatcctggacaagggcttctacaccagctttgaggactggggcggcaagaactgcaagatcagctctgtgcagcccatctgcctggacagcttcaccggccccaggagaagaaaccagatccacctgttcagcgagccccagttccagggccacagccagagctttgaggagaccaccagccagattgatgacagcttcagcaccaagagctgccgggtgtctgggggctcctgggtggtgtatgatggagagaacttcaccggcaaccagtatgtgctggaggagggccactacccctgcctgagcgccatgggctgccccccaggggccaccttcaagagcctgcgcttcattgatgtgtag

SEQ ID NO: 142177 - DNA, 1629 bp, synthetic construct
  misc_feature 1..1629: note = Description of Artificial Sequence: Synthetic coding sequence
  source 1..1629: mol_type = other DNA
atgcagaagcccaagacagtggcctgggagaacctgggccctgagatgtctgccctgggcacagccttcagccgggagggcggcaggaaggtggagttccccacagaccccaaggtggtggtgtatgagaagcccttctttgagggcaaatgtgtggagctggagaccggcatgtgcagctttgtgatggagggcggggagacagaggaggccactggagatgaccacctgcccttcacctctgtgggctccatgaaggtgctgcggggcatctgggtggcctatgagaagccaggcttcaccggccaccagtacctgctggaggagggggagtacagagactggaaggcctggggcggctacaacggggagctgcagagcctgcggcccatcctgggggacttcagcaatgcccacatgatcatgtacagcgagaagaactttggcagcaagggcagcagcattgatgtgctgggcatcgtggccaacctgaaggagaccggctatggagtgaagacccagagcatcaacgtgctgagcggcgtgtgggtggcctatgaaaatccagacttcaccggggagcagtacatcctggacaagggcttctacaccagctttgaggactggggcggcaagaactgcaagatcagctctgtgcagcccatctgcctggacagcttcaccggccccaggagaagaaaccagatccacctgttcagcgagccccagttccagggccacagccagagctttgaggagaccaccagccagattgatgacagcttcagcaccaagagctgccgggtgtctgggggctcctgggtggtgtatgatggagagaacttcaccggcaaccagtatgtgctggaggagggccactacccctgcctgagcgccatgggctgccccccaggggccaccttcaagagcctgcgcttcattgatgtggagttcagcgagcccaccatcatcctgtttgaaagagaggacttcaagggcaagaagattgagctgaatgctgagaccgtgaacctgcggagcctgggcttcaacacccagatccgctctgtgcaggtgattggaggcatctgggtgacctatgaatatggcagctaccggggccggcagttcctgctgagccctgctgaggtgcccaactggtatgagttcagcggctgccggcagatcggcagcctgcggccctttgtgcagaagaggatctacttccggctgaggaacaaggccaccggcctcttcatgagcaccaatggaaacctggaggacctgaagctgctgcgcatccaggtgatggaggatgtgggcgcagatgaccagatctggatctaccaggagggctgcatcaagtgcagaattgctgaggactgctgcctgaccatcgtgggcagcctggtgaccagcggcagcaagctgggcctggccctggaccagaatgctgacagccagttctggagcctgaagagtgatggccgcatctacagcaagctgaagcccaacctggtgctggacatcaagggcggcacccagtatgaccagaaccacatcatcctgaacacagtgtccaaggagaagttcacccaggtgtgggaggccatggtgctgtacacctag

SEQ ID NO: 142178 - DNA, 504 bp, synthetic construct
  misc_feature 1..504: note = Description of Artificial Sequence: Synthetic coding sequence
  source 1..504: mol_type = other DNA
atggtggcccagcaggagagcatccgggagggcttccagaagcgctgcctgcctgtgatggtgctgaaggccaagaagcccttcacctttgagacccaggagggcaagcaggagatgtttcatgccaccgtggccacagagaaggagttcttctttgtgaaggtgttcaacaccctgctgaaggacaagttcatccccaagaggatcatcatcatcgcccgctactaccgccacagcggcttcctggaggtgaacagcgccagccgggtgctggatgctgagagtgaccagaaggtgaatgtgcccctgaacatcatcaggaaggccggggagacccccaagatcaacaccctgcagacccagcccctgggcaccatcgtgaatggcctgtttgtggtgcagaaggtgacagagaagaagaagaacatcctgtttgacctgagtgacaacacaggcaagatggaggtgctgggcgtgagaaatgaagacaccatgaagtgctag

SEQ ID NO: 142179 - DNA, 1032 bp, synthetic construct
  misc_feature 1..1032: note = Description of Artificial Sequence: Synthetic coding sequence
  source 1..1032: mol_type = other DNA
atggagagcaagtacaaggagatcctgctgctgaccggcctggacaacatcacagatgaggagctggaccgcttcaagttcttcctgagtgatgagttcaacatcgccaccgggaagctgcacacagccaaccgcatccaggtggccaccctgatgatccagaatgctggagctgtgtctgctgtgatgaagaccatccgcatcttccagaagctgaactacatgctgctggccaagaggctgcaggaggagaaggagaaggtggacaagcagtacaagtctgtgaccaagcccaagcccctgagccaggccgagatgagccctgctgccagcgctgccatcagaaatgatgtggccaagcagagagctgcccccaaggtgagcccccacgtgaagccagagcagaagcagatggtggcccagcaggagagcatccgggagggcttccagaagcgctgcctgcctgtgatggtgctgaaggccaagaagcccttcacctttgagacccaggagggcaagcaggagatgttccacgccaccgtggccacagagaaggagttcttctttgtgaaggtgttcaacaccctgctgaaggacaagttcatccccaagaggatcatcatcatcgcccgctactaccgccacagcggcttcctggaggtgaacagcgccagccgggtgctggatgctgagagtgaccagaaggtgaatgtgcccctgaacatcatcaggaaggccggggagacccccaagatcaacaccctgcagacccagcccctgggcaccatcgtgaatggcctgtttgtggtgcagaaggtgacagagaagaagaagaacatcctgtttgacctgagtgacaacacaggcaagatggaggtgctgggcgtgagaaatgaagacaccatgaagtgcaaggagggggacaaggtgcggctgaccttcttcaccctgagcaagaatggagagaagctgcagctgaccagcggcgtgcacagcaccatcaaggtgatcaaggccaagaagaagacctag

SEQ ID NO: 142180 - DNA, 411 bp, synthetic construct
  misc_feature 1..411: note = Description of Artificial Sequence: Synthetic coding sequence
  source 1..411: mol_type = other DNA
atggagagcaagtacaaggagatcctgctgctgaccggcctggacaacatcacagatgaggagctggaccgcttcaagttcttcctgagtgatgagttcaacatcgccaccgggaagctgcacacagccaaccgcatccaggtggccaccctgatgatccagaatgctggagctgtgtctgctgtgatgaagaccatccgcatcttccagaagctgaactacatgctgctggccaagaggctgcaggaggagaaggagaaggtggacaagcagtacaagtctgtgaccaagcccaagcccctgagccaggccgagatgagccctgctgccagcgctgccatcagaaatgatgtggccaagcagagagctgcccccaaggtgagcccccacgtgaagccagagcagaagtag

SEQ ID NO: 142181 - DNA, 1800 bp, synthetic construct
  misc_feature 1..1800: note = Description of Artificial Sequence: Synthetic coding sequence
  source 1..1800: mol_type = other DNA
atgagcaaggaggagaggcctggccgggaggagatcctggagtgccaggtgatgtgggagccagacagcaagaagaacacccagatggaccgcttccgggctgctgtgggcgccgcctgtggcctggccctggagagctatgatgacctgtaccactggagcgtggagagctacagcgacttctgggccgagttctggaagttctctggaattgtgttcagccgggtgtatgatgaggtggtggacaccagcaaaggaattgctgatgtgcctgagtggttcaagggcagccggctgaactatgcagagaacctgctgcggcacaaggaaaatgacagagtggccctgtacatcgcccgggagggcaaggaggagatcgtgaaggtgacctttgaggagctgcggcaggaggtggccctgtttgctgctgccatgaggaagatgggcgtgaagaagggggacagagtggtgggctacctgcccaacagcgagcacgctgtggaggccatgctggccgccgccagcatcggggccatctggagcagcaccagcccagactttggagtgaatggagtgctggaccgcttcagccagatccagcccaagctgatcttctctgtggaggccgtggtgtacaacgggaaggagcacaaccacatggagaagctgcagcaggtggtgaagggcctgcctgacctgaagaaggtggtggtgatcccctacgtgagcagccgggagaacatcgacctgagcaagatccccaacagcgtcttcctggatgacttcctggccaccggcaccagcgagcaggccccccagctggagtttgagcagctgcccttcagccaccccctcttcatcatgttcagcagcggcaccaccggggcccccaagtgcatggtgcacagcgctgggggcaccctcatccagcacctgaaggagcacctgctgcacggcaacatgaccagcagtgacatcctgctgtgctacaccaccgtgggctggatgatgtggaactggatggtgtccctgctggccactggagctgccatggtgctgtatgatggcagccccctggtgcccacccccaacgtgctgtgggacctggtggacagaattggcatcaccgtgctggtgactggagccaagtggctgtctgtgctggaggagaaggccatgaagcctgtggagacccacagcctgcagatgctgcacaccatcctgagcacaggcagccccctgaaggcccagagctatgaatatgtgtaccgctgcatcaagagcagcatcctgctgggcagcatcagcggcggcacagacatcatcagctgcttcatgggccacaacttcagcctgcctgtgtacaagggggagatccaggccaggaacctgggcatggctgtggaggcctggaatgaggagggcaaggctgtgtggggcgagagcggggagctggtgtgcaccaagcccatcccctgccagcccacccacttctggaatgatgaaaatggaaacaagtacaggaaggcctacttcagcaagtttcctggcatctgggcccatggagactactgccgcatcaaccccaagacaggaggcatcgtgatgctgggccgcagtgatggcaccctgaaccccaatggagtgcgcttcggcagcagcgagatctacaacatcgtgtatgcccagaggcaggagagcggcagctgccggcagacagaccaccgctggaagagcagaggagcccggcgctgcttcctggagccccgggaccccggctctgtgcccggccacccctag

SEQ ID NO: 142182 - DNA, 2019 bp, synthetic construct
  misc_feature 1..2019: note = Description of Artificial Sequence: Synthetic coding sequence
  source 1..2019: mol_type = other DNA
atgagcaaggaggagaggcctggccgggaggagatcctggagtgccaggtgatgtgggagccagacagcaagaagaacacccagatggaccgcttccgggctgctgtgggcgccgcctgtggcctggccctggagagctatgatgacctgtaccactggagcgtggagagctacagcgacttctgggccgagttctggaagttctctggaattgtgttcagccgggtgtatgatgaggtggtggacaccagcaaaggaattgctgatgtgcctgagtggttcaagggcagccggctgaactatgcagagaacctgctgcggcacaaggaaaatgacagagtggccctgtacatcgcccgggagggcaaggaggagatcgtgaaggtgacctttgaggagctgcggcaggaggtggccctgtttgctgctgccatgaggaagatgggcgtgaagaagggggacagagtggtgggctacctgcccaacagcgagcacgctgtggaggccatgctggccgccgccagcatcggggccatctggagcagcaccagcccagactttggagtgaatggagtgctggaccgcttcagccagatccagcccaagctgatcttctctgtggaggccgtggtgtacaacgggaaggagcacaaccacatggagaagctgcagcaggtggtgaagggcctgcctgacctgaagaaggtggtggtgatcccctacgtgagcagccgggagaacatcgacctgagcaagatccccaacagcgtcttcctggatgacttcctggccaccggcaccagcgagcaggccccccagctggagtttgagcagctgcccttcagccaccccctcttcatcatgttcagcagcggcaccaccggggcccccaagtgcatggtgcacagcgctgggggcaccctcatccagcacctgaaggagcacctgctgcacggcaacatgaccagcagtgacatcctgctgtgctacaccaccgtgggctggatgatgtggaactggatggtgtccctgctggccactggagctgccatggtgctgtatgatggcagccccctggtgcccacccccaacgtgctgtgggacctggtggacagaattggcatcaccgtgctggtgactggagccaagtggctgtctgtgctggaggagaaggccatgaagcctgtggagacccacagcctgcagatgctgcacaccatcctgagcacaggcagccccctgaaggcccagagctatgaatatgtgtaccgctgcatcaagagcagcatcctgctgggcagcatcagcggcggcacagacatcatcagctgcttcatgggccacaacttcagcctgcctgtgtacaagggggagatccaggccaggaacctgggcatggctgtggaggcctggaatgaggagggcaaggctgtgtggggcgagagcggggagctggtgtgcaccaagcccatcccctgccagcccacccacttctggaatgatgaaaatggaaacaagtacaggaaggcctacttcagcaagtttcctggcatctgggcccatggagactactgccgcatcaaccccaagacaggaggcatcgtgatgctgggccgcagtgatggcaccctgaaccccaatggagtgcgcttcggcagcagcgagatctacaacatcgtggagagctttgaggaggtggaggacagcctgtgtgtgccccagtacaacaagtaccgggaggagagggtcatcctcttcctgaagatggccagcggccacgccttccagcctgacctggtgaagaggatcagagatgccatccgcatgggcctgagcgcccggcacgtgcccagcctcatcctggagaccaagggcatcccctacaccctgaatggcaagaaggtggaggtggccgtgaagcagatcatcgccggcaaggctgtggagcagggcggggccttcagcaaccctgagaccctggacctgtacagagacatccctgagctgcagggcttctag

SEQ ID NO: 142183 - DNA, 762 bp, synthetic construct
  misc_feature 1..762: note = Description of Artificial Sequence: Synthetic coding sequence
  source 1..762: mol_type = other DNA
atgaggaagatgggcgtgaagaagggggacagagtggtgggctacctgcccaacagcgagcacgctgtggaggccatgctggccgccgccagcatcggggccatctggagcagcaccagcccagactttggagtgaatggagtgctggaccgcttcagccagatccagcccaagctgatcttctctgtggaggccgtggtgtacaacgggaaggagcacaaccacatggagaagctgcagcaggtggtgaagggcctgcctgacctgaagaaggtggtggtgatcccctacgtgagcagccgggagaacatcgacctgagcaagatccccaacagcgtcttcctggatgacttcctggccaccggcaccagcgagcaggccccccagctggagtttgagcagctgcccttcagccaccccctcttcatcatgttcagcagcggcaccaccggggcccccaagtgcatggtgcacagcgctgggggcaccctcatccagcacctgaaggagcacctgctgcacggcaacatgaccagcagtgacatcctgctgtgctacaccaccgtgggctggatgatgtggaactggatggtgtccctgctggccactggagctgccatggtgctgtatgatggcagccccctggtgcccacccccaacgtgctgtgggacctggtggacagaattggctacctgggctcctggaggctgctgcagaaccagccccaggaccggggccacagacatgcctggccagagtag

SEQ ID NO: 142184 - DNA, 1845 bp, synthetic construct
  misc_feature 1..1845: note = Description of Artificial Sequence: Synthetic coding sequence
  source 1..1845: mol_type = other DNA
atgaggcctccccagtgcctgctgcacacccccagcctggccagccccctgctgctgctgctgctgtggctgctgggcggcggcgtgggcgctgagggcagagaagatgctgagctgctggtgacagtgcggggcggccgcctgcggggcatccggctgaagacccctgggggccctgtgtctgccttcctgggcatcccctttgctgagccccccatgggcccccggcgcttcctgcccccagagcccaagcagccctggagcggcgtggtggatgccaccaccttccagagcgtgtgctaccagtatgtggacaccctgtacccaggctttgagggcacagagatgtggaaccccaaccgggagctgtctgaggactgcctgtacctgaatgtgtggaccccctacccccggcccaccagccccacccctgtgctggtgtggatctacggcggcggcttctacagcggggccagcagcctggatgtgtatgatggccgcttcctggtgcaggccgagaggacagtgctggtgtccatgaactacagagtgggcgccttcggcttcctggccctgcccggcagccgggaggcccctggaaatgtgggcctgctggaccagaggctggccctgcagtgggtgcaggagaatgtggccgcctttggaggagaccccacctctgtgaccctgtttggagagagcgctggagctgcctctgtgggcatgcacctgctgagcccccccagccggggcctcttccacagagctgtgctgcagagcggggcccccaacggcccctgggccaccgtgggcatgggagaggccaggagaagagccacccagctggcccacctggtgggctgccccccaggcggcactggaggaaatgacacagagctggtggcctgcctgcggaccaggcctgcccaggtgctggtgaaccacgagtggcacgtgctgccccaggagagcgtcttccgcttctcctttgtgcctgtggtggatggagacttcctgagtgacaccccagaggccctgatcaatgctggggacttccacggcctgcaggtgctggtgggcgtggtgaaggatgagggcagctacttcctggtgtatggagcccctggcttcagcaaggacaatgaaagcctcatcagcagagctgagttcctggccggcgtgcgggtgggcgtgccccaggtgtctgacctggccgctgaggccgtggtgctgcactacacagactggctgcaccctgaggaccctgcccggctgcgggaggccctgagtgatgtggtgggggaccacaacgtggtgtgccctgtggcccagctggccggccgcctggccgcccagggcgcccgggtgtatgcctacgtgtttgagcaccgggccagcaccctgtcctggcccctgtggatgggcgtgccccacggctatgaaattgagttcatcttcggcatccccctggaccccagcaggaactacacagctgaggagaagatctttgcccagaggctgatgagatactgggccaactttgccaggactggagaccccaatgagccccgggaccccaaggccccccagtggccaccctacacagctggggcccagcagtatgtgtccctggacctgcggcccctggaggtgcggcggggcctgcgggcccaggcctgtgccttctggaaccgcttcctgcccaagctgctgagcgccacagacaccctggatgaggccgagcggcagtggaaggccgagttccaccgctggagcagctacatggtgcactggaagaaccagtttgaccactacagcaagcaggaccgctgcagcgacctgtag

SEQ ID NO: 142185 - DNA, 1854 bp, synthetic construct
  misc_feature 1..1854: note = Description of Artificial Sequence: Synthetic coding sequence
  source 1..1854: mol_type = other DNA
atgaggcctccccagtgcctgctgcacacccccagcctggccagccccctgctgctgctgctgctgtggctgctgggcggcggcgtgggcgctgagggcagagaagatgctgagctgctggtgacagtgcggggcggccgcctgcggggcatccggctgaagacccctgggggccctgtgtctgccttcctgggcatcccctttgctgagccccccatgggcccccggcgcttcctgcccccagagcccaagcagccctggagcggcgtggtggatgccaccaccttccagagcgtgtgctaccagtatgtggacaccctgtacccaggctttgagggcacagagatgtggaaccccaaccgggagctgtctgaggactgcctgtacctgaatgtgtggaccccctacccccggcccaccagccccacccctgtgctggtgtggatctacggcggcggcttctacagcggggccagcagcctggatgtgtatgatggccgcttcctggtgcaggccgagaggacagtgctggtgtccatgaactacagagtgggcgccttcggcttcctggccctgcccggcagccgggaggcccctggaaatgtgggcctgctggaccagaggctggccctgcagtgggtgcaggagaatgtggccgcctttggaggagaccccacctctgtgaccctgtttggagagagcgctggagctgcctctgtgggcatgcacctgctgagcccccccagccggggcctcttccacagagctgtgctgcagagcggggcccccaacggcccctgggccaccgtgggcatgggagaggccaggagaagagccacccagctggcccacctggtgggctgccccccaggcggcactggaggaaatgacacagagctggtggcctgcctgcggaccaggcctgcccaggtgctggtgaaccacgagtggcacgtgctgccccaggagagcgtcttccgcttctcctttgtgcctgtggtggatggagacttcctgagtgacaccccagaggccctgatcaatgctggggacttccacggcctgcaggtgctggtgggcgtggtgaaggatgagggcagctacttcctggtgtatggagcccctggcttcagcaaggacaatgaaagcctcatcagcagagctgagttcctggccggcgtgcgggtgggcgtgccccaggtgtctgacctggccgctgaggccgtggtgctgcactacacagactggctgcaccctgaggaccctgcccggctgcgggaggccctgagtgatgtggtgggggaccacaacgtggtgtgccctgtggcccagctggccggccgcctggccgcccagggcgcccgggtgtatgcctacgtgtttgagcaccgggccagcaccctgtcctggcccctgtggatgggcgtgccccacggctatgaaattgagttcatcttcggcatccccctggaccccagcaggaactacacagctgaggagaagatctttgcccagaggctgatgagatactgggccaactttgccaggactggagaccccaatgagccccgggaccccaaggccccccagtggccaccctacacagctggggcccagcagtatgtgtccctggacctgcggcccctggaggtgcggcggggcctgcgggcccaggcctgtgccttctggaaccgcttcctgcccaagctgctgagcgccacagccagcgaggcccccagcacctgccccggcttcacccatggagaggccgccccccggcccggcctgcccctgcccctgctgctgctgcaccagctgctgctgctcttcctgagccacctgcggcggctgtag

SEQ ID NO: 142186 - DNA, 1854 bp, synthetic construct; identical to SEQ ID NO: 142185
  misc_feature 1..1854: note = Description of Artificial Sequence: Synthetic coding sequence
  source 1..1854: mol_type = other DNA

SEQ ID NO: 142187 - DNA, 1845 bp, synthetic construct; identical to SEQ ID NO: 142184
  misc_feature 1..1845: note = Description of Artificial Sequence: Synthetic coding sequence
  source 1..1845: mol_type = other DNA

SEQ ID NO: 142188 - DNA, 1581 bp, synthetic construct
  misc_feature 1..1581: note = Description of Artificial Sequence: Synthetic coding sequence
  source 1..1581: mol_type = other DNA
atgaggcctccccagtgcctgctgcacacccccagcctggccagccccctgctgctgctgctgctgtggctgctgggcggcggcgtgggcgctgagggcagagaagatgctgagctgctggtgacagtgcggggcggccgcctgcggggcatccggctgaagacccctgggggccctgtgtctgccttcctgggcatcccctttgctgagccccccatgggcccccggcgcttcctgcccccagagcccaagcagccctggagcggcgtggtggatgccaccaccttccagagcgtgtgctaccagtatgtggacaccctgtacccaggctttgagggcacagagatgtggaaccccaaccgggagctgtctgaggactgcctgtacctgaatgtgtggaccccctacccccggcccaccagccccacccctgtgctggtgtggatctacggcggcggcttctacagcggggccagcagcctggatgtgtatgatggccgcttcctggtgcaggccgagaggacagtgctggtgtccatgaactacagagtgggcgccttcggcttcctggccctgcccggcagccgggaggcccctggaaatgtgggcctgctggaccagaggctggccctgcagtgggtgcaggagaatgtggccgcctttggaggagaccccacctctgtgaccctgtttggagagagcgctggagctgcctctgtgggcatgcacctgctgagcccccccagccggggcctcttccacagagctgtgctgcagagcggggcccccaacggcccctgggccaccgtgggcatgggagaggccaggagaagagccacccagctggcccacctggtgggctgccccccaggcggcactggaggaaatgacacagagctggtggcctgcctgcggaccaggcctgcccaggtgctggtgaaccacgagtggcacgtgctgccccaggagagcgtcttccgcttctcctttgtgcctgtggtggatggagacttcctgagtgacaccccagaggccctgatcaatgctggggacttccacggcctgcagctggccggccgcctggccgcccagggcgcccgggtgtatgcctacgtgtttgagcaccgggccagcaccctgtcctggcccctgtggatgggcgtgccccacggctatgaaattgagttcatcttcggcatccccctggaccccagcaggaactacacagctgaggagaagatctttgcccagaggctgatgagatactgggccaactttgccaggactggagaccccaatgagccccgggaccccaaggccccccagtggccaccctacacagctggggcccagcagtatgtgtccctggacctgcggcccctggaggtgcggcggggcctgcgggcccaggcctgtgccttctggaaccgcttcctgcccaagctgctgagcgccacagacaccctggatgaggccgagcggcagtggaaggccgagttccaccgctggagcagctacatggtgcactggaagaaccagtttgaccactacagcaagcaggaccgctgcagcgacctgtag

SEQ ID NO: 142189 - DNA, 1806 bp, synthetic construct
  misc_feature 1..1806: note = Description of Artificial Sequence: Synthetic coding sequence
  source 1..1806: mol_type = other DNA
atgaggcctccccagtgcctgctgcacacccccagcctggccagccccctgctgctgctgctgctgtggctgctgggcggcggcgtgggcgctgagggcagagaagatgctgagctgctggtgacagtgcggggcggccgcctgcggggcatccggctgaagacccctgggggccctgtgtctgccttcctgggcatcccctttgctgagccccccatgggcccccggcgcttcctgcccccagagcccaagcagccctggagcggcgtggtggatgccaccaccttccagagcgtgtgctaccagtatgtggacaccctgtacccaggctttgagggcacagagatgtggaaccccaaccgggagctgtctgaggactgcctgtacctgaatgtgtggaccccctacccccggcccaccagccccacccctgtgctggtgtggatctacggcggcggcttctacagcggggccagcagcctggatgtgtatgatggccgcttcctggtgcaggccgagaggacagtgctggtgtccatgaactacagagtgggcgccttcggcttcctggccctgcccggcagccgggaggcccctggaaatgtgggcctgctggaccagaggctggccctgcagtgggtgcaggagaatgtggccgcctttggaggagaccccacctctgtgaccctgtttggagagagcgctggagctgcctctgtgggcatgcacctgctgagcccccccagccggggcctcttccacagagctgtgctgcagagcggggcccccaacggcccctgggccaccgtgggcatgggagaggccaggagaagagccacccagctggcccacctggtgggctgccccccaggcggcactggaggaaatgacacagagctggtggcctgcctgcggaccaggcctgcccaggtgctggtgaaccacgagtggcacgtgctgccccaggagagcgtcttccgcttctcctttgtgcctgtggtggatggagacttcctgagtgacaccccagaggccctgatcaatgctggggacttccacggcctgcaggtgctggtgggcgtggtgaaggatgagggcagctacttcctggtgtatggagcccctggcttcagcaaggacaatgaaagcctcatcagcagagctgagttcctggccggcgtgcgggtgggcgtgccccaggtgtctgacctggccgctgaggccgtggtgctgcactacacagactggctgcaccctgaggaccctgcccggctgcgggaggccctgagtgatgtggtgggggaccacaacgtggtgtgccctgtggcccagctggccggccgcctggccgcccagggcgcccgggtgtatgcctacgtgtttgagcaccgggccagcaccctgtcctggcccctgtggatgggcgtgccccacggctatgaaattgagttcatcttcggcatccccctggaccccagcaggaactacacagctgaggagaagatctttgcccagaggctgatgagatactgggccaactttgccaggactggagaccccaatgagccccgggaccccaaggccccccagtggccaccctacacagctggggcccagcagtatgtgtccctggacctgcggcccctggaggtgcggcggggcctgcgggcccaggcctgtgccttctggaaccgcttcctgcccaagctgctgagcgccaccggcatgcagggccctgctggcagcggccggcggggcgtgggcgcccgctgcaaccccagcctgctgcccctggccagcgagtag

SEQ ID NO: 142190 - DNA, 1845 bp, synthetic construct; identical to SEQ ID NO: 142184
  misc_feature 1..1845: note = Description of Artificial Sequence: Synthetic coding sequence
  source 1..1845: mol_type = other DNA

SEQ ID NO: 142191 - DNA, 480 bp, synthetic construct
  misc_feature 1..480: note = Description of Artificial Sequence: Synthetic coding sequence
  source 1..480: mol_type = other DNA
atgaggcctccccagtgcctgctgcacacccccagcctggccagccccctgctgctgctgctgctgtggctgctgggcggcggcgtgggcgctgagggcagagaagatgctgagctgctggtgacagtgcggggcggccgcctgcggggcatccggctgaagacccctgggggccctgtgtctgccttcctgggcatcccctttgctgagccccccatgggcccccggcgcttcctgcccccagagcccaagcagccctggagcggcgtggtggatgccaccaccttccagagcgtgtgctaccagtatgtggacaccctgtacccaggctttgagggcacagagatgtggaaccccaaccgggagctgtctgaggactgcctgtacctgaatgtgtggaccccctacccccggcccaccagccccacccctgtgctggtgtggatctacggcggcggcttctacagcggggccagctag

SEQ ID NO: 142192 - DNA, 87 bp, synthetic construct
  misc_feature 1..87: note = Description of Artificial Sequence: Synthetic coding sequence
  source 1..87: mol_type = other DNA
atgaggcctccccagtgcctgctgcacacccccagcctggccagccccctgctgctgctgctgctgtggctgctgggcggcggctag

SEQ ID NO: 142193 - DNA, 282 bp, synthetic construct
  misc_feature 1..282: note = Description of Artificial Sequence: Synthetic coding sequence
  source 1..282: mol_type = other DNA
atgctgggcctggtgatgagctgcccagacaggaccctggtgaccaaggtgcgcagccaccccagcggcaaccagcaccggcccacccggggcggcagccgctccttccactgcagaagaggagtgcccaggcctgctgccctgcgggtgctgccccgctgcccagccttcagtgatgctgcctgcccagctgccatgaggcctccccagtgcctgctgcacacccccagcctggccagccccctgctgctgctgctgctgtggctgctgggcggcggctag

SEQ ID NO: 142194 - DNA, 1284 bp, synthetic construct
  misc_feature 1..1284: note = Description of Artificial Sequence: Synthetic coding sequence
  source 1..1284: mol_type = other DNA
atggctgtgctggccgccctgctgcggagcggggcccggagccgcagccccctgctgcggcggctggtgcaggagatccgctacgtggagaggagctatgtgtccaagcccaccctgaaggaggtggtgattgtgtctgccaccaggacccccatcggcagcttcctgggcagcctgagcctgctgcctgccaccaagctgggcagcatcgccatccagggcgccatcgagaaggccggcatccccaaggaggaggtgaaggaggcctacatgggaaatgtgctgcagggcggggagggccaggcccccacccggcaggccgtgctgggcgccggcctgcccatcagcaccccctgcaccaccatcaacaaggtgtgtgccagcggcatgaaggccatcatgatggccagccagagcctgatgtgtggccaccaggatgtgatggtggccggcggcatggagagcatgagcaatgtgccctacgtgatgaacagaggcagcaccccctacggcggcgtgaagctggaggacctgattgtgaaggatggcctgacagatgtgtacaacaagatccacatgggcagctgtgccgagaacacagccaagaagctgaacatcgccagaaatgagcaggatgcctatgccatcaacagctacaccaggagcaaggccgcctgggaggccggcaagtttggaaatgaagtcatccctgtgacagtgacagtgaagggccagccagatgtggtggtgaaggaggatgaggagtacaagagggtggacttcagcaaggtgcccaagctgaagacagtgttccagaaggaaaatggaacagtgacagctgccaatgccagcaccctgaatgatggagctgctgccctggtgctgatgacagcagatgctgccaagaggctgaatgtgacccccctggcccgcatcgtggcctttgctgatgctgctgtggagcccatcgacttccccatcgcccctgtgtatgctgcctccatggtgctgaaggatgtgggcctgaagaaggaggacatcgccatgtgggaggtgaatgaggccttcagcctggtggtgctggccaacatcaagatgctggagattgacccccagaaggtgaacatcaatggaggagctgtgtccctgggccaccccatcggcatgtctggggcccgcatcgtgggccacctgacccacgccctgaagcagggcgagtatggcctggccagcatctgcaatggaggcggcggggccagcgccatgctgatccagaagctgtag

SEQ ID NO: 142195 - DNA, 1194 bp, synthetic construct
  misc_feature 1..1194: note = Description of Artificial Sequence: Synthetic coding sequence
  source 1..1194: mol_type = other DNA
atgaatgccggcagtgaccctgtggtgattgtgtctgctgcccggaccatcatcggcagcttcaacggggccctggccgctgtgcctgtgcaggacctgggcagcaccgtcatcaaggaggtgctgaagagggccaccgtggccccagaagatgtgtctgaggtgatctttggacatgtgctggccgccggctgcggccagaaccctgtgcggcaggcctctgtgggcgccggcatcccctacagcgtgcctgcctggagctgccagatgatctgtggcagcggcctgaaggctgtgtgcctggccgtgcagagcatcggcatcggggacagcagcatcgtggtggccggcggcatggagaacatgagcaaggccccccacctggcctacctgaggactggagtgaagattggagagatgcccctgacagacagcatcctgtgtgatggcctgacagatgccttccacaactgccacatgggcatcacagcagaaaatgtggccaagaagtggcaggtgtcccgggaggaccaggacaaggtggccgtgctgagccagaacagaacagaaaatgcccagaaggccggccactttgacaaggagatcgtgcctgtgctggtgtccaccaggaagggcctcatcgaggtgaagacagatgagttccccaggcatggcagcaacatcgaggccatgagcaagctgaagccctacttcctgacagatggcactggaacagtgaccccagccaatgccagcggcatcaatgatggagctgctgctgtggtgctgatgaagaagtctgaggccgacaagaggggcctgacccccctggcccgcatcgtgtcctggagccaggtgggcgtggagcccagcatcatgggcatcggccccatcccagccatcaagcaggccgtgaccaaggccggctggagcctggaggatgtggacatctttgagatcaatgaggcctttgctgctgtgtctgctgccatcgtgaaggagctgggcctgaaccctgagaaggtgaacatcgagggcggggccatcgccctgggccaccccctgggcgccagcggctgccgcatcctggtgaccctgctgcacaccctggagaggatgggccgcagccggggcgtggccgccctgtgcatcggcggcggcatgggcatcgccatgtgtgtgcagcgggagtag

SEQ ID NO: 142196 - DNA, 1281 bp, synthetic construct
  misc_feature 1..1281: note = Description of Artificial Sequence: Synthetic coding sequence
  source 1..1281: mol_type = other DNA
atgggcagccaccctgtgctgcgcatctggggcaacagaagagccacagctgccagcctgggccgcagcggcggccgcctgagcagcccccggctgctgcgggtggtggcccccaccctgacctttgcccagaccagccgctgcagcttcaatggagccctggccgctgtgcctgtgcaggacctgggcagcaccgtcatcaaggaggtgctgaagagggccaccgtggccccagaagatgtgtctgaggtgatcttcggccacgtgctggccgccggctgcggccagaaccctgtgcggcaggcctctgtgggcgccggcatcccctacagcgtgcctgcctggagctgccagatgatctgtggcagcggcctgaaggctgtgtgcctggccgtgcagagcattggaattggagacagcagcatcgtggtggccggcggcatggagaacatgagcaaggccccccacctggcctacctgaggactggagtgaagatcggggagatgcccctgacagacagcatcctgtgtgatggcctgacagatgccttccacaactgccacatgggcatcacagcagaaaatgtggccaagaagtggcaggtgtcccgggaggaccaggacaaggtggccgtgctgagccagaacagaacagaaaatgcccagaaggccggccactttgacaaggagatcgtgcctgtgctggtgtccaccaggaagggcctgattgaggtgaagacagatgagttccccaggcatggcagcaacatcgaggccatgagcaagctgaagccctacttcctgacagatggcaccggcaccgtgaccccagccaatgccagcggcatcaatgatggagctgctgctgtggtgctgatgaagaagtctgaggccgacaagaggggcctgacccccctggccagaattgtgtcctggagccaggtgggcgtggagcccagcatcatgggcatcggccccatcccagccatcaagcaggccgtgaccaaggccggctggagcctggaggatgtggacatctttgagatcaatgaggcctttgctgctgtgtctgctgccatcgtgaaggagctgggcctgaaccctgagaaggtgaacattgaaggaggagccatcgccctgggccaccccctgggcgccagcggctgccgcatcctggtgaccctgctgcacaccctggagaggatgggccgcagcagaggagtggccgccctgtgcattggaggcggcatgggcatcgccatgtgtgtgcagcgggagtag

SEQ ID NO: 142197 - DNA, 1275 bp, synthetic construct
  misc_feature 1..1275: note = Description of Artificial Sequence: Synthetic coding sequence
  source 1..1275: mol_type = other DNA
atgcagaggctgcaggtggtgctgggccacctgcggggccctgctgacagcggctggatgccccaggccgccccctgcctgagcggggccccccaggccagcgctgctgatgtggtggtggtgcacggccgcaggacagccatctgcagagctggccggggcggcttcaaggacaccaccccagatgagctgctgtctgctgtgatgacagctgtgctgaaggatgtgaacctgcggcctgagcagctgggggacatctgtgtgggcaatgtgctgcagcccggggccggggccatcatggccagaattgcccagttcctgagtgacatccctgagaccgtgcccctgagcacagtgaaccggcagtgcagcagcggcctgcaggccgtggccagcattgctgggggcatcagaaatggcagctatgacatcggcatggcctgtggggtggagagcatgagcctggccgaccggggcaaccctggcaacatcaccagccggctgatggagaaggagaaggcccgggactgcctgatccccatgggcatcaccagtgaaaatgtggccgagcgcttcggcatcagccgggagaagcaggacacctttgccctggccagccagcagaaggccgcccgggcccagagcaagggctgcttccaggccgagatcgtgcctgtgaccaccaccgtgcatgatgacaagggcaccaagaggagcatcaccgtgacccaggatgagggcatccggcccagcaccaccatggagggcctggccaagctgaagccagccttcaagaaggatggcagcaccacagctggcaacagcagccaggtgtctgatggagctgctgccatcctgctggcccggcgcagcaaggccgaggagctgggcctgcccatcctgggcgtgctgcggagctatgctgtggtgggcgtgcccccagacatcatgggcatcggccctgcctatgccatccctgtggccctgcagaaggccggcctgactgtgtctgatgtggacatctttgagatcaatgaggcctttgccagccaggccgcctactgtgtggagaagctgcggctgcccccagagaaggtgaaccccctgggcggcgctgtggccctgggccaccccctgggctgcaccggggcccggcaggtgatcaccctgctgaatgagctgaagaggcggggcaagagggcctacggcgtggtgtccatgtgcattggaacaggcatgggcgctgctgctgtgtttgagtacccaggcaactag

SEQ ID NO: 142198 - DNA, 1071 bp, synthetic construct
  misc_feature 1..1071: note = Description of Artificial Sequence: Synthetic coding sequence
  source 1..1071: mol_type = other DNA
atgacagctgtgctgaaggatgtgaacctgcggcctgagcagctgggggacatctgtgtgggcaatgtgctgcagcccggggccggggccatcatggccagaattgcccagttcctgagtgacatccctgagaccgtgcccctgagcacagtgaaccggcagtgcagcagcggcctgcaggccgtggccagcattgctgggggcatcagaaatggcagctatgacatcggcatggcctgtggggtggagagcatgagcctggccgaccggggcaaccctggcaacatcaccagccggctgatggagaaggagaaggcccgggactgcctgatccccatgggcatcaccagtgaaaatgtggccgagcgcttcggcatcagccgggagaagcaggacacctttgccctggccagccagcagaaggccgcccgggcccagagcaagggctgcttccaggccgagatcgtgcctgtgaccaccaccgtgcatgatgacaagggcaccaagaggagcatcaccgtgacccaggatgagggcatccggcccagcaccaccatggagggcctggccaagctgaagccagccttcaagaaggatggcagcaccacagctggcaacagcagccaggtgtctgatggagctgctgccatcctgctggcccggcgcagcaaggccgaggagctgggcctgcccatcctgggcgtgctgcggagctatgctgtggtgggcgtgcccccagacatcatgggcatcggccctgcctatgccatccctgtggccctgcagaaggccggcctgactgtgtctgatgtggacatctttgagatcaatgaggcctttgccagccaggccgcctactgtgtggagaagctgcggctgcccccagagaaggtgaaccccctgggcggcgctgtggccctgggccaccccctgggctgcaccggggcccggcaggtgatcaccctgctgaatgagctgaagaggcggggcaagagggcctacggcgtggtgtccatgtgcattggaacaggcatgggcgctgctgctgtgtttgagtacccaggcaactag

SEQ ID NO: 142199 - DNA, 462 bp, synthetic construct
  misc_feature 1..462: note = Description of Artificial Sequence: Synthetic coding sequence
  source 1..462: mol_type = other DNA
atgcagaggctgcaggtggtgctgggccacctgcggggccctgctgacagcggctggatgccccaggccgccccctgcctgagcggggccccccaggccagcgctgctgatgtggtggtggtgcacggccgcaggacagccatctgcagagctggccggggcggcttcaaggacaccaccccagatgagctgctgtctgctgtgatgacagctgtgctgaaggatgtgaacctgcggcctgagcagctgggggacatctgtgtgggcaatgtgctgcagcccggggccggggccatcatggccagaattgcccagttcctgagtgacatccctgagaccgtgcccctgagcacagtgaaccggcagtgcagcagcggcctgcaggccgtggccagcattgctggctggagcccctgcccctggctgacagagggcaccctggagatcctgctgcgggcctag

SEQ ID NO: 142200 - DNA, 381 bp, synthetic construct
  misc_feature 1..381: note = Description of Artificial Sequence: Synthetic coding sequence
  source 1..381: mol_type = other DNA
atgagcctggccgaccggggcaaccctggcaacatcaccagccggctgatggagaaggagaaggcccgggactgcctgatccccatgggcatcaccagtgaaaatgtggccgagcgcttcggcatcagccgggagaagcaggacacctttgccctggccagccagcagaaggccgcccgggcccagagcaagggctgcttccaggccgagatcgtgcctgtgaccaccaccgtgcatgatgacaagggcaccaagaggagcatcaccgtgacccaggatgagggcatccggcccagcaccaccatggagggcctggccaagctgaagccagccttcaagaaggatggcagcaccacagctggggagactggacctggatag

SEQ ID NO: 142201 - DNA, 996 bp, synthetic construct
  misc_feature 1..996: note = Description of Artificial Sequence: Synthetic coding sequence
  source 1..996: mol_type = other DNA
atgcagaggctgcaggtggtgctgggccacctgcggggccctgctgacagcggctggatgccccaggccgccccctgcctgagcggggccccccaggccagcgctgctgatgtggtggtggtgcacggccgcaggacagccatctgcagagctggccggggcggcttcaaggacaccaccccagatgagctgctgtctgctgtgatgacagctgtgctgaaggatgtgaacctgcggcctgagcagctgggggacatctgtgtgggcaatgtgctgcagcccggggccggggccatcatggccagaattgcccagttcctgagtgacatccctgagaccgtgcccctgagcacagtgaaccggcagtgcagcagcggcctgcaggccgtggccagcattgctgggggcatcagaaatggcagctatgacatcggcatggcctgtggcatcaccagtgaaaatgtggccgagagatttggcatcagccgggagaagcaggacacctttgccctggccagccagcagaaggccgcccgggcccagagcaagggctgcttccaggccgagatcgtgcctgtgaccaccaccgtgcatgatgacaagggcaccaagaggagcatcaccgtgacccaggatgagggcatccggcccagcaccaccatggagggcctggccaagctgaagccagccttcaagaaggatggcagcaccacagctggcctgactgtgtctgatgtggacatctttgagatcaatgaggcctttgccagccaggccgcctactgtgtggagaagctgcggctgcccccagagaaggtgaaccccctgggcggcgctgtggccctgggccaccccctgggctgcacaggagcccggcaggtgatcaccctgctgaatgagctgaagagaagaggcaagagggcctatggagtggtgtccatgtgcatcggcaccggcatgggcgctgctgctgtgtttgagtacccaggcaactag

SEQ ID NO: 142202 - DNA, 7377 bp, synthetic construct
  misc_feature 1..7377: note = Description of Artificial Sequence: Synthetic coding sequence
  source 1..7377: mol_type = other DNA
atggtgctgctgctgtgcctgagctgcctgatcttcagctgcctgaccttctcctggctgaagatctggggcaagatgacagacagcaagcccatcaccaagagcaagtctgaggccaacctgatccccagccaggagcccttccctgccagtgacaacagcggggagaccccccagagaaatggagagggccacaccctgcccaagacccccagccaggccgagcccgccagccacaagggccccaaggatgctggaagaagaagaaacagcctgccccccagccaccagaagcccccaagaaaccccctgagcagcagtgatgctgcccccagccctgagctgcaggccaacggcaccggcacccagggcctggaggccacagacaccaacggcctgagcagcagcgcccggccccagggccagcaggccggcagccccagcaaggaggacaagaagcaggccaacatcaagaggcagctgatgaccaacttcatcctgggcagctttgatgactacagcagtgatgaagattctgtggccggcagcagccgggagagcaccaggaagggcagccgggccagcctgggcgccctgagcctggaggcctacctgaccactggagaggccgagaccagggtgcccaccatgaggcccagcatgagcggcctgcacctggtgaagaggggccgggagcacaagaagctggacctgcaccgggacttcaccgtggccagccctgctgagtttgtgaccaggtttggaggagacagagtcatcgagaaggtgctgattgccaacaacggcattgctgctgtgaagtgcatgaggagcatccgccgctgggcctatgagatgttcagaaatgaaagagccatccgctttgtggtgatggtgaccccagaggacctgaaggccaatgctgagtacatcaagatggctgaccactacgtgcctgtgcctgggggccccaacaacaacaactatgccaacgtggagctgattgtggacatcgccaagagaattcctgtgcaggccgtgtgggccggctggggccacgccagcgagaaccccaagctgcctgagctgctgtgcaagaatggagtggccttcctgggcccccccagcgaggccatgtgggccctgggggacaagatcgccagcacagtggtggcccagaccctgcaggtgcccaccctgccctggagcggcagcggcctgactgtggagtggacagaagatgacctgcagcagggcaagaggatctctgtgcctgaagatgtgtatgacaagggctgtgtgaaggatgtggatgagggcctggaggccgctgagagaattggcttccccctgatgatcaaggccagcgagggcggcggcggcaagggcatcaggaaggccgagagcgctgaggacttccccatcctcttccggcaggtgcagagcgagatccctggcagccccatcttcctgatgaagctggcccagcacgcccggcacctggaggtgcagatcctggccgaccagtatggaaatgctgtgtccctgtttggccgggactgcagcatccagaggaggcaccagaagatcgtggaggaggccccagccaccatcgcccccctggccatctttgagttcatggagcagtgtgccatccggctggccaagacagtgggctacgtgtctgctggcaccgtggagtacctgtacagccaggacggcagcttccacttcctggagctgaacccccggctgcaggtggagcacccctgcacagagatgattgctgatgtgaacctgcctgctgcccagctgcagatcgccatgggcgtgcccctgcaccggctgaaggacatccggctgctgtatggagagagcccctggggcgtgacccccatcagctttgagacccccagcaacccccccctggcccggggccacgtgattgctgcccgcatcaccagcgagaacccagatgagggcttcaagcccagcagcggcaccgtgcaggagctgaacttccgcagcagcaagaatgtgtggggctacttctctgtggccgccactggaggcctgcatgaatttgctgacagccagtttggccactgcttctcctggggcgagaaccgggaggaggccatcagcaacatggtggtggccctgaaggagctgagcatccggggggacttccgcaccaccgtggagtacctgatcaacctgctggagacagagagcttccagaacaatgacatcgacaccggctggctggactacctgattgctgagaaggtgcaggccgagaagccagacatcatgctgggcgtggtgtgtggggccctgaatgtggctgatgccatgttccgcacctgcatgacagacttcctgcacagcctggagcggggccaggtgctgcctgctgacagcctgctgaacctggtggatgtggagctgatctatggaggagtgaagtacatcctgaaggtggcccggcagagcctgaccatgtttgtgctgatcatgaatggctgccacattgaaattgatgcccaccggctgaatgatggcggcctgctgctgagctacaacggcaacagctacaccacctacatgaaggaggaggtggacagctaccgcatcaccatcggcaacaagacctgtgtgtttgagaaggaaaatgaccccaccgtgctgcggagccccagcgctgggaagctgacccagtacacagtggaggatggcggccacgtggaggccggcagcagctatgcagagatggaggtgatgaagatgatcatgaccctgaatgtgcaggagcggggccgggtgaagtacatcaagaggcctggagctgtgctggaggccggctgtgtggtggcccggctggagctggatgaccccagcaaggtgcaccctgctgagcccttcaccggggagctgcctgcccagcagaccctgcccatcctgggggagaagctgcaccaggtgttccacagcgtgctggagaacctgaccaacgtgatgagcggcttctgcctgcctgagcctgtgttcagcatcaagctgaaggagtgggtgcagaagctgatgatgaccctgcggcaccccagcctgcccctgctggagctgcaggagatcatgacctctgtggccggccgcatcccagcccctgtggagaagtctgtgcggcgggtgatggcccagtatgccagcaacatcacctctgtgctgtgccagttccccagccagcagatcgccaccatcctggactgccacgccgccaccctgcagaggaaggctgaccgggaggtgttcttcatcaacacccagagcatcgtgcagctggtgcagcgctaccgcagcggcatccggggctacatgaagacagtggtgctggacctgctgcggcgctacctgcgggtggagcaccacttccagcaggcccactatgacaagtgtgtgatcaacctgcgggagcagttcaagccagacatgagccaggtgctggactgcatcttcagccacgcccaggtggccaagaagaaccagctggtgatcatgctgattgatgagctgtgtggccctgaccccagcctgagtgatgagctgatcagcatcctgaatgagctgacccagctgagcaagtctgagcactgcaaggtggccctgcgggcccggcagatcctgattgccagccacctgcccagctatgagctgcggcacaaccaggtggagagcatcttcctgagcgccatcgacatgtatggccaccagttctgcccagagaacctgaagaagctgatcctgtctgagaccaccatctttgatgtgctgcccaccttcttctaccacgccaacaaggtggtgtgcatggccagcctggaggtgtatgtgcggcggggctacatcgcctatgagctgaacagcctgcagcaccggcagctgcctgatggcacctgtgtggtggagttccagttcatgctgcccagcagccaccccaacaggatgacagtgcccatcagcatcaccaacccagacctgctgcggcacagcacagagctgttcatggattctggcttcagccccctgtgccagaggatgggcgccatggtggccttcagaagatttgaggacttcaccaggaactttgatgaagtcatcagctgctttgccaacgtgcccaaggacacccccctcttcagcgaggcccggaccagcctgtacagtgaagatgactgcaagagcctgcgggaggagcccatccacatcctgaatgtgtccatccagtgtgccgaccacctggaggatgaggccctggtgcccatcctgcggacctttgtgcagagcaagaagaacatcctggtggactatggcctgcggcgcatcaccttcctgattgcccaggagaaggagttccccaagttcttcaccttccgggccagagatgaatttgctgaagatcgcatctaccgccacctggagcccgccctggccttccagctggagctgaacaggatgaggaactttgacctgacagctgtgccctgtgccaaccacaagatgcacctgtacctgggcgccgccaaggtgaaggagggcgtggaggtgacagaccaccgcttcttcatccgggccatcatccgccacagcgacctgatcaccaaggaggccagctttgagtacctgcagaatgaaggagagcggctgctgctggaggccatggatgagctggaggtggccttcaacaacacctctgtgaggacagactgcaaccacatcttcctgaactttgtgcccaccgtcatcatggaccccttcaagattgaggagagcgtgcgctacatggtgatgagatatggcagccggctgtggaagctgcgggtgctgcaggccgaggtgaagatcaacatccggcagaccaccactggatctgctgtgcccatccgcctcttcatcaccaatgaaagtggctactacctggacatcagcctgtacaaggaggtgacagacagccgcagcggcaacatcatgttccacagctttggaaacaagcagggcccccagcacggcatgctgatcaacaccccctacgtgaccaaggacctgctgcaggccaagcgcttccaggcccagaccctgggcaccacctacatctatgacttccctgagatgttccggcaggccctcttcaagctgtggggcagcccagacaagtaccccaaggacatcctgacctacacagagctggtgctggacagccagggccagctggtggagatgaaccggctgcccggcggcaatgaggtgggcatggtggccttcaagatgaggttcaagacccaggagtacccagagggcagagatgtgattgtgattggaaatgacatcaccttcagaattggcagctttggacctggagaggacctgctgtacctgcgggccagcgagatggcccgggcagagggcatccccaagatctacgtggccgccaacagcggggccagaattggcatggccgaggagatcaagcacatgttccacgtggcctgggtggaccctgaggacccccacaagggcttcaagtacctgtacctgaccccccaggactacacccgcatcagcagcctgaacagcgtgcactgcaagcacatcgaggagggcggggagagccgctacatgatcacagacatcatcggcaaggatgatggcctgggcgtggagaacctgcggggcagcggcatgattgctggggagagcagcctggcctatgaggagatcgtgaccatcagcctggtgacctgccgggccatcggcatcggggcctacctggtgcggctgggccagagggtcatccaggtggagaacagccacatcatcctgaccggggccagcgccctgaacaaggtgctgggccgggaggtgtacaccagcaacaaccagctgggcggcgtgcagatcatgcactacaatggagtgagccacatcaccgtgcctgatgactttgagggcgtgtacaccatcctggagtggctgagctacatgcccaaggacaaccacagccctgtgcccatcatcacccccacagaccccatcgaccgggagattgagttcctgcccagccgggccccctatgacccccgctggatgctggccggccggccccaccccaccctgaagggcacctggcagagcggcttctttgaccacggcagcttcaaggagatcatggccccctgggcccagacagtggtgacaggccgggcccggctgggcggcatccctgtgggcgtgattgctgtggagaccaggacagtggaggtggccgtgcctgctgaccctgccaacctggacagcgaggccaagatcatccagcaggccggccaggtgtggttcccagattctgcctacaagacagcccaggccgtgaaggacttcaaccgggagaagctgcccctgatgatctttgccaactggaggggcttcagcggcggcatgaaggacatgtatgaccaggtgctgaagtttggagcctacatcgtggatggcctgcggcagtacaagcagcccatcctgatctacatccccccctatgcagagctgcggggcggctcctgggtggtgattgatgccaccatcaaccccctgtgcatcgagatgtatgctgacaaggagagccggggcggcgtgctggagcctgagggcaccgtggagatcaagttcaggaagaaggacctgatcaagtccatgagaagaattgatcctgcctacaagaagctgatggagcagctgggggagccagacctgagtgacaaggacaggaaggacctggagggccgcctgaaggcccgggaggacctgctgctgcccatctaccaccaggtggccgtgcagtttgctgacttccatgacaccccaggccgcatgctggagaagggcgtcatcagtgacatcctggagtggaagacagcccggaccttcctgtactggaggctgcggcggctgctgctggaggaccaggtgaagcaggagatcctgcaggccagcggggagctgagccacgtgcacatccagagcatgctgcggcgctggtttgtggagacagagggcgctgtgaaggcctacctgtgggacaacaaccaggtggtggtgcagtggctggagcagcactggcaggccggagatggccccaggagcaccatccgggagaacatcacctacctgaagcatgacagcgtgctgaagaccatccggggcctggtggaggagaaccctgaggtggccgtggactgtgtgatctacctgagccagcacatcagccctgctgagcgggcccaggtggtgcacctgctgagcaccatggacagccctgccagcacctag

SEQ ID NO: 142203 - DNA, 7377 bp, synthetic construct; identical to SEQ ID NO: 142202
  misc_feature 1..7377: note = Description of Artificial Sequence: Synthetic coding sequence
  source 1..7377: mol_type = other DNA

SEQ ID NO: 142204 - DNA, 7167 bp, synthetic construct
  misc_feature 1..7167: note = Description of Artificial Sequence: Synthetic coding sequence
  source 1..7167: mol_type = other DNA
atggtgctgctgctgtgcctgagctgcctgatcttcagctgcctgaccttctcctggctgaagatctggggcaagatgacagacagcaagcccatcaccaagagcaagtctgaggccaacctgatccccagccaggagcccttccctgccagtgacaacagcggggagaccccccagagaaatggagagggccacaccctgcccaagacccccagccaggccgagcccgccagccacaagggccccaaggatgctggaagaagaagaaacagcctgccccccagccaccagaagcccccaagaaaccccctgagcagcagtgatgctgcccccagccctgagctgcaggccaacggcaccggcacccagggcctggaggccacagacaccaacggcctgagcagcagcgcccggccccagggccagcaggccggcagccccagcaaggaggacaagaagcaggccaacatcaagaggcagctgatgaccaacttcatcctgggcagctttgatgactacagcagtgatgaagattctgtggccggcagcagccgggagagcaccaggaagggcagccgggccagcctgggcgccctgagcctggaggcctacctgaccactggagaggccgagaccagggtgcccaccatgaggcccagcatgagcggcctgcacctggtgaagaggggccgggagcacaagaagctggacctgcaccgggacttcaccgtggccagccctgctgagtttgtgaccaggtttggaggagacagagtcatcgagaaggtgctgattgccaacaacggcattgctgctgtgaagtgcatgaggagcatccgccgctgggcctatgagatgttcagaaatgaaagagccatccgctttgtggtgatggtgaccccagaggacctgaaggccaatgctgagtacatcaagatggctgaccactacgtgcctgtgcctgggggccccaacaacaacaactatgccaacgtggagctgattgtggacatcgccaagagaattcctgtgcaggccgtgtgggccggctggggccacgccagcgagaaccccaagctgcctgagctgctgtgcaagaatggagtggccttcctgggcccccccagcgaggccatgtgggccctgggggacaagatcgccagcacagtggtggcccagaccctgcaggtgcccaccctgccctggagcggcagcggcctgactgtggagtggacagaagatgacctgcagcagggcaagaggatctctgtgcctgaagatgtgtatgacaagggctgtgtgaaggatgtggatgagggcctggaggccgctgagagaattggcttccccctgatgatcaaggccagcgagggcggcggcggcaagggcatcaggaaggccgagagcgctgaggacttccccatcctcttccggcaggtgcagagcgagatccctggcagccccatcttcctgatgaagctggcccagcacgcccggcacctggaggtgcagatcctggccgaccagtatggaaatgctgtgtccctgtttggccgggactgcagcatccagaggaggcaccagaagatcgtggaggaggccccagccaccatcgcccccctggccatctttgagttcatggagcagtgtgccatccggctggccaagacagtgggctacgtgtctgctggcaccgtggagtacctgtacagccaggacggcagcttccacttcctggagctgaacccccggctgcaggtggagcacccctgcacagagatgattgctgatgtgaacctgcctgctgcccagctgcagatcgccatgggcgtgcccctgcaccggctgaaggacatccggctgctgtatggagagagcccctggggcgtgacccccatcagctttgagacccccagcaacccccccctggcccggggccacgtgattgctgcccgcatcaccagcgagaacccagatgagggcttcaagcccagcagcggcaccgtgcaggagctgaacttccgcagcagcaagaatgtgtggggctacttctctgtggccgccactggaggcctgcatgaatttgctgacagccagtttggccactgcttctcctggggcgagaaccgggaggaggccatcagcaacatggtggtggccctgaaggagctgagcatccggggggacttccgcaccaccgtggagtacctgatcaacctgctggagacagagagcttccagaacaatgacatcgacaccggctggctggactacctgattgctgagaaggtgcaggccgagaagccagacatcatgctgggcgtggtgtgtggggccctgaatgtggctgatgccatgttccgcacctgcatgacagacttcctgcacagcctggagcggggccaggtgctgcctgctgacagcctgctgaacctggtggatgtggagctgatctatggaggagtgaagtacatcctgaaggtggcccggcagagcctgaccatgtttgtgctgatcatgaatggctgccacattgaaattgatgcccaccggctgaatgatggcggcctgctgctgagctacaacggcaacagctacaccacctacatgaaggaggaggtggacagctaccgcatcaccatcggcaacaagacctgtgtgtttgagaaggaaaatgaccccaccgtgctgcggagccccagcgctgggaagctgacccagtacacagtggaggatggcggccacgtggaggccggcagcagctatgcagagatggaggtgatgaagatgatcatgaccctgaatgtgcaggagcggggccgggtgaagtacatcaagaggcctggagctgtgctggaggccggctgtgtggtggcccggctggagctggatgaccccagcaaggtgcaccctgctgagcccttcaccggggagctgcctgcccagcagaccctgcccatcctgggggagaagctgcaccaggtgttccacagcgtgctggagaacctgaccaacgtgatgagcggcttctgcctgcctgagcctgtgttcagcatcaagctgaaggagtgggtgcagaagctgatgatgaccctgcggcaccccagcctgcccctgctggagctgcaggagatcatgacctctgtggccggccgcatcccagcccctgtggagaagtctgtgcggcgggtgatggcccagtatgccagcaacatcacctctgtgctgtgccagttccccagccagcagatcgccaccatcctggactgccacgccgccaccctgcagaggaaggctgaccgggaggtgttcttcatcaacacccagagcatcgtgcagctggtgcagagcaaggatgagctgtgtggccctgaccccagcctgagtgatgagctgatcagcatcctgaatgagctgacccagctgagcaagtctgagcactgcaaggtggccctgcgggcccggcagatcctgattgccagccacctgcccagctatgagctgcggcacaaccaggtggagagcatcttcctgagcgccatcgacatgtatggccaccagttctgcccagagaacctgaagaagctgatcctgtctgagaccaccatctttgatgtgctgcccaccttcttctaccacgccaacaaggtggtgtgcatggccagcctggaggtgtatgtgcggcggggctacatcgcctatgagctgaacagcctgcagcaccggcagctgcctgatggcacctgtgtggtggagttccagttcatgctgcccagcagccaccccaacaggatgacagtgcccatcagcatcaccaacccagacctgctgcggcacagcacagagctgttcatggattctggcttcagccccctgtgccagaggatgggcgccatggtggccttcagaagatttgaggacttcaccaggaactttgatgaagtcatcagctgctttgccaacgtgcccaaggacacccccctcttcagcgaggcccggaccagcctgtacagtgaagatgactgcaagagcctgcgggaggagcccatccacatcctgaatgtgtccatccagtgtgccgaccacctggaggatgaggccctggtgcccatcctgcggacctttgtgcagagcaagaagaacatcctggtggactatggcctgcggcgcatcaccttcctgattgcccaggagaaggagttccccaagttcttcaccttccgggccagagatgaatttgctgaagatcgcatctaccgccacctggagcccgccctggccttccagctggagctgaacaggatgaggaactttgacctgacagctgtgccctgtgccaaccacaagatgcacctgtacctgggcgccgccaaggtgaaggagggcgtggaggtgacagaccaccgcttcttcatccgggccatcatccgccacagcgacctgatcaccaaggaggccagctttgagtacctgcagaatgaaggagagcggctgctgctggaggccatggatgagctggaggtggccttcaacaacacctctgtgaggacagactgcaaccacatcttcctgaactttgtgcccaccgtcatcatggaccccttcaagattgaggagagcgtgcgctacatggtgatgagatatggcagccggctgtggaagctgcgggtgctgcaggccgaggtgaagatcaacatccggcagaccaccactggatctgctgtgcccatccgcctcttcatcaccaatgaaagtggctactacctggacatcagcctgtacaaggaggtgacagacagccgcagcggcaacatcatgttccacagctttggaaacaagcagggcccccagcacggcatgctgatcaacaccccctacgtgaccaaggacctgctgcaggccaagcgcttccaggcccagaccctgggcaccacctacatctatgacttccctgagatgttccggcaggccctcttcaagctgtggggcagcccagacaagtaccccaaggacatcctgacctacacagagctggtgctggacagccagggccagctggtggagatgaaccggctgcccggcggcaatgaggtgggcatggtggccttcaagatgaggttcaagacccaggagtacccagagggcagagatgtgattgtgattggaaatgacatcaccttcagaattggcagctttggacctggagaggacctgctgtacctgcgggccagcgagatggcccgggcagagggcatccccaagatctacgtggccgccaacagcggggccagaattggcatggccgaggagatcaagcacatgttccacgtggcctgggtggaccctgaggacccccacaagggcttcaagtacctgtacctgaccccccaggactacacccgcatcagcagcctgaacagcgtgcactgcaagcacatcgaggagggcggggagagccgctacatgatcacagacatcatcggcaaggatgatggcctgggcgtggagaacctgcggggcagcggcatgattgctggggagagcagcctggcctatgaggagatcgtgaccatcagcctggtgacctgccgggccatcggcatcggggcctacctggtgcggctgggccagagggtcatccaggtggagaacagccacatcatcctgaccggggccagcgccctgaacaaggtgctgggccgggaggtgtacaccagcaacaaccagctgggcggcgtgcagatcatgcactacaatggagtgagccacatcaccgtgcctgatgactttgagggcgtgtacaccatcctggagtggctgagctacatgcccaaggacaaccacagccctgtgcccatcatcacccccacagaccccatcgaccgggagattgagttcctgcccagccgggccccctatgacccccgctggatgctggccggccggccccaccccaccctgaagggcacctggcagagcggcttctttgaccacggcagcttcaaggagatcatggccccctgggcccagacagtggtgacaggccgggcccggctgggcggcatccctgtgggcgtgattgctgtggagaccaggacagtggaggtggccgtgcctgctgaccctgccaacctggacagcgaggccaagatcatccagcaggccggccaggtgtggttcccagattctgcctacaagacagcccaggccgtgaaggacttcaaccgggagaagctgcccctgatgatctttgccaactggaggggcttcagcggcggcatgaaggacatgtatgaccaggtgctgaagtttggagcctacatcgtggatggcctgcggcagtacaagcagcccatcctgatctacatccccccctatgcagagctgcggggcggctcctgggtggtgattgatgccaccatcaaccccctgtgcatcgagatgtatgctgacaaggagagccggggcggcgtgctggagcctgagggcaccgtggagatcaagttcaggaagaaggacctgatcaagtccatgagaagaattgatcctgcctacaagaagctgatggagcagctgggggagccagacctgagtgacaaggacaggaaggacctggagggccgcctgaaggcccgggaggacctgctgctgcccatctaccaccaggtggccgtgcagtttgctgacttccatgacaccccaggccgcatgctggagaagggcgtcatcagtgacatcctggagtggaagacagcccggaccttcctgtactggaggctgcggcggctgctgctggaggaccaggtgaagcaggagatcctgcaggccagcggggagctgagccacgtgcacatccagagcatgctgcggcgctggtttgtggagacagagggcgctgtgaaggcctacctgtgggacaacaaccaggtggtggtgcagtggctggagcagcactggcaggccggagatggccccaggagcaccatccgggagaacatcacctacctgaagcatgacagcgtgctgaagaccatccggggcctggtggaggagaaccctgaggtggccgtggactgtgtgatctacctgagccagcacatcagccctgctgagcgggcccaggtggtgcacctgctgagcaccatggacagccctgccagcacctag

SEQ ID NO: 142205 - DNA, 5070 bp, synthetic construct
  misc_feature 1..5070: note = Description of Artificial Sequence: Synthetic coding sequence
  source 1..5070: mol_type = other DNA
ctgcccttcctgctgaagccaccccagaccctgcccagcccagatgccatgttccgcacctgcatgacagacttcctgcacagcctggagcggggccaggtgctgcctgctgacagcctgctgaacctggtggatgtggagctgatctacggcggcgtgaagtacatcctgaaggtggcccggcagagcctgaccatgtttgtgctgatcatgaatggctgccacatcgagattgatgcccaccggctgaatgatggcggcctgctgctgagctacaatggaaacagctacaccacctacatgaaggaggaggtggacagctaccgcatcaccatcggcaacaagacctgtgtgtttgagaaggaaaatgaccccaccgtgctgcggagccccagcgctgggaagctgacccagtacacagtggaggatggcggccacgtggaggccggcagcagctatgcagagatggaggtgatgaagatgatcatgaccctgaatgtgcaggagcggggccgggtgaagtacatcaagaggcctggagctgtgctggaggccggctgtgtggtggcccggctggagctggatgaccccagcaaggtgcaccctgctgagcccttcaccggggagctgcctgcccagcagaccctgcccatcctgggggagaagctgcaccaggtgttccacagcgtgctggagaacctgaccaacgtgatgagcggcttctgcctgcctgagcccgtcttcagcatcaagctgaaggagtgggtgcagaagctgatgatgaccctgcggcaccccagcctgcccctgctggagctgcaggagatcatgacctctgtggccggccgcatcccagcccctgtggagaagtctgtgagaagagtgatggcccagtatgccagcaacatcacctctgtgctgtgccagttccccagccagcagatcgccaccatcctggactgccacgccgccaccctgcagaggaaggctgaccgggaggtgttcttcatcaacacccagagcatcgtgcagctggtgcagcgctacagaagtggcatccggggctacatgaagacagtggtgctggacctgctgcggcgctacctgcgggtggagcaccacttccagcaggcccactatgacaagtgtgtgatcaacctgcgggagcagttcaagccagacatgagccaggtgctggactgcatcttcagccacgcccaggtggccaagaagaaccagctggtgatcatgctgattgatgagctgtgtggccctgaccccagcctgagtgatgagctgatcagcatcctgaatgagctgacccagctgagcaagtctgagcactgcaaggtggccctgcgggcccggcagatcctgattgccagccacctgcccagctatgagctgcggcacaaccaggtggagagcatcttcctgagcgccatcgacatgtatggccaccagttctgcccagagaacctgaagaagctgatcctgtctgagaccaccatctttgatgtgctgcccaccttcttctaccacgccaacaaggtggtgtgcatggccagcctggaggtgtatgtgagaagaggctacatcgcctatgagctgaacagcctgcagcaccggcagctgcctgatggcacctgtgtggtggagttccagttcatgctgcccagcagccaccccaacaggatgacagtgcccatcagcatcaccaacccagacctgctgcggcacagcacagagctgttcatggacagcggcttcagccccctgtgccagaggatgggcgccatggtggccttccgccgctttgaggacttcaccaggaactttgatgaggtgatcagctgctttgccaacgtgcccaaggacacccccctcttcagcgaggcccggaccagcctgtacagtgaagatgactgcaagagcctgcgggaggagcccatccacatcctgaatgtgtccatccagtgtgccgaccacctggaggatgaggccctggtgcccatcctgcggacctttgtgcagagcaagaagaacatcctggtggactatggcctgcggcgcatcaccttcctgattgcccaggagaaggagttccccaagttcttcaccttccgggccagagatgaatttgctgaggaccgcatctaccgccacctggagcccgccctggccttccagctggagctgaacaggatgaggaactttgacctgacagctgtgccctgtgccaaccacaagatgcacctgtacctgggcgccgccaaggtgaaggagggcgtggaggtgacagaccaccgcttcttcatccgggccatcatccgccacagcgacctgatcaccaaggaggccagctttgagtacctgcagaatgaaggagagcggctgctgctggaggccatggatgagctggaggtggccttcaacaacacctctgtgaggacagactgcaaccacatcttcctgaactttgtgcccaccgtcatcatggaccccttcaagattgaggagagcgtgcgctacatggtgatgagatatggcagccggctgtggaagctgcgggtgctgcaggccgaggtgaagatcaacatccggcagaccaccaccggcagcgctgtgcccatccgcctcttcatcaccaatgaaagtggctactacctggacatcagcctgtacaaggaggtgacagacagccgcagcggcaacatcatgttccacagctttggaaacaagcagggcccccagcacggcatgctgatcaacaccccctacgtgaccaaggacctgctgcaggccaagcgcttccaggcccagaccctgggcaccacctacatctatgacttccctgagatgttccggcaggccctcttcaagctgtggggcagcccagacaagtaccccaaggacatcctgacctacacagagctggtgctggacagccagggccagctggtggagatgaaccggctgcccggcggcaatgaggtgggcatggtggccttcaagatgaggttcaagacccaggagtacccagagggcagagatgtgattgtgattggaaatgacatcaccttccgcatcggcagctttggacctggagaggacctgctgtacctgcgggccagcgagatggcccgggcagagggcatccccaagatctacgtggccgccaacagcggggcccgcatcggcatggccgaggagatcaagcacatgtttcatgtggcctgggtggaccctgaggacccccacaagggcttcaagtacctgtacctgaccccccaggactacacccgcatcagcagcctgaacagcgtgcactgcaagcacatcgaggagggcggggagagccgctacatgatcacagacatcatcggcaaggatgatggcctgggcgtggagaacctgcggggcagcggcatgattgctggggagagcagcctggcctatgaggagatcgtgaccatcagcctggtgacctgccgggccatcggcattggagcctacctggtgcggctgggccagagggtcatccaggtggagaacagccacatcatcctgactggagccagcgccctgaacaaggtgctgggccgggaggtgtacaccagcaacaaccagctgggcggcgtgcagatcatgcactacaacggggtgagccacatcaccgtgcctgatgactttgaaggagtgtacaccatcctggagtggctgagctacatgcccaaggacaaccacagccctgtgcccatcatcacccccacagaccccatcgaccgggagattgagttcctgcccagccgggccccctatgacccccgctggatgctggccggccggccccaccccaccctgaagggcacctggcagagcggcttctttgaccacggcagcttcaaggagatcatggccccctgggcccagacagtggtgacaggccgggcccggctgggcggcatccctgtgggcgtgattgctgtggagaccaggacagtggaggtggccgtgcctgctgaccctgccaacctggacagcgaggccaagatcatccagcaggccggccaggtgtggttcccagacagcgcctacaagacagcccaggccgtgaaggacttcaaccgggagaagctgcccctgatgatctttgccaactggaggggcttcagcggcggcatgaaggacatgtatgaccaggtgctgaagtttggagcctacatcgtggatggcctgcggcagtacaagcagcccatcctgatctacatccccccctatgcagagctgcggggcggctcctgggtggtgattgatgccaccatcaaccccctgtgcatcgagatgtatgctgacaaggagagcagaggaggagtgctggagcctgagggcaccgtggagatcaagttcaggaagaaggacctgatcaagtccatgagaagaattgatcctgcctacaagaagctgatggagcagctgggggagccagacctgagtgacaaggacaggaaggacctggagggccgcctgaaggcccgggaggacctgctgctgcccatctaccaccaggtggccgtgcagtttgctgacttccatgacaccccaggccgcatgctggagaagggcgtcatcagtgacatcctggagtggaagacagcccggaccttcctgtactggaggctgcggcggctgctgctggaggaccaggtgaagcaggagatcctgcaggccagcggggagctgagccacgtgcacatccagagcatgctgcggcgctggtttgtggagacagaaggagctgtgaaggcctacctgtgggacaacaaccaggtggtggtgcagtggctggagcagcactggcaggccggagatggccccaggagcaccatccgggagaacatcacctacctgaagcatgattctgtgctgaagaccatccggggcctggtggaggagaaccctgaggtggccgtggactgtgtgatctacctgagccagcacatcagccctgctgagcgggcccaggtggtgcacctgctgagcaccatggacagccctgccagcacctag

SEQ ID NO: 142206 - DNA, 432 bp, synthetic construct
  misc_feature 1..432: note = Description of Artificial Sequence: Synthetic coding sequence
  source 1..432: mol_type = other DNA
atgacagacagcaagcccatcaccaagagcaagtctgaggccaacctgatccccagccaggagcccttccctgccagtgacaacagcggggagaccccccagagaaatggagagggccacaccctgcccaagacccccagccaggccgagcccgccagccacaagggccccaaggatgctggaagaagaagaaacagcctgccccccagccaccagaagccacccaggaaccccctgagcagcagtgatgctgcccccagccctgagctgcaggccaatggaacaggcacccagggcctggaggccacagacaccaacggcctgagcagcagcgcccggccccagggccagcaggccggcagccccagcaaagaagacaagaagcaggccaacatcaagaggcagctgatgaccaacttcatcctgggctag

SEQ ID NO: 142207 - DNA, 2577 bp, synthetic construct
  misc_feature 1..2577: note = Description of Artificial Sequence: Synthetic coding sequence
  source 1..2577: mol_type = other DNA
atgacagtgcccatcagcatcaccaacccagacctgctgcggcacagcacagagctgttcatggattctggcttcagccccctgtgccagaggatgggcgccatggtggccttcagaagatttgaggacttcaccaggaactttgatgaagtcatcagctgctttgccaacgtgcccaaggacacccccctcttcagcgaggcccggaccagcctgtacagtgaagatgactgcaagagcctgcgggaggagcccatccacatcctgaatgtgtccatccagtgtgccgaccacctggaggatgaggccctggtgcccatcctgcggacctttgtgcagagcaagaagaacatcctggtggactatggcctgcggcgcatcaccttcctgattgcccaggagaaggagttccccaagttcttcaccttccgggccagagatgaatttgctgaagatcgcatctaccgccacctggagcccgccctggccttccagctggagctgaacaggatgaggaactttgacctgacagctgtgccctgtgccaaccacaagatgcacctgtacctgggcgccgccaaggtgaaggagggcgtggaggtgacagaccaccgcttcttcatccgggccatcatccgccacagcgacctgatcaccaaggaggccagctttgagtacctgcagaatgaaggagagcggctgctgctggaggccatggatgagctggaggtggccttcaacaacacctctgtgaggacagactgcaaccacatcttcctgaactttgtgcccaccgtcatcatggaccccttcaagattgaggagagcgtgcgctacatggtgatgagatatggcagccggctgtggaagctgcgggtgctgcaggccgaggtgaagatcaacatccggcagaccaccactggatctgctgtgcccatccgcctcttcatcaccaatgaaagtggctactacctggacatcagcctgtacaaggaggtgacagacagccgcagcggcaacatcatgttccacagctttggaaacaagcagggcccccagcacggcatgctgatcaacaccccctacgtgaccaaggacctgctgcaggccaagcgcttccaggcccagaccctgggcaccacctacatctatgacttccctgagatgttccggcaggccctcttcaagctgtggggcagcccagacaagtaccccaaggacatcctgacctacacagagctggtgctggacagccagggccagctggtggagatgaaccggctgcccggcggcaatgaggtgggcatggtggccttcaagatgaggttcaagacccaggagtacccagagggcagagatgtgattgtgattggaaatgacatcaccttcagaattggcagctttggacctggagaggacctgctgtacctgcgggccagcgagatggcccgggcagagggcatccccaagatctacgtggccgccaacagcggggccagaattggcatggccgaggagatcaagcacatgttccacgtggcctgggtggaccctgaggacccccacaagggcttcaagtacctgtacctgaccccccaggactacacccgcatcagcagcctgaacagcgtgcactgcaagcacatcgaggagggcggggagagccgctacatgatcacagacatcatcggcaaggatgatggcctgggcgtggagaacctgcggggcagcggcatgattgctggggagagcagcctggcctatgaggagatcgtgaccatcagcctggtgacctgccgggccatcggcatcggggcctacctggtgcggctgggccagagggtcatccaggtggagaacagccacatcatcctgaccggggccagcgccctgaacaaggtgctgggccgggaggtgtacaccagcaacaaccagctgggcggcgtgcagatcatgcactacaatggagtgagccacatcaccgtgcctgatgactttgagggcgtgtacaccatcctggagtggctgagctacatgcccaaggacaaccacagccctgtgcccatcatcacccccacagaccccatcgaccgggagattgagttcctgcccagccgggccccctatgacccccgctggatgctggccggccggccccaccccaccctgaagggcacctggcagagcggcttctttgaccacggcagcttcaaggagatcatggccccctgggcccagacagtggtgacaggccgggcccggctgggcggcatccctgtgggcgtgattgctgtggagaccaggacagtggaggtggccgtgcctgctgaccctgccaacctggacagcgaggccaagatcatccagcaggccggccaggtgtggttcccagattctgcctacaagacagcccaggccgtgaaggacttcaaccgggagaagctgcccctgatgatctttgccaactggaggggcttcagcggcggcatgaagggctgcctgggcacctggagagatgtgtcctggtggaagatccgggccatgctgcccatgcacatcggggagggctctgtgtag

SEQ ID NO: 142208 - DNA, 1038 bp, synthetic construct
  misc_feature 1..1038: note = Description of Artificial Sequence: Synthetic coding sequence
  source 1..1038: mol_type = other DNA
atgggcagcagcgaggaccaggcctaccgcctgctgaatgactatgccaacggcttcatggtgtcccaggtgctgtttgctgcctgtgagctgggcgtgtttgacctgctggccgaggcccctggccccctggatgtggccgctgtggccgccggcgtgcgggccagcgcccacggcacagagctgctgctggacatctgtgtgtccctgaagctgctgaaggtggagacccggggcggcaaggccttctacagaaacacagagctgagcagtgactacctgaccaccgtgagccccaccagccagtgcagcatgctgaagtacatgggccgcaccagctaccgctgctggggccacctggctgatgctgtgcgggagggcaggaaccagtacctggagacctttggagtgcctgctgaggagctgttcaccgccatctacagaagtgaaggagagcggctgcagttcatgcaggccctgcaggaggtgtggagcgtgaatggccgctctgtgctgacagcctttgacctgagcgtcttccccctgatgtgtgacctgggcggcggggccggggccctggccaaggagtgcatgagcctgtacccaggctgcaagatcaccgtgtttgacatccctgaggtggtgtggacagccaagcagcacttctccttccaggaggaggagcagattgacttccaggagggggacttcttcaaggaccccctgcctgaggccgacctgtacatcctggcccgggtgctgcatgactgggcagatggcaagtgcagccacctgctggagcgcatctaccacacctgcaagccaggcggcggcatcctggtgattgagagcctgctggatgaggaccggcggggccccctgctgacccagctgtacagcctgaacatgctggtgcagacagagggccaggagaggacccccacccactaccacatgctgctgagcagcgctggcttccgggacttccagttcaagaagacaggagccatctatgatgccatcctggccaggaagtag

SEQ ID NO: 142209 - DNA, 897 bp, synthetic construct
  misc_feature 1..897: note = Description of Artificial Sequence: Synthetic coding sequence
  source 1..897: mol_type = other DNA
atgggcagcagcgaggaccaggcctaccgcctgctgaatgactatgccaacggcttcatggtgtcccaggtgctgtttgctgcctgtgagctgggcgtgtttgacctgctggccgaggcccctggccccctggatgtggccgctgtggccgccggcgtgcgggccagcgcccacggcacagagctgctgctggacatctgtgtgtccctgaagctgctgaaggtggagacccggggcggcaaggccttctacagaaacacagagctgagcagtgactacctgaccaccgtgagccccaccagccagtgcagcatgctgaagtacatgggccgcaccagctaccgctgctggggccacctggctgatgctgtgcgggagggcaggaaccagtacctggagacctttggagtgcctgctgaggagctgttcaccgccatctacagaagtgaaggagagcggctgcagttcatgcaggccctgcaggaggtgtggagcgtgaatggccgctctgtgctgacagcctttgacctgagcgtcttccccctgatgtgtgacctgggcggggacttcttcaaggaccccctgcctgaggccgacctgtacatcctggcccgggtgctgcatgactgggcagatggcaagtgcagccacctgctggagcgcatctaccacacctgcaagccaggcggcggcatcctggtgattgagagcctgctggatgaagatagaagaggccccctgctgacccagctgtacagcctgaacatgctggtgcagacagagggccaggagaggacccccacccactaccacatgctgctgagcagcgctggcttccgggacttccagttcaagaagacaggagccatctatgatgccatcctggccaggaagtag

SEQ ID NO: 142210 - DNA, 1122 bp, synthetic construct
  misc_feature 1..1122: note = Description of Artificial Sequence: Synthetic coding sequence
  source 1..1122: mol_type = other DNA
atgggcagcagcgaggaccaggcctaccgcctgctgaatgactatgccaacggcttcatggtgtcccaggtgctgtttgctgcctgtgagctgggcgtgtttgacctgctggccgaggcccctggccccctggatgtggccgctgtggccgccggcgtgcgggccagcgcccacggcacagagctgctgctggacatctgtgtgtccctgaagctgctgaaggtggagacccggggcggcaaggccttctacagaaacacagagctgagcagtgactacctgaccaccgtgagccccaccagccagtgcagcatgctgaagtacatgggccgcaccagctaccgctgctggggccacctggctgatgctgtgcgggagggcaggaaccagtacctggagacctttggagtgcctgctgaggagctgttcaccgccatctacagaagtgaaggagagcggctgcagttcatgcaggccctgcaggaggtgtggagcgtgaatggccgctctgtgctgacagcctttgacctgagcgtcttccccctgatgtgtgacctgggcggcacctggatcaagctggagaccatcatcctgagcaagctgagccagggccagaagaccaagcacagggtcttcagcctgattggaggagctggggccctggccaaggagtgcatgagcctgtacccaggctgcaagatcaccgtgtttgacatccctgaggtggtgtggacagccaagcagcacttctccttccaggaggaggagcagattgacttccaggagggggacttcttcaaggaccccctgcctgaggccgacctgtacatcctggcccgggtgctgcatgactgggcagatggcaagtgcagccacctgctggagcgcatctaccacacctgcaagccaggcggcggcatcctggtgattgagagcctgctggatgaggaccggcggggccccctgctgacccagctgtacagcctgaacatgctggtgcagacagagggccaggagaggacccccacccactaccacatgctgctgagcagcgctggcttccgggacttccagttcaagaagacaggagccatctatgatgccatcctggccaggaagtag

SEQ ID NO: 142211 - DNA, 375 bp, synthetic construct
  misc_feature 1..375: note = Description of Artificial Sequence: Synthetic coding sequence
  source 1..375: mol_type = other DNA
gactgccgcctgacctctgtgtgcctgccctgtgtgcctggggacttcttcaaggaccccctgcctgaggccgacctgtacatcctggcccgggtgctgcatgactgggcagatggcaagtgcagccacctgctggagcgcatctaccacacctgcaagccaggcggcggcatcctggtgattgagagcctgctggatgaagatagaagaggccccctgctgacccagctgtacagcctgaacatgctggtgcagacagagggccaggagaggacccccacccactaccacatgctgctgagcagcgctggcttccgggacttccagttcaagaagacaggagccatctatgatgccatcctggccaggaagtag

SEQ ID NO: 142212 - DNA, 711 bp, synthetic construct
  misc_feature 1..711: note = Description of Artificial Sequence: Synthetic coding sequence
  source 1..711: mol_type = other DNA
atggagagcagcgccaagatggagagcggcggggccggccagcagccccagccccagccccagcagcccttcctgcccccagctgcctgcttctttgccacagctgctgctgctgctgctgctgctgctgctgctgctgcccagagcgcccagcagcagcagcagcagcagcagcagcagcagcaggccccccagctgcggcctgctgctgatggccagcccagcggcggcggccacaagagcgcccccaagcaggtgaagaggcagaggagcagcagccctgagctgatgcgctgcaagaggcggctgaacttcagcggcttcggctacagcctgccccagcagcagcctgctgctgtggccaggagaaatgaaagagagaggaacagagtgaagctggtgaacctgggctttgccaccctgcgggagcacgtgcccaatggagctgccaacaagaagatgagcaaggtggagaccctgcggtctgctgtggagtacatccgggccctgcagcagctgctggatgaacatgatgctgtgtctgctgccttccaggccggcgtgctgagccccaccatcagccccaactacagcaatgacctgaacagcatggccggcagccctgtgtcctcctacagcagtgatgagggcagctatgaccccctgagccctgaggagcaggagctgctggacttcaccaactggttctag

SEQ ID NO: 142213 - DNA, 582 bp, synthetic construct
  misc_feature 1..582: note = Description of Artificial Sequence: Synthetic coding sequence
  source 1..582: mol_type = other DNA
atggatggcggcaccctgcccaggtctgcccccccagcccctcctgtgcctgtgggctgtgccgcccggcggcggcctgccagccctgagctgctgcgctgcagcagaagaagaagacctgccacagctgagactggaggaggagctgctgctgtggccaggagaaatgaaagagagaggaacagagtgaagctggtgaacctgggcttccaggccctgcggcagcacgtgccccatggaggagccagcaagaagctgagcaaggtggagaccctgcggtctgctgtggagtacatccgggccctgcagaggctgctggccgagcatgatgctgtgagaaatgccctggccggcggcctgcggccccaggccgtgcggcccagcgccccccggggccccccaggcaccacccctgtggccgccagccccagccgggccagcagcagccctggccggggcggcagcagcgagcccggcagccccaggtctgcctacagcagtgatgacagcggctgtgagggcgccctgagccctgctgagcgggagctgctggacttcagctcctggctgggcggctactag

SEQ ID NO: 142214 - DNA, 1542 bp, synthetic construct
  misc_feature 1..1542: note = Description of Artificial Sequence: Synthetic coding sequence
  source 1..1542: mol_type = other DNA
atgtgcagcctgggcctcttccccccacctccaccccggggccaggtgaccctgtatgagcacaacaatgagctggtgacaggcagcagctatgagagccccccaccagacttccggggccagtggatcaacctgcctgtgctgcagctgaccaaggaccccctgaagaccccaggccgcctggaccacggcaccaggacagccttcatccaccaccgggagcaggtgtggaagcgctgcatcaacatctggagagatgtgggcctgtttggagtgctgaatgagatcgccaacagcgaggaggaggtgtttgagtgggtgaagacagccagcggctgggccctggccctgtgccgctgggccagcagcctgcacggcagcctcttcccccacctgagcctgcggtctgaggacctgattgctgagtttgcccaggtgaccaactgcaccatcgtgcccagcctgaagcaccggctgcagagaaatgtggccagcctggcctggaagcccctgagcgcctctgtgctggccgtggcctgccagagctgcatcctgatctggaccctggaccccaccagcctgagcacccggcccagcagcggctgtgcccaggtgctgagccaccctggccacacccctgtgaccagcctggcctgggcccccagcggcggccgcctgctgagcgccagccctgtggatgctgccatccgggtgtgggatgtgtccacagagacctgtgtgcccctgccctggttccggggcggcggcgtgaccaacctgctgtggagcccagatggcagcaagatcctggccaccaccccatctgctgtgttccgggtgtgggaggcccagatgtggacctgtgagcgctggcccaccctgagcggccgctgccagacaggctgctggagcccagatggcagccggctgctcttcaccgtgctgggggagcccctcatctacagcctgtccttccctgagcgctgtggggagggcaagggctgtgtgggcggggccaagagcgccaccatcgtggccgacctgtctgagaccaccatccagaccccagatggagaggagcggctgggcggggaggcccacagcatggtgtgggaccccagcggggagcggctggccgtgctgatgaagggcaagccccgggtgcaggacggcaagcctgtgatcctgctcttccgcaccaggaacagccctgtgtttgagctgctgccctgtggcatcatccagggcgagcccggggcccagccccagctgatcaccttccaccccagcttcaacaagggggccctgctgtctgtgggctggagcacaggccgcatcgcccacatccccctgtactttgtgaatgcccagttcccccgcttcagccctgtgctgggccgggcccaggagcccccagctgggggcggcggcagcatccatgacctgcccctcttcacagagaccagccccaccagcgccccctgggaccccctgcccggccccccacctgtgctgccccacagcccccacagccacctgtag

SEQ ID NO: 142215 - DNA, 1683 bp, synthetic construct
  misc_feature 1..1683: note = Description of Artificial Sequence: Synthetic coding sequence
  source 1..1683: mol_type = other DNA
atgccccagaccaggagccaggcccaggccaccatctccttccccaagaggaagctgagccgggccctgaacaaggccaagaacagcagtgatgccaagctggagcccaccaacgtgcagacagtgacctgcagcccccgggtgaaggccctgcccctgagccccaggaagaggctgggagatgacaacctgtgcaacaccccccacctgcccccctgcagcccccccaagcagggcaagaaggaaaatggaccaccccacagccacaccctgaagggccggcggctggtgtttgacaaccagctgaccatcaagagccccagcaagcgggagctggccaaggtgcaccagaacaagatcctgagctctgtgaggaagagccaggagatcaccaccaacagcgagcagcgctgccccctgaagaaggagagcgcctgtgtgcggctcttcaagcaggagggcacctgctaccagcaggccaagctggtgctgaacacagctgtgcctgaccggctgcctgcccgggagcgggagatggatgtgatccggaacttcctgcgggagcacatctgtgggaagaaggccggcagcctgtacctgagcggggcccctggcaccgggaagacagcctgcctgagccgcatcctgcaggacctgaagaaggagctgaagggcttcaagaccatcatgctgaactgcatgagcctgaggacagcccaggccgtgtttcctgccatcgcccaggagatctgccaggaggaggtgtccaggcctgctgggaaggacatgatgaggaagctggagaagcacatgacagctgagaagggccccatgattgtgctggtgctggatgagatggaccagctggacagcaagggccaggatgtgctgtacaccctgtttgagtggccctggctgagcaacagccacctggtgctgattggcatcgccaacaccctggacctgacagaccgcatcctgccccggctgcaggcccgggagaagtgcaagccccagctgctgaacttccccccctacaccaggaaccagatcgtgaccatcctgcaggaccggctgaaccaggtgtcccgggaccaggtgctggacaatgctgctgtgcagttctgtgccaggaaggtgtctgctgtgtctggagatgtgaggaaggccctggatgtgtgcagaagagccatcgagatcgtggagagtgatgtgaagagccagaccatcctgaagcccctgtctgagtgcaagagccccagcgagcccctcatccccaagagggtgggcctcatccacatcagccaggtgatcagcgaggtggatggcaacaggatgaccctgagccaggagggcgcccaggacagcttccccctgcagcagaagatcctggtgtgcagcctgatgctgctgatccggcagctgaagatcaaggaggtgaccctgggcaagctgtatgaggcctacagcaaggtgtgcaggaagcagcaggtggccgctgtggaccagagtgaatgtctgagcctgagcggcctgctggaggcccggggcatcctgggcctgaagaggaacaaggagacccggctgaccaaggtgttcttcaagattgaggagaaggagattgaacatgccctgaaggacaaggccctgattggcaacatcctggccaccggcctgccctag

SEQ ID NO: 142216 - DNA, 339 bp, synthetic construct
  misc_feature 1..339: note = Description of Artificial Sequence: Synthetic coding sequence
  source 1..339: mol_type = other DNA
atggccgagcaggccaccaagtctgtgctgtttgtgtgcctgggcaacatctgccgcagccccatcgccgaggccgtgttcaggaagctggtgacagaccagaacatcagcgagaactggagggtggacagcgctgccaccagcggctatgagatcggcaaccccccagactaccggggccagagctgcatgaagagacatggcatccccatgagccacgtggcccggcaggtgcccagcctggacctgaagctgtgtgtgctgtgcttcagcggcagcctgacagctgtgctcttcctgaccggcacctgggccggcccccagacccaggagctgtag

SEQ ID NO: 142217 - DNA, 477 bp, synthetic construct
  misc_feature 1..477: note = Description of Artificial Sequence: Synthetic coding sequence
  source 1..477: mol_type = other DNA
atggccgagcaggccaccaagtctgtgctgtttgtgtgcctgggcaacatctgccgcagccccatcgccgaggccgtgttcaggaagctggtgacagaccagaacatcagcgagaactggagggtggacagcgctgccaccagcggctatgagatcggcaaccccccagactaccggggccagagctgcatgaagagacatggcatccccatgagccacgtggcccggcagatcaccaaggaggactttgccacctttgactacatcctgtgcatggatgagagcaacctgcgggacctgaacaggaagagcaaccaggtgaagacctgcaaggccaagattgagctgctgggcagctatgacccccagaagcagctgatcatcgaggacccctactatggaaatgacagcgactttgaaacagtgtaccagcagtgtgtgcgctgctgccgggccttcctggagaaggcccactag

SEQ ID NO: 142218 - DNA, 477 bp, synthetic construct
  misc_feature 1..477: note = Description of Artificial Sequence: Synthetic coding sequence
  source 1..477: mol_type = other DNA
atggccgagcaggccaccaagtctgtgctgtttgtgtgcctgggcaacatctgccgcagccccatcgccgaggccgtgttcaggaagctggtgacagaccagaacatcagcgagaactgggtgattgacagcggggctgtgtctgactggaatgtgggccgcagcccagaccccagggctgtgtcctgcctgagaaatcatggcatccacacagcccacaaggcccggcagatcaccaaggaggactttgccacctttgactacatcctgtgcatggatgagagcaacctgcgggacctgaacaggaagagcaaccaggtgaagacctgcaaggccaagattgagctgctgggcagctatgacccccagaagcagctgatcatcgaggacccctactatggaaatgacagcgactttgaaacagtgtaccagcagtgtgtgcgctgctgccgggccttcctggagaaggcccactag

SEQ ID NO: 142219 - DNA, 219 bp, synthetic construct
  misc_feature 1..219: note = Description of Artificial Sequence: Synthetic coding sequence
  source 1..219: mol_type = other DNA
atggccgagcaggccaccaagtctgtgctgtttgtgtgcctgggcaacatctgccgcagccccatcgccgaggccgtgttcaggaagctggtgacagaccagaacatcagcgagaactggagggtggacagcgctgccaccagcggcggcagcctgacagctgtgctcttcctgaccggcacctgggccggcccccagaccaagagctgtgccgcctag

SEQ ID NO: 142220 - DNA, 483 bp, synthetic construct
  misc_feature 1..483: note = Description of Artificial Sequence: Synthetic coding sequence
  source 1..483: mol_type = other DNA
atggccggcaagaggagcggctggagcagagctgccctgctgcagctgctgctgggcgtgaacctggtggtgatgccacccacccgggcccggagcctgcgctttgtgaccctgctgtaccgccacggggacaggagccctgtgaagacctaccccaaggacccctaccaggaggaggagtggccccagggcttcggccagctgaccaaggagggcatgctgcagcactgggagctgggccaggccctgcggcagcgctaccacggcttcctgaacaccagctaccaccggcaggaggtgtatgtgcgcagcacagactttgacaggaccctgatgtctgctgaggccaacctggccggcctcttccccccaaatggcatgcagcgcttcaaccccaacatctcctggcagcccatccctgtgcacacagtgcccatcacagaggacagagtgcgggtggccagccccagcctgggctggtag

SEQ ID NO: 142221 - DNA, 1272 bp, synthetic construct
  misc_feature 1..1272: note = Description of Artificial Sequence: Synthetic coding sequence
  source 1..1272: mol_type = other DNA
atggccggcaagaggagcggctggagcagagctgccctgctgcagctgctgctgggcgtgaacctggtggtgatgccacccacccgggcccggagcctgcgctttgtgaccctgctgtaccgccacggggacaggagccctgtgaagacctaccccaaggacccctaccaggaggaggagtggccccagggcttcggccagctgaccaaggagggcatgctgcagcactgggagctgggccaggccctgcggcagcgctaccacggcttcctgaacaccagctaccaccggcaggaggtgtatgtgcgcagcacagactttgacaggaccctgatgtctgctgaggccaacctggccggcctcttccccccaaatggcatgcagcgcttcaaccccaacatctcctggcagcccatccctgtgcacacagtgcccatcacagaggaccggctgctgaagttccccctgggcccctgccccaggtatgagcagctgcagaatgagacccggcagaccccagagtaccagaatgaaagcagcagaaatgcccagttcctggacatggtggccaatgaaacaggcctgacagacctgaccctggagaccgtgtggaatgtgtatgacaccctcttctgtgagcagacccacggcctgcggctgcccccctgggccagcccccagaccatgcagaggctgagccggctgaaggacttctccttccgcttcctgtttggcatctaccagcaggccgagaaggcccggctgcagggcggcgtgctgctggcccagatcaggaagaacctgaccctgatggccaccaccagccagctgcccaagctgctggtgtacagcgcccatgacaccaccctggtggccctgcagatggccctggatgtgtacaatggagagcaggccccctatgccagctgccacatctttgagctgtaccaggaggacagcggcaacttctctgtggagatgtacttcagaaatgaaagtgacaaggccccctggcccctgagcctgcccggctgcccccaccgctgccccctgcaggacttcctgcggctgacagagcctgtggtgcccaaggactggcagcaggagtgccagctggccagcggccctgctgacacagaggtgattgtggccctggccgtgtgtggcagcatcctcttcctgctgattgtgctgctgctgactgtgctcttcaggatgcaggcccagcccccaggctacagacatgtggctgatggagaggaccacgcctag

SEQ ID NO: 142222 - DNA, 1176 bp, synthetic construct
  misc_feature 1..1176: note = Description of Artificial Sequence: Synthetic coding sequence
  source 1..1176: mol_type = other DNA
atggccggcaagaggagcggctggagcagagctgccctgctgcagctgctgctgggcgtgaacctggtggtgatgccacccacccgggcccggagcctgcgctttgtgaccctggagggcatgctgcagcactgggagctgggccaggccctgcggcagcgctaccacggcttcctgaacaccagctaccaccggcaggaggtgtatgtgcgcagcacagactttgacaggaccctgatgtctgctgaggccaacctggccggcctcttccccccaaatggcatgcagcgcttcaaccccaacatctcctggcagcccatccctgtgcacacagtgcccatcacagaggaccggctgctgaagttccccctgggcccctgccccaggtatgagcagctgcagaatgagacccggcagaccccagagtaccagaatgaaagcagcagaaatgcccagttcctggacatggtggccaatgaaacaggcctgacagacctgaccctggagaccgtgtggaatgtgtatgacaccctcttctgtgagcagacccacggcctgcggctgcccccctgggccagcccccagaccatgcagaggctgagccggctgaaggacttctccttccgcttcctgtttggcatctaccagcaggccgagaaggcccggctgcagggcggcgtgctgctggcccagatcaggaagaacctgaccctgatggccaccaccagccagctgcccaagctgctggtgtacagcgcccatgacaccaccctggtggccctgcagatggccctggatgtgtacaatggagagcaggccccctatgccagctgccacatctttgagctgtaccaggaggacagcggcaacttctctgtggagatgtacttcagaaatgaaagtgacaaggccccctggcccctgagcctgcccggctgcccccaccgctgccccctgcaggacttcctgcggctgacagagcctgtggtgcccaaggactggcagcaggagtgccagctggccagcggccctgctgacacagaggtgattgtggccctggccgtgtgtggcagcatcctcttcctgctgattgtgctgctgctgactgtgctcttcaggatgcaggcccagcccccaggctacagacatgtggctgatggagaggaccacgcctag

SEQ ID NO: 142223 - DNA, 711 bp, synthetic construct
  misc_feature 1..711: note = Description of Artificial Sequence: Synthetic coding sequence
  source 1..711: mol_type = other DNA
atggtggccaatgagaccggcctgacagacctgaccctggagaccgtgtggaatgtgtatgacaccctcttctgtgagcagacccacggcctgcggctgcccccctgggccagcccccagaccatgcagaggctgagccggctgaaggacttctccttccgcttcctgtttggcatctaccagcaggccgagaaggcccggctgcagggcggcgtgctgctggcccagatcaggaagaacctgaccctgatggccaccaccagccagctgcccaagctgctggtgtacagcgcccatgacaccaccctggtggccctgcagatggccctggatgtgtacaacggggagcaggccccctatgccagctgccacatctttgagctgtaccaggaggacagcggcaacttctctgtggagatgtacttcagaaatgaaagtgacaaggccccctggcccctgagcctgcccggctgcccccaccgctgccccctgcaggacttcctgcggctgacagagcctgtggtgcccaaggactggcagcaggagtgccagctggccagcggccctgctgacacagaggtgattgtggccctggccgtgtgtggcagcatcctcttcctgctgattgtgctgctgctgactgtgctcttcaggatgcaggcccagcccccaggctaccgccacgtggctgatggagaagatcatgcctag

SEQ ID NO: 142224 - DNA, 1242 bp, synthetic construct
  misc_feature 1..1242: note = Description of Artificial Sequence: Synthetic coding sequence
  source 1..1242: mol_type = other DNA
atggccggcaagaggagcggctggagcagagctgccctgctgcagctgctgctgggcgtgaacctggtggtgatgccacccacccgggcccggagcctgcgctttgtgaccctgctgtaccgccacggggacaggagccctgtgaagacctaccccaaggacccctaccaggaggaggagtggccccagggcttcggccagctgaccaaggagggcatgctgcagcgctaccacggcttcctgaacaccagctaccaccggcaggaggtgtatgtgcgcagcacagactttgacaggaccctgatgtctgctgaggccaacctggccggcctcttccccccaaatggcatgcagcgcttcaaccccaacatctcctggcagcccatccctgtgcacacagtgcccatcacagaggaccggctgctgaagttccccctgggcccctgccccaggtatgagcagctgcagaatgagacccggcagaccccagagtaccagaatgaaagcagcagaaatgcccagttcctggacatggtggccaatgaaacaggcctgacagacctgaccctggagaccgtgtggaatgtgtatgacaccctcttctgtgagcagacccacggcctgcggctgcccccctgggccagcccccagaccatgcagaggctgagccggctgaaggacttctccttccgcttcctgtttggcatctaccagcaggccgagaaggcccggctgcagggcggcgtgctgctggcccagatcaggaagaacctgaccctgatggccaccaccagccagctgcccaagctgctggtgtacagcgcccatgacaccaccctggtggccctgcagatggccctggatgtgtacaatggagagcaggccccctatgccagctgccacatctttgagctgtaccaggaggacagcggcaacttctctgtggagatgtacttcagaaatgaaagtgacaaggccccctggcccctgagcctgcccggctgcccccaccgctgccccctgcaggacttcctgcggctgacagagcctgtggtgcccaaggactggcagcaggagtgccagctggccagcggccctgctgacacagaggtgattgtggccctggccgtgtgtggcagcatcctcttcctgctgattgtgctgctgctgactgtgctcttcaggatgcaggcccagcccccaggctacagacatgtggctgatggagaggaccacgcctag

SEQ ID NO: 142225 - DNA, 978 bp, synthetic construct
  misc_feature 1..978: note = Description of Artificial Sequence: Synthetic coding sequence
  source 1..978: mol_type = other DNA
atggacatgtggacagccctgctgatcctgcaggccctgctgctgcccagcctggctgatggagccaccccagccctgcgctttgtggccgtgggggactggggcggcgtgcccaatgcccccttccacacagcccgggagatggccaatgccaaggagatcgccaggacagtgcagatcctgggcgctgacttcatcctgagcctgggggacaacttctacttcaccggggtgcaggacatcaatgacaagcgcttccaggagacctttgaagatgtgttcagtgacaggagcctgaggaaggtgccctggtacgtgctggccggcaaccacgaccacctgggcaatgtgtctgcccagatcgcctacagcaagatcagcaagcgctggaacttccccagccccttctaccgcctgcacttcaagatcccccagaccaacgtgtctgtggccatcttcatgctggacacagtgaccctgtgtggcaacagtgatgacttcctgagccagcagcctgagcggcccagagatgtgaagctggcccggacccagctgtcctggctgaagaagcagctggccgccgccagagaagattatgtgctggtggccggccactaccctgtgtggagcattgctgagcacggccccacccactgcctggtgaagcagctgcggcccctgctggccacctatggagtgacagcctacctgtgtggccatgaccacaacctgcagtacctgcaggatgaaaatggagtgggctacgtgctgagcggggccggcaacttcatggaccccagcaagaggcaccagaggaaggtgcccaacggctacctgcgcttccactatggaacagaggacagcctgggcggctttgcctacgtggagatcagcagcaaggagatgacagtgacctacatcgaggccagcggcaagagcctcttcaagacccggctgccccggcgggcccggccctag

SEQ ID NO: 142226 - DNA, 1239 bp, synthetic construct
  misc_feature 1..1239: note = Description of Artificial Sequence: Synthetic coding sequence
  source 1..1239: mol_type = other DNA
atgggcagcccctggaatggaagtgatggccctgagggcgcccgggagcccccctggccagccctgcccccctgtgatgagcggcgctgcagccccttccccctgggcgccctggtgcctgtgacagctgtgtgcctgtgcctgtttgtggtgggcgtgtctggaaatgtggtgacagtgatgctgattggccgctacagagacatgaggaccaccaccaacctgtacctgggctccatggctgtgtctgacctgctgatcctgctgggcctgccctttgacctgtaccgcctgtggaggagccggccctgggtgtttggccccctgctgtgccgcctgagcctgtatgtgggggagggctgcacctacgccaccctgctgcacatgacagccctgtctgtggagcgctacctggccatctgccggcccctgcgggcccgggtgctggtgaccaggagaagagtgcgggccctgattgctgtgctgtgggccgtggccctgctgtctgctggccccttcctgttcctggtgggcgtggagcaggaccccggcatctctgtggtgcccggcctgaatggaacagccagaattgccagcagccccctggccagcagcccccccctgtggctgagccgggcccccccacccagcccccccagcggccctgagacagctgaggccgccgccctcttcagccgggagtgccggcccagccctgcccagctgggcgccctgcgggtgatgctgtgggtgaccacagcctacttcttcctgcccttcctgtgcctgagcatcctgtatggcctcatcggccgggagctgtggagcagccggcggcccctgcggggccctgctgccagcggccgggagcggggccaccggcagacagtgcgggtgctgctggtggtggtgctggccttcatcatctgctggctgcccttccacgtgggccgcatcatctacatcaacacagaggacagcaggatgatgtacttcagccagtacttcaacatcgtggccctgcagctgttctacctgagcgccagcatcaaccccatcctgtacaacctgatcagcaagaagtacagagctgctgccttcaagctgctgctggccaggaagagccggccccggggcttccacaggagccgggacacagctggggaggtggccggggacaccggcggggacacagtgggctacacagagaccagcgccaacgtgaagaccatgggctag

SEQ ID NO: 142227 - DNA, 978 bp, synthetic construct; identical to SEQ ID NO: 142225
  misc_feature 1..978: note = Description of Artificial Sequence: Synthetic coding sequence
  source 1..978: mol_type = other DNA

SEQ ID NO: 142228 - DNA, 978 bp, synthetic construct; identical to SEQ ID NO: 142225
  misc_feature 1..978: note = Description of Artificial Sequence: Synthetic coding sequence
  source 1..978: mol_type = other DNA

SEQ ID NO: 142229 - DNA, 1161 bp, synthetic construct
  misc_feature 1..1161: note = Description of Artificial Sequence: Synthetic coding sequence
  source 1..1161: mol_type = other DNA
atgagagctgcccccctgctgctggcccgggccgccagcctgagcctgggcttcctgttcctgctcttcttctggctggacagatctgtgctggccaaggagctgaagtttgtgaccctggtgttccgccacggggacaggagccccatcgacaccttccccacagaccccatcaaggagagctcctggccccagggcttcggccagctgacccagctgggcatggagcagcactatgagctgggggagtacatcaggaagcgctacaggaagttcctgaatgaaagctacaagcatgagcaggtgtacatccgcagcacagatgtggacaggaccctgatgtctgccatgaccaacctggccgccctcttccccccagagggcgtgtccatctggaaccccatcctgctgtggcagcccatccctgtgcacacagtgcccctgtctgaggaccagctgctgtacctgcccttcaggaactgcccccgcttccaggagctggagagcgagaccctgaagtctgaggagttccagaagaggctgcacccctacaaggacttcatcgccaccctgggcaagctgagcggcctgcacggccaggacctgtttggcatctggagcaaggtgtatgaccccctgtactgtgagagcgtgcacaacttcaccctgcccagctgggccacagaggacaccatgaccaagctgcgggagctgtctgagctgagcctgctgagcctgtatggcatccacaagcagaaggagaagagccggctgcagggcggcgtgctggtgaatgagatcctgaaccacatgaagagggccacccagatccccagctacaagaagctgatcatgtacagcgcccatgacaccaccgtgtctggcctgcagatggccctggatgtgtacaacggcctgctgcccccctatgccagctgccacctgacagagctgtactttgagaagggggagtactttgtggagatgtactacagaaatgagacccagcacgagccctaccccctgatgctgcccggctgcagccccagctgccccctggagagatttgctgagctggtgggccctgtgatcccccaggactggagcacagagtgcatgaccaccaacagccaccagggcacagaggacagcacagactag

SEQ ID NO: 142230 - DNA, 1257 bp, synthetic construct
  misc_feature 1..1257: note = Description of Artificial Sequence: Synthetic coding sequence
  source 1..1257: mol_type = other DNA
atgagagctgcccccctgctgctggcccgggccgccagcctgagcctgggcttcctgttcctgctcttcttctggctggacagatctgtgctggccaaggagctgaagtttgtgaccctggtgttccgccacggggacaggagccccatcgacaccttccccacagaccccatcaaggagagctcctggccccagggcttcggccagctgacccagctgggcatggagcagcactatgagctgggggagtacatcaggaagcgctacaggaagttcctgaatgaaagctacaagcatgagcaggtgtacatccgcagcacagatgtggacaggaccctgatgtctgccatgaccaacctggccgccctcttccccccagagggcgtgtccatctggaaccccatcctgctgtggcagcccatccctgtgcacacagtgcccctgtctgaggaccagctgctgtacctgcccttcaggaactgcccccgcttccaggagctggagagcgagaccctgaagtctgaggagttccagaagaggctgcacccctacaaggacttcatcgccaccctgggcaagctgagcggcctgcacggccaggacctgtttggcatctggagcaaggtgtatgaccccctgtactgtgagagcgtgcacaacttcaccctgcccagctgggccacagaggacaccatgaccaagctgcgggagctgtctgagctgagcctgctgagcctgtatggcatccacaagcagaaggagaagagccggctgcagggcggcgtgctggtgaatgagatcctgaaccacatgaagagggccacccagatccccagctacaagaagctgatcatgtacagcgcccatgacaccaccgtgtctggcctgcagatggccctggatgtgtacaacggcctgctgcccccctatgccagctgccacctgacagagctgtactttgagaagggggagtactttgtggagatgtactacagaaatgagacccagcacgagccctaccccctgatgctgcccggctgcagccccagctgccccctggagagatttgctgagctggtgggccctgtgatcccccaggactggagcacagagtgcatgaccaccaacagccaccaggtgctgaaggtgatctttgctgtggccttctgcctgatctctgctgtgctgatggtgctgctcttcatccacatcagaagaggcctgtgctggcagcgggagagctatggcaacatctag

SEQ ID NO: 142231 - DNA, 1281 bp, synthetic construct
  misc_feature 1..1281: note = Description of Artificial Sequence: Synthetic coding sequence
  source 1..1281: mol_type = other DNA
atggccggcctgggcttctggggccaccctgctggccccctgctgctgctgctgctgctggtgctgcccccccgggccctgcctgagggccccctggtgtttgtggccctggtgttcagacatggagaccgggcccccctggccagctaccccatggacccccacaaggaggtggccagcaccctgtggccccggggcctgggccagctgaccacagagggcgtgcggcagcagctggagctgggccgcttcctgcggagccgctatgaggccttcctgagccctgagtaccgccgggaggaggtgtacatccgcagcacagactttgacaggaccctggagagcgcccaggccaacctggccggcctcttccctgaggccgcccctggcagccctgaggcccgctggaggcccatccctgtgcacacagtgcctgtggccgaggacaagctgctgcgcttccccatgaggagctgcccccgctaccacgagctgctgcgggaggccacagaggccgctgagtaccaggaggccctggagggctggacaggcttcctgagccggctggagaacttcaccggcctgagcctggtgggggagcccctgcggcgggcctggaaggtgctggacaccctgatgtgccagcaggcccacggcctgcccctgcctgcctgggccagcccagatgtgctgcggaccctggcccagatcagcgccctggacatcggggcccacgtgggcccccccagggctgctgagaaggcccagctgaccggcggcatcctgctgaatgccatcctggccaacttcagccgggtgcagaggctgggcctgcccctgaagatggtgatgtacagcgcccatgacagcaccctgctggccctgcagggcgccctgggcctgtatgatggccacaccccaccctatgctgcctgcctgggctttgagttcaggaagcacctgggcaacccagccaaggatggcggcaatgtgacagtgtccctcttctacagaaatgattctgcccacctgcccctgcccctgagcctgcccggctgcccagccccctgccccctgggccgcttctaccagctgacagccccagcccggcccccagcccacggcgtgtcctgccacggcccctatgaggccgccatccccccagcccctgtggtgcccctgctggccggggctgtggccgtgctggtggccctgagcctgggcctgggcctgctggcctggaggcctggctgcctgcgggccctgggcggccctgtgtag

SEQ ID NO: 142232 - DNA, 1002 bp, synthetic construct
  misc_feature 1..1002: note = Description of Artificial Sequence: Synthetic coding sequence
  source 1..1002: mol_type = other DNA
atggccggcctgggcttctggggccaccctgctggccccctgctgctgctgctgctgctggtgctgcccccccgggccctgcctgagggccccctggtgtttgtggccctggtgttcagacatggagaccgggcccccctggccagctaccccatggacccccacaaggaggtggccagcaccctgtggccccggggcctgggccagctgaccacagagggcgtgcggcagcagctggagctgggccgcttcctgcggagccgctatgagggcttcctgagccggctggagaacttcaccggcctgagcctggtgggggagcccctgcggcgggcctggaaggtgctggacaccctgatgtgccagcaggcccacggcctgcccctgcctgcctgggccagcccagatgtgctgcggaccctggcccagatcagcgccctggacattggagcccacgtgggcccccccagggctgctgagaaggcccagctgactggaggcatcctgctgaatgccatcctggccaacttcagccgggtgcagaggctgggcctgcccctgaagatggtgatgtacagcgcccatgacagcaccctgctggccctgcagggcgccctgggcctgtatgatggccacaccccaccctatgctgcctgcctgggctttgagttcaggaagcacctgggcaacccagccaaggatggcggcaatgtgacagtgtccctcttctacagaaatgacagcgcccacctgcccctgcccctgagcctgcccggctgcccagccccctgccccctgggccgcttctaccagctgacagccccagcccggcccccagcccatggagtgtcctgccacggcccctatgaagctgccatccccccagcccctgtggtgcccctgctggccggggctgtggccgtgctggtggccctgagcctgggcctgggcctgctggcctggaggcctggctgcctgcgggccctgggcggccctgtgtag

SEQ ID NO: 142233 - DNA, 633 bp, synthetic construct
  misc_feature 1..633: note = Description of Artificial Sequence: Synthetic coding sequence
  source 1..633: mol_type = other DNA
atggagatgggccgccgcatccacctggagctgaggaacagaacacccagtgatgtgaaggagctggtgctggacaacagccgcagcaatgaaggcaagctggagggcctgacagatgaatttgaggagctggagttcctgagcaccatcaacgtgggcctgaccagcatcgccaacctgcccaagctgaacaagctgaagaagctggagctgagtgacaacagagtgtctgggggcctggaggtgctggccgagaagtgccccaacctgacccacctgaacctgagcggcaacaagatcaaggacctgagcaccatcgagcccctgaagaagctggagaacctgaagagcctggacctcttcaactgtgaggtgaccaacctgaatgactacagagaaaatgtgttcaagctgctgccccagctgacctacctggatggctatgacagagatgacaaggaggccccagacagtgatgctgagggctacgtggagggcctggatgatgaggaggaggatgaagatgaggaggagtatgatgatgaggagggctacaatgatggagaggtggatgatgaggaggacaagaagaagaagaagaagaagaagaagaagaagaagaagaagaagtag

SEQ ID NO: 142234 - DNA, 750 bp, synthetic construct
  misc_feature 1..750: note = Description of Artificial Sequence: Synthetic coding sequence
  source 1..750: mol_type = other DNA
atggagatgggccgccgcatccacctggagctgaggaacagaacacccagtgatgtgaaggagctggtgctggacaacagccgcagcaatgaaggcaagctggagggcctgacagatgaatttgaggagctggagttcctgagcaccatcaacgtgggcctgaccagcatcgccaacctgcccaagctgaacaagctgaagaagctggagctgagtgacaacagagtgtctgggggcctggaggtgctggccgagaagtgccccaacctgacccacctgaacctgagcggcaacaagatcaaggacctgagcaccatcgagcccctgaagaagctggagaacctgaagagcctggacctcttcaactgtgaggtgaccaacctgaatgactacagagaaaatgtgttcaagctgctgccccagctgacctacctggatggctatgacagagatgacaaggaggccccagacagtgatgctgagggctacgtggagggcctggatgatgaggaggaggatgaagatgaggaggagtatgatgaagatgcccaggtggtggaggatgaggaggatgaagatgaggaggaggagggggaggaggaggatgtgtctggagaggaggaggaggatgaggagggctacaatgatggagaggtggatgatgaagaagatgaggaggagctgggggaggaggagcggggccagaagaggaagcgggagccagaagatgaaggagaagatgatgactag

SEQ ID NO: 142235 - DNA, 396 bp, synthetic construct
  misc_feature 1..396: note = Description of Artificial Sequence: Synthetic coding sequence
  source 1..396: mol_type = other DNA
atggagatgggcaagtggatccacctggagctgaggaacagaacacccagtgatgtgaaggagctgttcctggacaacagccagagcaatgaaggcaagctggagggcctgacagatgaatttgaggagctggagctgctgaacaccatcaacatcggcctgaccagcatcgccaacctgcccaagctgaacaagctgaagaagctggagctgagcagcaacagagcctctgtgggcctggaggtgctggccgagaagtgccccaacctgatccacctgaacctgagcggcaacaagatcaaggacctgagcaccatcgagcccctgaagaagctggagaacctggagagcctggacctcttcacctgtgaggtgaccaacctgaacaactactag

SEQ ID NO: 142236 - DNA, 807 bp, synthetic construct
  misc_feature 1..807: note = Description of Artificial Sequence: Synthetic coding sequence
  source 1..807: mol_type = other DNA
atggagatgaagaagaagatcaacctggagctgaggaacagaagccctgaggaggtgacagagctggtgctggacaactgcctgtgtgtgaatggagaaattgagggcctgaatgacaccttcaaggagctggagttcctgtccatggccaacgtggagctgagcagcctggcccggctgcccagcctgaacaagctgaggaagctggagctgagtgacaacatcatcagcggcggcctggaggtgctggccgagaagtgccccaacctgacctacctgaacctgagcggcaacaagatcaaggacctgagcacagtggaggccctgcagaacctgaagaacctgaagagcctggacctcttcaactgtgagatcaccaacctggaggactaccgggagagcatctttgagctgctgcagcagatcacctacctggatggctttgaccaggaggacaatgaggccccagacagcgaggaggaggatgatgaagatggagatgaagatgatgaggaggaggaggagaatgaggccggccccccagagggctatgaggaggaggaggaggaggaggaggaggaggatgaagatgaagatgaagatgaagatgaagctggcagcgagctgggggagggggaggaggaggtgggcctgagctacctgatgaaggaggagatccaggatgaggaggatgatgatgattatgtggaggagggggaggaggaggaggaggaggaggagggcggcctgcggggggagaagaggaagagagatgctgaagatgatggagaggaggaggatgactag

SEQ ID NO: 142237 - DNA, 411 bp, synthetic construct
  misc_feature 1..411: note = Description of Artificial Sequence: Synthetic coding sequence
  source 1..411: mol_type = other DNA
atggagatgaagaagaagatcaacctggagctgaggaacagaagccctgaggaggaggacaatgaggccccagacagcgaggaggaggatgatgaagatggagatgaagatgatgaggaggaggaggagaatgaggccggccccccagagggctatgaggaggaggaggaggaggaggaggaggaggatgaagatgaagatgaagatgaagatgaagctggcagcgagctgggggagggggaggaggaggtgggcctgagctacctgatgaaggaggagatccaggatgaggaggatgatgatgattatgtggaggagggggaggaggaggaggaggaggaggagggcggcctgcggggggagaagaggaagagagatgctgaagatgatggagaggaggaggatgactag

SEQ ID NO: 142238 - DNA, 663 bp, synthetic construct
  misc_feature 1..663: note = Description of Artificial Sequence: Synthetic coding sequence
  source 1..663: mol_type = other DNA
atggccaacgtggagctgagcagcctggcccggctgcccagcctgaacaagctgaggaagctggagctgagtgacaacatcatcagcggcggcctggaggtgctggccgagaagtgccccaacctgacctacctgaacctgagcggcaacaagatcaaggacctgagcacagtggaggccctgcagaacctgaagaacctgaagagcctggacctcttcaactgtgagatcaccaacctggaggactaccgggagagcatctttgagctgctgcagcagatcacctacctggatggctttgaccaggaggacaatgaggccccagacagcgaggaggaggatgatgaagatggagatgaagatgatgaggaggaggaggagaatgaggccggccccccagagggctatgaggaggaggaggaggaggaggaggaggaggatgaagatgaagatgaagatgaagatgaagctggcagcgagctgggggagggggaggaggaggtgggcctgagctacctgatgaaggaggagatccaggatgaggaggatgatgatgattatgtggaggagggggaggaggaggaggaggaggaggagggcggcctgcggggggagaagaggaagagagatgctgaagatgatggagaggaggaggatgactag

SEQ ID NO: 142239 - DNA, 684 bp, synthetic construct
  misc_feature 1..684: note = Description of Artificial Sequence: Synthetic coding sequence
  source 1..684: mol_type = other DNA
atggagatgaagaagaagatcaacctggagctgaggaacagaagccctgaggaggtgacagagctggtgctggacaactgcctgtgtgtgaatggagaaattgagggcctgaatgacaccttcaaggagctggagttcctgtccatggccaacgtggagctgagcagcctggcccggctgcccagcctgaacaagctgaggaagcagaacctgaagaacctgaagagcctggacctcttcaactgtgagatcaccaacctggaggactaccgggagagcatctttgagctgctgcagcagatcacctacctggatggctttgaccaggaggacaatgaggccccagattctgaggaggaggatgatgaagatggagatgaagatgatgaggaggaggaggagaatgaagctggccccccagagggctatgaggaggaggaggaggaggaggaggaggaggatgaagatgaagatgaagatgaagatgaggccggcagcgagctgggggagggggaggaggaggtgggcctgagctacctgatgaaggaggagatccaggatgaagaagatgatgatgattatgtggaggagggggaggaggaggaggaggaggaggagggcggcctgcggggggagaagaggaagagagatgctgaagatgatggagaggaggaggatgactag

SEQ ID NO: 142240 - DNA, 2076 bp, synthetic construct
  misc_feature 1..2076: note = Description of Artificial Sequence: Synthetic coding sequence
  source 1..2076: mol_type = other DNA
atggatggctgcaagaaggagctgccccggctgcaggagcctgaggaggatgaggactgctacatcctgaatgtgcagagcagcagtgatgacaccagcggcagctctgtggcccggcgggcccccaagaggcaggccagctgcatcctgaatgtgcagagccgcagcggggacaccagcggcagctctgtggcccggcgggcccccaagaggcaggccagctctgtggtggtgattgacagcgacagtgatgaggagtgccacacccatgaggagaagaaggccaagctgctggagatcaacagtgatgatgagagccctgagtgctgccacgtgaagccagccatccaggagccccccatcgtcatcagtgatgatgacaatgatgatgacaatggaaatgacctggaggtgcctgatgacaacagtgatgacagcgaggccccagatgacaacagtgatgacagcgaggccccagatgacaacagtgatgacagcgaggccccagatgacaacagtgatgacagcgaggccccagatgacaacagtgatgacagtgatgtgcctgatgacaacagtgatgacagcagtgatgacaacagtgatgacagcagtgatgacaacagtgatgacagtgatgtgcctgatgacaagagtgatgacagtgatgtgcctgatgacagcagtgatgacagtgatgtgcctgatgacagcagtgatgacagcgaggccccagatgacagcagtgatgacagcgaggccccagatgacagcagtgatgacagcgaggccccagatgacagcagtgatgacagcgaggccccagatgacagcagtgatgacagcgaggccagtgatgacagcagtgatgacagcgaggccagtgatgacagcagtgatgacagcgaggccccagatgacaagagtgatgacagtgatgtgcctgaggacaagagtgatgacagtgatgtgcctgatgacaacagtgatgacctggaggtgcctgtgcctgctgaggacctgtgcaatgaaggccagatcgccagtgatgaggaggagctggtggaggccgctgctgctgtgtcccagcacgacagcagtgatgatgctggggagcaggacctgggggagaacctgagcaagccacccagcgaccctgaggccaaccctgaggtgtctgagaggaagctgcccacagaggaggagcccgcccctgtggtggagcagagcggcaagaggaagagcaagaccaagaccatcgtggagccccccaggaagaggcagaccaagaccaagaacatcgtggagccccccaggaagaggcagaccaagaccaagaacatcgtggagcccctgaggaagaggaaggccaagaccaagaatgtgtctgtgaccccaggccacaagaagaggggccccagcaagaagaagccaggggccgccaaggtggagaagaggaagaccaggacccccaagtgcaaggtgcccggctgcttcctgcaggacctggagaagagcaagaagtacagcggcaagaacctgaagaggaacaaggatgagctggtgcagaggatctatgacctcttcaacagatctgtgtgtgacaagaagctgcctgagaagctgcgcatcggctggaacaacaagatggtgaagacagctggcctgtgcagcactggagagatgtggtaccccaagtggaggagatttgccaagatccagatcggcctgaaggtgtgtgacagcgctgaccgcatccgggacaccctcatccacgagatgtgccacgccgcctcctggctgattgatggcatccatgacagccatggagatgcctggaagtactatgccaggaagagcaaccgcatccaccctgagctgccccgggtgacccgctgccacaactacaagatcaactacaaggtgcactatgaatgtacaggctgcaagaccagaattggctgctacaccaagagcctggacaccagccgcttcatctgtgccaagtgcaagggcagcctggtgatggtgcccctgacccagaaggatggcaccagaattgtgccccacgtgtag

SEQ ID NO: 142241 - DNA, 2076 bp, synthetic construct; identical to SEQ ID NO: 142240
  misc_feature 1..2076: note = Description of Artificial Sequence: Synthetic coding sequence
  source 1..2076: mol_type = other DNA

SEQ ID NO: 142242 - DNA, 540 bp, synthetic construct
  misc_feature 1..540: note = Description of Artificial Sequence: Synthetic coding sequence
  source 1..540: mol_type = other DNA
atggtgcaggcctggtacatggatgatgcccctggggacccccggcagccccacaggccagaccccggccggcctgtgggcctggagcagctgcggcggctgggcgtgctgtactggaagctggatgctgacaagtatgaaaatgaccctgagctggagaagatccggcgggagaggaactacagctggatggacatcatcaccatctgcaaggacaagctgcccaactatgaggagaagatcaagatgttttatgaggagcacctgcacctggatgatgagatccgctacatcctggatggcagcggctactttgatgtgcgggacaaggaggaccagtggatccgcatcttcatggagaagggggacatggtgaccctgcctgctggcatctaccaccgcttcaccgtggatgagaagaactacaccaaggccatgaggctgtttgtgggggagcctgtgtggacagcctacaacagacctgctgaccactttgaggcccggggccagtatgtgaagttcctggcccagacagcctag

SEQ ID NO: 142243 - DNA, 2670 bp, synthetic construct
  misc_feature 1..2670: note = Description of Artificial Sequence: Synthetic coding sequence
  source 1..2670: mol_type = other DNA
atgagcaacccctttgcccacctggccgagcccctggaccctgtgcagcccgggaagaagttcttcaacctgaacaagctggaggacagccgctatggccgcctgcccttcagcatccgggtgctgctggaggccgccatccggaactgtgatgagttcctggtgaagaagcaggacatcgagaacatcctgcactggaatgtgacccagcacaagaacatcgaggtgcccttcaagccagcccgggtcatcctgcaggacttcaccggggtgcctgctgtggtggactttgctgccatgagagatgctgtgaagaagctgggcggggaccctgagaagatcaaccctgtgtgcccagctgacctggtgattgaccacagcatccaggtggacttcaacagaagagctgacagcctgcagaagaaccaggacctggagtttgaaagaaaccgggagagatttgagttcctgaagtggggcagccaggccttccacaacatgaggatcatccccccaggcagcggcatcatccaccaggtgaacctggagtacctggcccgggtggtgtttgaccaggacggctactactacccagacagcctggtgggcacagacagccacaccaccatgattgatggcctgggcatcctgggctggggcgtgggcggcatcgaggccgaggccgtgatgctgggccagcccatctccatggtgctgccccaggtgattggctaccgcctgatgggcaagccccaccccctggtgaccagcacagacatcgtgctgaccatcaccaagcacctgcggcaggtgggcgtggtgggcaagtttgtggagttctttggacctggggtggcccagctgagcattgctgaccgggccaccatcgccaacatgtgcccagaatatggagccacagctgccttcttccctgtggatgaggtgtccatcacctacctggtgcagacaggaagagatgaggagaagctgaagtacatcaagaagtacctgcaggccgtgggcatgttccgggacttcaatgaccccagccaggaccctgacttcacccaggtggtggagctggacctgaagacagtggtgccctgctgcagcggccccaagaggccccaggacaaggtggccgtgtctgacatgaagaaggactttgagagctgcctgggcgccaagcagggcttcaagggcttccaggtggcccctgagcaccacaatgaccacaagaccttcatctatgacaacacagagttcaccctggcccacggctctgtggtgattgctgccatcaccagctgcaccaacaccagcaaccccagcgtgatgctgggcgccggcctgctggccaagaaggctgtggatgctggcctgaatgtgatgccctacatcaagaccagcctgagccctggcagcggcgtggtgacctactacctgcaggagagcggcgtgatgccctacctgagccagctgggctttgatgtggtgggctacggctgcatgacctgcatcggcaacagcggccccctgcctgagcctgtggtggaggccatcacccagggcgacctggtggccgtgggcgtgctgagcggcaacagaaactttgagggccgggtgcaccccaacacccgggccaactacctggccagcccccccctggtgattgcctatgccatcgccggcaccatcagaattgactttgagaaggagcccctgggcgtgaatgccaagggccagcaggtgttcctgaaggacatctggcccaccagagatgagatccaggccgtggagcggcagtatgtgattcctggcatgttcaaggaggtgtaccagaagattgagaccgtgaatgaatcctggaatgccctggccacccccagcgacaagctgttcttctggaacagcaagagcacctacatcaagagcccccccttctttgagaacctgaccctggacctgcagccccccaagagcatcgtggatgcctacgtgctgctgaacctgggggacagcgtgaccacagaccacatcagccctgctggcaacatcgccaggaacagccctgctgcccgctacctgaccaacagaggcctgaccccccgggagttcaacagctatggcagcagaagaggaaatgatgctgtgatggcccggggcacctttgccaacatccggctgctgaaccgcttcctgaacaagcaggccccccagaccatccacctgcccagcggggagatcctggatgtgtttgatgctgctgagcgctaccagcaggccggcctgcccctgattgtgctggccggcaaggagtatggagctggcagcagccgggactgggccgccaagggccccttcctgctgggcatcaaggctgtgctggccgagagctatgaaagaatccacaggagcaacctggtgggcatgggcgtcatccccctggagtacctgcccggggagaatgctgatgccctgggcctgaccggccaggagcgctacaccatcatcatccctgagaacctgaagccccagatgaaggtgcaggtgaagctggacaccgggaagaccttccaggccgtgatgagatttgacacagatgtggagctgacctacttcctgaatggaggcatcctgaactacatgatcaggaagatggccaagtag

SEQ ID NO: 142244 - DNA, 1305 bp, synthetic construct
  misc_feature 1..1305: note = Description of Artificial Sequence: Synthetic coding sequence
  source 1..1305: mol_type = other DNA
atgagcaacccctttgcccacctggccgagcccctggaccctgtgcagcccgggaagaagttcttcaacctgaacaagctggaggacagccgctatggccgcctgcccttcagcatccgggtgctgctggaggccgccatccggaactgtgatgagttcctggtgaagaagcaggacatcgagaacatcctgcactggaatgtgacccagcacaagaacatcgaggtgcccttcaagccagcccgggtcatcctgcaggacttcaccggggtgcctgctgtggtggactttgctgccatgagagatgctgtgaagaagctgggcggggaccctgagaagatcaaccctgtgtgcccagctgacctggtgattgaccacagcatccaggtggacttcaacagaagagctgacagcctgcagaagaaccaggacctggagtttgaaagaaaccgggagagatttgagttcctgaagtggggcagccaggccttccacaacatgaggatcatccccccaggcagcggcatcatccaccaggtgaacctggagtacctggcccgggtggtgtttgaccaggacggctactactacccagacagcctggtgggcacagacagccacaccaccatgattgatggcctgggcatcctgggctggggcgtgggcggcatcgaggccgaggccgtgatgctgggccagcccatctccatggtgctgccccaggtgattggctaccgcctgatgggcaagccccaccccctggtgaccagcacagacatcgtgctgaccatcaccaagcacctgcggcaggtgggcgtggtgggcaagtttgtggagttctttggacctggggtggcccagctgagcattgctgaccgggccaccatcgccaacatgtgcccagaatatggagccacagctgccttcttccctgtggatgaggtgtccatcacctacctggtgcagacaggaagagatgaggagaagctgaagtacatcaagaagtacctgcaggccgtgggcatgttccgggacttcaatgaccccagccaggaccctgacttcacccaggtggtggagctggacctgaagacagtggtgccctgctgcagcggccccaagaggccccaggacaaggtggccgtgtctgacatgaagaaggactttgagagctgcctgggcgccaagcagggcttcaagggcttccaggtggcccctgagcaccacaatgaccacaagaccttcatctatgacaacacagagttcaccctggcccacggctctgtggtgattgctgccctgtag

SEQ ID NO: 142245 - DNA, 2670 bp, synthetic construct; identical to SEQ ID NO: 142243
  misc_feature 1..2670: note = Description of Artificial Sequence: Synthetic coding sequence
  source 1..2670: mol_type = other DNA

SEQ ID NO: 142246 - DNA, 2346 bp, synthetic construct
  misc_feature 1..2346: note = Description of Artificial Sequence: Synthetic coding sequence
  source 1..2346: mol_type = other DNA
cagctggagcccaggtctgcccgggagcgggtgcccctgctgggcagcggcagccctgtggccggggccccaccctgcagcagaagaaacacctggcccagcgtcatcatgagcaacccctttgcccacctggccgagcccctggaccctgtgcagcccgggaagaagttcttcaacctgaacaagctggaggacagccgctatggccgcctgcccttcagcatccgggtgctgctggaggccgccatccggaactgtgatgagttcctggtgaagaagcaggacatcgagaacatcctgcactggaatgtgacccagcacaagaacatcgaggtgcccttcaagccagcccgggtcatcctgcaggacttcaccggggtgcctgctgtggtggactttgctgccatgagagatgctgtgaagaagctgggcggggaccctgagaagatcaaccctgtgtgcccagctgacctggtgattgaccacagcatccaggtggacttcaacagaagagctgacagcctgcagaagaaccaggacctggagtttgaaagaaaccgggagagatttgagttcctgaagtggggcagccaggccttccacaacatgaggatcatccccccaggcagcggcatcatccaccaggtgaacctggagtacctggcccgggtggtgtttgaccaggacggctactactacccagacagcctggtgggcacagacagccacaccaccatgattgatggcctgggcatcctgggctggggcgtgggcggcatcgaggccgaggccgtgatgctgggccagcccatctccatggtgctgccccaggtgattggctaccgcctgatgggcaagccccaccccctggtgaccagcacagacatcgtgctgaccatcaccaagcacctgcggcaggtgggcgtggtgggcaagtttgtggagttctttggacctggggtggcccagctgagcattgctgaccgggccaccatcgccaacatgtgcccagaatatggagccacagctgccttcttccctgtggatgaggtgtccatcacctacctggtgcagacaggaagagatgaggagaagctgaagtacatcaagaagtacctgcaggccgtgggcatgttccgggacttcaatgaccccagccaggaccctgacttcacccaggtggtggagctggacctgaagacagtggtgccctgctgcagcggccccaagaggccccaggacaaggtggccgtgtctgacatgaagaaggactttgagagctgcctgggcgccaagcagggcttcaagggcttccaggtggcccctgagcaccacaatgaccacaagaccttcatctatgacaacacagagttcaccctggcccacggctctgtggtgattgctgccatcaccagctgcaccaacaccagcaaccccagcgtgatgctgggcgccggcctgctggccaagaaggctgtggatgctggcctgaatgtgatgccctacatcaagaccagcctgagccctggcagcggcgtggtgacctactacctgcaggagagcggcgtgatgccctacctgagccagctgggctttgatgtggtgggctacggctgcatgacctgcatcggcaacagcggccccctgcctgagcctgtggtggaggccatcacccagggcgacctggtggccgtgggcgtgctgagcggcaacagaaactttgagggccgggtgcaccccaacacccgggccaactacctggccagcccccccctggtgattgcctatgccatcgccggcaccatcagaattgactttgagaaggagcccctgggcgtgaatgccaagggccagcaggtgttcctgaaggacatctggcccaccagagatgagatccaggccgtggagcggcagtatgtgattcctggcatgttcaaggaggtgtaccagaagattgagaccgtgaatgaatcctggaatgccctggccacccccagcgacaagctgttcttctggaacagcaagagcacctacatcaagagcccccccttctttgagaacctgaccctggacctgcagccccccaagagcatcgtggatgcctacgtgctgctgaacctgggggacagcgtgaccacagaccacatcagccctgctggcaacatcgccaggaacagccctgctgcccgctacctgaccaacagaggatttgagcggcagctgacccaggagaacacagacctgtgcctgagcccccccctgctgaccagcctgagcagccccctgaagctgtggggccagctgttctgccacggggagcagtgcctgggggacctggagaagtag

SEQ ID NO: 142247 - DNA, 2373 bp, synthetic construct
  misc_feature 1..2373: note = Description of Artificial Sequence: Synthetic coding sequence
  source 1..2373: mol_type = other DNA
atgagagatgctgtgaagaagctgggcggggaccctgagaagatcaaccctgtgtgcccagctgacctggtgattgaccacagcatccaggtggacttcaacagaagagctgacagcctgcagaagaaccaggacctggagtttgagaggaaccgggagagatttgagttcctgaagtggggcagccaggccttccacaacatgaggatcatccccccaggcagcggcatcatccaccaggtgaacctggagtacctggcccgggtggtgtttgaccaggacggctactactacccagacagcctggtgggcacagacagccacaccaccatgattgatggcctgggcatcctgggctggggcgtgggcggcattgaagctgaggccgtgatgctgggccagcccatctccatggtgctgccccaggtgattggctaccgcctgatgggcaagccccaccccctggtgaccagcacagacatcgtgctgaccatcaccaagcacctgcggcaggtgggcgtggtgggcaagtttgtggagttcttcggccctggggtggcccagctgagcattgctgaccgggccaccatcgccaacatgtgcccagaatatggagccacagctgccttcttccctgtggatgaggtgtccatcacctacctggtgcagacaggaagagatgaggagaagctgaagtacatcaagaagtacctgcaggccgtgggcatgttccgggacttcaatgaccccagccaggaccctgacttcacccaggtggtggagctggacctgaagacagtggtgccctgctgcagcggccccaagaggccccaggacaaggtggccgtgtctgacatgaagaaggactttgagagctgcctgggcgccaagcagggcttcaagggcttccaggtggcccctgagcaccacaatgaccacaagaccttcatctatgacaacacagagttcaccctggcccacggctctgtggtgattgctgccatcaccagctgcaccaacaccagcaaccccagcgtgatgctgggcgccggcctgctggccaagaaggctgtggatgctggcctgaatgtgatgccctacatcaagaccagcctgagccctggcagcggcgtggtgacctactacctgcaggagagcggcgtgatgccctacctgagccagctgggctttgatgtggtgggctacggctgcatgacctgcatcggcaacagcggccccctgcctgagcctgtggtggaggccatcacccagggcgacctggtggccgtgggcgtgctgagcggcaacagaaactttgagggccgggtgcaccccaacacccgggccaactacctggccagcccccccctggtgattgcctatgccatcgccggcaccatcagaattgactttgagaaggagcccctgggcgtgaatgccaagggccagcaggtgttcctgaaggacatctggcccaccagagatgagatccaggccgtggagcggcagtatgtgattcctggcatgttcaaggaggtgtaccagaagattgaaacagtgaatgaatcctggaatgccctggccacccccagcgacaagctgttcttctggaacagcaagagcacctacatcaagagcccccccttctttgagaacctgaccctggacctgcagccccccaagagcatcgtggatgcctacgtgctgctgaacctgggggacagcgtgaccacagaccacatcagccctgctggcaacatcgccaggaacagccctgctgcccgctacctgaccaacagaggcctgaccccccgggagttcaacagctatggcagcagaagaggaaatgatgctgtgatggcccggggcacctttgccaacatccggctgctgaaccgcttcctgaacaagcaggccccccagaccatccacctgcccagcggggagatcctggatgtgtttgatgctgctgagcgctaccagcaggccggcctgcccctcatcgtgctggccggcaaggagtatggagctggcagcagccgggactgggccgccaagggccccttcctgctgggcatcaaggctgtgctggccgagagctatgagcgcatccacaggagcaacctggtgggcatgggcgtcatccccctggagtacctgcctggagaaaatgctgatgccctgggcctgaccggccaggagcgctacaccatcatcatccctgagaacctgaagccccagatgaaggtgcaggtgaagctggacaccgggaagaccttccaggccgtgatgagatttgacacagatgtggagctgacctacttcctgaatggaggcatcctgaactacatgatcaggaagatggccaagtag

SEQ ID NO: 142248 - DNA, 333 bp, synthetic construct
  misc_feature 1..333: note = Description of Artificial Sequence: Synthetic coding sequence
  source 1..333: mol_type = other DNA
atggccaagcaccacccagacctgatcttctgcaggaagcaggccggcgtggccatcggccgcctgtgtgagaagtgtgatggaaaatgtgtgatctgtgacagctatgtgcggccctgcaccctggtgcgcatctgtgatgagtgcaactacggcagctaccagggccgctgcgtcatctgtggcggccctggggtgtctgatgcctactactgcaaggagtgcaccatccaggagaaggacagagatggctgccccaagatcgtgaacctgggcagcagcaagacagacctcttctatgaaaggaagaagtatggcttcaagaagaggtag

SEQ ID NO: 142249 - DNA, 2418 bp, synthetic construct
  misc_feature 1..2418: note = Description of Artificial Sequence: Synthetic coding sequence
  source 1..2418: mol_type = other DNA
atggccccctacagcctgctggtgacccggctgcagaaggccctgggcgtgcggcagtaccacgtggcctctgtgctgtgccagagggccaaggtggccatgagccactttgagcccaatgagtacatccactatgacctgctggagaagaacatcaacatcgtgaggaagaggctgaaccggcccctgaccctgtctgagaagatcgtgtatggccacctggatgatcctgccagccaggagattgaaagaggcaagagctacctgcggctgcggccagacagagtggccatgcaggatgccacagcccagatggccatgctgcagttcatcagcagcggcctgagcaaggtggccgtgcccagcaccatccactgtgaccacctgattgaggcccaggtgggcggggagaaggacctgcggcgggccaaggacatcaaccaggaggtgtacaacttcctggccacagctggggccaagtatggagtgggcttctggaagccaggcagcggcatcatccaccagatcatcctggagaactatgcctacccaggagtgctgctgattggaacagacagccacaccccaaatggaggcggcctgggcggcatctgcatcggcgtgggcggcgcagatgctgtggatgtgatggccggcatcccctgggagctgaagtgccccaaggtgattggagtgaagctgaccggcagcctgagcggctggagcagccccaaggatgtgatcctgaaggtggccggcatcctgactgtgaagggcggcactggagccatcgtggagtaccacggccctggggtggacagcatcagctgcaccggggaggagggcggccaggccacctggcccctgccctgtgccggcccagatggcagccctgtgggcagccgcagcggcatggccaccatctgcaacatgggcgctgagattggagccaccaccagcgtcttcccctacaaccacaggatgaagaagtacctgagcaagacaggccgggaggacatcgccaacctggctgatgagttcaaggaccacctggtgcctgaccccggctgccactatgaccagctgattgagatcaacctgtctgagctgaagccccacatcaatggccccttcaccccagacctggcccaccctgtggccgaggtgggcaaggtggccgagaaggagggctggcccctggacatccgggtgggcctgattggcagctgcaccaacagcagctatgaggacatgggccgctctgctgctgtggccaagcaggccctggcccacggcctgaagtgcaagagccagttcaccatcaccccaggcagcgagcagatccgggccaccatcgagagagatggctacgcccagatcctgcgggacctgggcggcatcgtgctggccaatgcctgtggcccctgcatcggccagtgggacaggaaggacatcaagaagggggagaagaacaccatcgtgaccagctacaacagaaacttcaccggcagaaatgatgccaaccctgagacccacgcctttgtgaccagccctgagatcgtgacagccctggccatcgccggcaccctgaagttcaaccctgagacagactacctgaccggcacagatggcaagaagttccggctggaggccccagatgctgatgagctgcccaagggggagtttgaccccggccaggacacctaccagcacccccccaaggacagcagcggccagcacgtggatgtgagccccaccagccagaggctgcagctgctggagccctttgacaagtgggatggcaaggacctggaggacctgcagatcctgatcaaggtgaagggcaagtgcaccacagaccacatctctgctgctggcccctggctgaagttccggggccacctggacaacatcagcaacaacctgctgattggagccatcaacattgaaaatggcaaggccaacagcgtgagaaatgctgtgacccaggagtttggacctgtgcctgacacagcccgctactacaagaagcacggcatccgctgggtggtgattggagatgagaactacggggagggcagcagccgggagcacgccgccctggagcccaggcacctgggcggccgggccatcatcaccaagagctttgcccgcatccacgagaccaacctgaagaagcagggcctgctgcccctgacctttgctgaccctgctgactacaacaagatccaccctgtggacaagctgaccatccagggcctgaaggacttcaccccaggcaagcccctgaagtgcatcatcaagcaccccaacggcacccaggagaccatcctgctgaaccacaccttcaatgagacccagatcgagtggttccgggccggcagcgccctgaacaggatgaaggagctgcagcagtag

SEQ ID NO: 142250 - DNA, 1506 bp, synthetic construct
  misc_feature 1..1506: note = Description of Artificial Sequence: Synthetic coding sequence
  source 1..1506: mol_type = other DNA
atggccaccatctgcaacatgggcgctgagattggagccaccaccagcgtcttcccctacaaccacaggatgaagaagtacctgagcaagacaggccgggaggacatcgccaacctggctgatgagttcaaggaccacctggtgcctgaccccggctgccactatgaccagctgattgagatcaacctgtctgagctgaagccccacatcaatggccccttcaccccagacctggcccaccctgtggccgaggtgggcaaggtggccgagaaggagggctggcccctggacatccgggtgggcctgattggcagctgcaccaacagcagctatgaggacatgggccgctctgctgctgtggccaagcaggccctggcccacggcctgaagtgcaagagccagttcaccatcaccccaggcagcgagcagatccgggccaccatcgagagagatggctacgcccagatcctgcgggacctgggcggcatcgtgctggccaatgcctgtggcccctgcatcggccagtgggacaggaaggacatcaagaagggggagaagaacaccatcgtgaccagctacaacagaaacttcaccggcagaaatgatgccaaccctgagacccacgcctttgtgaccagccctgagatcgtgacagccctggccatcgccggcaccctgaagttcaaccctgagacagactacctgaccggcacagatggcaagaagttccggctggaggccccagatgctgatgagctgcccaagggggagtttgaccccggccaggacacctaccagcacccccccaaggacagcagcggccagcacgtggatgtgagccccaccagccagaggctgcagctgctggagccctttgacaagtgggatggcaaggacctggaggacctgcagatcctgatcaaggtgaagggcaagtgcaccacagaccacatctctgctgctggcccctggctgaagttccggggccacctggacaacatcagcaacaacctgctgattggagccatcaacattgaaaatggcaaggccaacagcgtgagaaatgctgtgacccaggagtttggacctgtgcctgacacagcccgctactacaagaagcacggcatccgctgggtggtgattggagatgagaactacggggagggcagcagccgggagcacgccgccctggagcccaggcacctgggcggccgggccatcatcaccaagagctttgcccgcatccacgagaccaacctgaagaagcagggcctgctgcccctgacctttgctgaccctgctgactacaacaagatccaccctgtggacaagctgaccatccagggcctgaaggacttcaccccaggcaagcccctgaagtgcatcatcaagcaccccaacggcacccaggagaccatcctgctgaaccacaccttcaatgagacccagatcgagtggttccgggccggcagcgccctgaacaggatgaaggagctgcagcagtag

SEQ ID NO: 142251 - DNA, 2286 bp, synthetic construct
  misc_feature 1..2286: note = Description of Artificial Sequence: Synthetic coding sequence
  source 1..2286: mol_type = other DNA
atggccccctacagcctgctggtgacccggctgcagaaggccctgggcgtgcggcagtaccacgtggcctctgtgctgtgccagagggccaaggtggccatgagccactttgagcccaatgagtacatccactatgacctgctggagaagaacatcaacatcgtgaggaagaggctgaaccggcccctgaccctgtctgagaagatcgtgtatggccacctggatgatcctgccagccaggagattgaaagaggcaagagctacctgcggctgcggccagacagagtggccatggtggccgtgcccagcaccatccactgtgaccacctgattgaggcccaggtgggcggggagaaggacctgcggcgggccaaggacatcaaccaggaggtgtacaacttcctggccacagctggggccaagtatggagtgggcttctggaagccaggcagcggcatcatccaccagatcatcctggagaactatgcctacccaggagtgctgctgattggaacagacagccacacccccaacggcggcggcctgggcggcatctgcattggagtgggcggcgcagatgctgtggatgtgatggccggcatcccctgggagctgaagtgccccaaggtgattggagtgaagctgaccggcagcctgagcggctggagcagccccaaggatgtgatcctgaaggtggccggcatcctgactgtgaagggcggcaccggggccatcgtggagtaccacggccctggggtggacagcatcagctgcaccggcatggccaccatctgcaacatgggcgctgagattggagccaccaccagcgtcttcccctacaaccacaggatgaagaagtacctgagcaagacaggccgggaggacatcgccaacctggctgatgagttcaaggaccacctggtgcctgaccccggctgccactatgaccagctgattgagatcaacctgtctgagctgaagccccacatcaatggccccttcaccccagacctggcccaccctgtggccgaggtgggcaaggtggccgagaaggagggctggcccctggacatccgggtgggcctgattggcagctgcaccaacagcagctatgaggacatgggccgctctgctgctgtggccaagcaggccctggcccacggcctgaagtgcaagagccagttcaccatcaccccaggcagcgagcagatccgggccaccatcgagagagatggctacgcccagatcctgcgggacctgggcggcatcgtgctggccaatgcctgtggcccctgcatcggccagtgggacaggaaggacatcaagaagggggagaagaacaccatcgtgaccagctacaacagaaacttcaccggcagaaatgatgccaaccctgagacccacgcctttgtgaccagccctgagatcgtgacagccctggccatcgccggcaccctgaagttcaaccctgagacagactacctgaccggcacagatggcaagaagttccggctggaggccccagatgctgatgagctgcccaagggggagtttgaccccggccaggacacctaccagcacccccccaaggacagcagcggccagcacgtggatgtgagccccaccagccagaggctgcagctgctggagccctttgacaagtgggatggcaaggacctggaggacctgcagatcctgatcaaggtgaagggcaagtgcaccacagaccacatctctgctgctggcccctggctgaagttccggggccacctggacaacatcagcaacaacctgctgattggagccatcaacattgaaaatggcaaggccaacagcgtgagaaatgctgtgacccaggagtttggacctgtgcctgacacagcccgctactacaagaagcacggcatccgctgggtggtgattggagatgagaactacggggagggcagcagccgggagcacgccgccctggagcccaggcacctgggcggccgggccatcatcaccaagagctttgcccgcatccacgagaccaacctgaagaagcagggcctgctgcccctgacctttgctgaccctgctgactacaacaagatccaccctgtggacaagctgaccatccagggcctgaaggacttcaccccaggcaagcccctgaagtgcatcatcaagcaccccaacggcacccaggagaccatcctgctgaaccacaccttcaatgagacccagatcgagtggttccgggccggcagcgccctgaacaggatgaaggagctgcagcagtag

SEQ ID NO: 142252 - DNA, 756 bp, synthetic construct
  misc_feature 1..756: note = Description of Artificial Sequence: Synthetic coding sequence
  source 1..756: mol_type = other DNA
atggagctgagcgccatcggggagcaggtgtttgctgtggagagcatcaggaagaagagggtgaggaagggcaaggtggagtacctggtgaagtggaagggctggccacccaagtacagcacctgggagcctgaggagcacatcctggacccccggctggtgatggcctatgaggagaaggaggagcgggaccgggccagcggctacaggaagaggggccccaagcccaagaggctgctgctgcagaggctgtacagcatggacctgcggagcagccacaaggccaagggcaaggagaagctgtgcttcagcctgacctgccccctgggcagcggcagccctgagggcgtggtgaaggccggggcccctgagctggtggacaagggccccctggtgcccaccctgcccttccccctgaggaagcccaggaaggcccacaagtacctgcggctgagcaggaagaagtttcctccccggggccccaacctggagagccacagccacagaagagagctgttcctgcaggagcccccagccccagatgtgctgcaggccgccggggagtgggagcctgctgcccagcccccagaggaggaggctgatgctgacctggccgagggccccccaccctggaccccagccctgcccagcagcgaggtgacagtgacagacatcacagccaacagcatcaccgtgaccttccgggaggcccaggccgctgagggcttcttccgggacagaagtggcaagttctag

SEQ ID NO: 142253 - DNA, 633 bp, synthetic construct
  misc_feature 1..633: note = Description of Artificial Sequence: Synthetic coding sequence
  source 1..633: mol_type = other DNA
atgaaccgcttcctgctgctgatgagcctgtacctgctgggcagcgcccggggcaccagcagccagcccaatgagctgagcggcagcattgaccaccagacctctgtgcagcagctgcccggggagcctgctgccacagagcacgccgagggggagcacacagtgggggagcagcccagcggggagcagcccagcggggagcacctgagcggggagcagcccctgtctgagctggagagcggggagcagcccagtgatgagcagcccagcggggagcacggcagcggggagcagcccagcggggagcaggccagcggggagcagcccagcggggagcacgccagcggggagcaggccagcggggcccccatcagcagcaccagcacaggcaccatcctgaactgctacacctgtgcctacatgaatgaccagggcaagtgcctgcggggggagggcacctgcatcacccagaacagccagcagtgcatgctgaagaagatctttgagggcggcaagctgcagttcatggtgcagggctgtgagaacatgtgccccagcatgaacctcttcagccacggcaccaggatgcagatcatctgctgcaggaaccagagcttctgcaacaagatctag

SEQ ID NO: 142254 - DNA, 741 bp, synthetic construct
  misc_feature 1..741: note = Description of Artificial Sequence: Synthetic coding sequence
  source 1..741: mol_type = other DNA
atgaaccgcttcctgctgctgatgagcctgtacctgctgggcagcgcccggggcaccagcagccagcccaatgagctgagcggcagcattgaccaccagacctctgtgcagcagctgcccggggagttcttcagcctggagaaccccagtgatgctgaggccctgtatgagaccagcagcggcctgaacaccctgtctgagcacggcagcagcgagcacggcagcagcaagcacacagtggccgagcacaccagcggggagcacgccgagagcgagcacgccagcggggagcctgctgccacagaacatgctgagggggagcacacagtgggggagcagcccagcggggagcagcccagcggggagcacctgtctggagagcagcccctgtctgagctggagagcggggagcagcccagtgatgagcagcccagcggggagcacggcagcggggagcagcccagcggggagcaggccagcggggagcagcccagcggcaccatcctgaactgctacacctgtgcctacatgaatgaccagggcaagtgcctgcggggggagggcacctgcatcacccagaacagccagcagtgcatgctgaagaagatctttgagggcggcaagctgcagttcatggtgcagggctgtgagaacatgtgccccagcatgaacctcttcagccacggcaccaggatgcagatcatctgctgcaggaaccagagcttctgcaacaagatctag

SEQ ID NO: 142255 - DNA, 468 bp, synthetic construct
  misc_feature 1..468: note = Description of Artificial Sequence: Synthetic coding sequence
  source 1..468: mol_type = other DNA
atgaaccgcttcctgctgctgatgagcctgtacctgctgggcagcgcccggggcaccagcagccagcccaatgagctgagcggcagcattgaccaccagacctctgtgcagcagctgcccggggagcagcccagcggggagcagcccagcggggagcacctgtctggagagcagcccctgtctgagctggagagcggggagcagcccagtgatgagcagcccagcggggagcacggcagcggggagcagcccagcggggagcaggccagcggggagcagcccagcggggagcacgccagcggggagcaggccagcggggcccccatcagcagcaccagcactggaggcaagctgcagttcatggtgcagggctgtgagaacatgtgccccagcatgaacctcttcagccacggcaccaggatgcagatcatctgctgcaggaaccagagcttctgcaacaagatctag

SEQ ID NO: 142256 - DNA, 498 bp, synthetic construct
  misc_feature 1..498: note = Description of Artificial Sequence: Synthetic coding sequence
  source 1..498: mol_type = other DNA
atgaaccgcttcctgctgctgatgagcctgtacctgctgggcagcgcccggggcaccagcagccagcccaatgagctgagcggcagcattgaccaccagacctctgtgcagcagctgcccggggagcctgctgccacagagcacgccgagggggagcacacagtgggggagcagcccagcggggagcagcccagcggggagcacgccagcggggagcaggccagcggggcccccatcagcagcaccagcacaggcaccatcctgaactgctacacctgtgcctacatgaatgaccagggcaagtgcctgcggggggagggcacctgcatcacccagaacagccagcagtgcatgctgaagaagatctttgaaggaggcaagctgcagttcatggtgcagggctgtgagaacatgtgccccagcatgaacctcttcagccacggcaccaggatgcagatcatctgctgcaggaaccagagcttctgcaacaagatctag

SEQ ID NO: 142257 - DNA, 246 bp, synthetic construct
  misc_feature 1..246: note = Description of Artificial Sequence: Synthetic coding sequence
  source 1..246: mol_type = other DNA
atgaaccgcttcctgctgctgatgagcctgtacctgctgggcagcgcccggggcaccagcagccagcccaatgagctgagcggcagcattgaccaccagacctctgtgcagcagctgcccggcggcaagctgcagttcatggtgcagggctgtgagaacatgtgccccagcatgaacctcttcagccacggcaccaggatgcagatcatctgctgcaggaaccagagcttctgcaacaagatctag

SEQ ID NO: 142258 - DNA, 366 bp, synthetic construct
  misc_feature 1..366: note = Description of Artificial Sequence: Synthetic coding sequence
  source 1..366: mol_type = other DNA
atgaaccgcttcctgctgctgatgagcctgtacctgctgggcagcgcccggggcaccagcagccagcccaatgagctgagcggcagcattgaccaccagacctctgtgcagcagctgcccggcaccatcctgaactgctacacctgtgcctacatgaatgaccagggcaagtgcctgcggggggagggcacctgcatcacccagaacagccagcagtgcatgctgaagaagatctttgaaggaggcaagctgcagttcatggtgcagggctgtgagaacatgtgccccagcatgaacctcttcagccacggcaccaggatgcagatcatctgctgcaggaaccagagcttctgcaacaagatctag

SEQ ID NO: 142259 - DNA, 588 bp, synthetic construct
  misc_feature 1..588: note = Description of Artificial Sequence: Synthetic coding sequence
  source 1..588: mol_type = other DNA
atgaaccgcttcctgctgctgatgagcctgtacctgctgggcagcgcccggggcaccagcagccagcccaatgagctgagcggcagcattgaccaccagacctctgtgcagcagctgcccggggagcagcccagcggggagcagcccagcggggagcacctgtctggagagcagcccctgtctgagctggagagcggggagcagcccagtgatgagcagcccagcggggagcacggcagcggggagcagcccagcggggagcaggccagcggggagcagcccagcggggagcacgccagcggggagcaggccagcggggcccccatcagcagcaccagcacaggcaccatcctgaactgctacacctgtgcctacatgaatgaccagggcaagtgcctgcggggggagggcacctgcatcacccagaacagccagcagtgcatgctgaagaagatctttgaaggaggcaagctgcagttcatggtgcagggctgtgagaacatgtgccccagcatgaacctcttcagccacggcaccaggatgcagatcatctgctgcaggaaccagagcttctgcaacaagatctag

SEQ ID NO: 142260 - DNA, 741 bp, synthetic construct; identical to SEQ ID NO: 142254
  misc_feature 1..741: note = Description of Artificial Sequence: Synthetic coding sequence
  source 1..741: mol_type = other DNA

SEQ ID NO: 142261 - DNA, 513 bp, synthetic construct
  misc_feature 1..513: note = Description of Artificial Sequence: Synthetic coding sequence
  source 1..513: mol_type = other DNA
atgaaccgcttcctgctgctgatgagcctgtacctgctgggcagcgcccggggcaccagcagccagcccaatgagctgagcggcagcattgaccaccagacctctgtgcagcagctgcccggggagcagcccagtgatgagcagcccagcggggagcacggcagcggggagcagcccagcggggagcaggccagcggggagcagcccagcggggagcacgccagcggggagcaggccagcggggcccccatcagcagcaccagcacaggcaccatcctgaactgctacacctgtgcctacatgaatgaccagggcaagtgcctgcggggggagggcacctgcatcacccagaacagccagcagtgcatgctgaagaagatctttgagggcggcaagctgcagttcatggtgcagggctgtgagaacatgtgccccagcatgaacctcttcagccacggcaccaggatgcagatcatctgctgcaggaaccagagcttctgcaacaagatctag

SEQ ID NO: 142262 - DNA, 531 bp, synthetic construct
  misc_feature 1..531: note = Description of Artificial Sequence: Synthetic coding sequence
  source 1..531: mol_type = other DNA
atgaaccgcttcctgctgctgatgagcctgtacctgctgggcagcgcccggggcaccagcagccagcccaatgagctgagcggcagcattgaccaccagacctctgtgcagcagctgcccggggagcagcccagcggggagcagcccagcggggagcacctgtctggagagcagcccctgtctgagctggagagcggggagcagcccagtgatgagcagcccagcggggagcacggcagcggggagcagcccagcggggagcaggccagcggggagcagcccagcggcaccatcctgaactgctacacctgtgcctacatgaatgaccagggcaagtgcctgcggggggagggcacctgcatcacccagaacagccagcagtgcatgctgaagaagatctttgagggcggcaagctgcagttcatggtgcagggctgtgagaacatgtgccccagcatgaacctcttcagccacggcaccaggatgcagatcatctgctgcaggaaccagagcttctgcaacaagatctag

SEQ ID NO: 142263 - DNA, 588 bp, synthetic construct; identical to SEQ ID NO: 142259
  misc_feature 1..588: note = Description of Artificial Sequence: Synthetic coding sequence
  source 1..588: mol_type = other DNA

SEQ ID NO: 142264 - DNA, 633 bp, synthetic construct; identical to SEQ ID NO: 142253
  misc_feature 1..633: note = Description of Artificial Sequence: Synthetic coding sequence
  source 1..633: mol_type = other DNA

SEQ ID NO: 142265 - DNA, 798 bp, synthetic construct
  misc_feature 1..798: note = Description of Artificial Sequence: Synthetic coding sequence
  source 1..798: mol_type = other DNA
atgaaccgcttcctgctgctgatgagcctgtacctgctgggcagcgcccggggcaccagcagccagcccaatgagctgagcggcagcattgaccaccagacctctgtgcagcagctgcccggggagttcttcagcctggagaaccccagtgatgctgaggccctgtatgagaccagcagcggcctgaacaccctgtctgagcacggcagcagcgagcacggcagcagcaagcacacagtggccgagcacaccagcggggagcacgccgagagcgagcacgccagcggggagcctgctgccacagaacatgctgagggggagcacacagtgggggagcagcccagcggggagcagcccagcggggagcacctgtctggagagcagcccctgtctgagctggagagcggggagcagcccagtgatgagcagcccagcggggagcacggcagcggggagcagcccagcggggagcaggccagcggggagcagcccagcggggagcacgccagcggggagcaggccagcggggcccccatcagcagcaccagcacaggcaccatcctgaactgctacacctgtgcctacatgaatgaccagggcaagtgcctgcggggggagggcacctgcatcacccagaacagccagcagtgcatgctgaagaagatctttgaaggaggcaagctgcagttcatggtgcagggctgtgagaacatgtgccccagcatgaacctcttcagccacggcaccaggatgcagatcatctgctgcaggaaccagagcttctgcaacaagatctag

SEQ ID NO: 142266 - DNA, 1722 bp, synthetic construct
  misc_feature 1..1722: note = Description of Artificial Sequence: Synthetic coding sequence
  source 1..1722: mol_type = other DNA
atgtctgctgtgtcccagccccaggccgcccccagccccctggagaagagccccagcacagccatcctgtgcaacacctgtggaaatgtgtgcaagggggaggtgctgcgggtgcaggacaagtacttccacatcaagtgctttgtgtgcaaggcctgtggctgtgacctggccgagggcggcttctttgtgcggcagggcgagtacatctgcaccctggactaccagaggctgtatggcacccgctgcttcagctgtgaccagttcatcgagggggaggtggtgtctgccctgggcaagacctaccacccagactgctttgtgtgtgctgtgtgccgcctgcccttccccccaggggacagagtgaccttcaacgggaaggagtgcatgtgccagaagtgcagcctgcctgtgtctgtgggcagcagcgcccacctgagccagggcctgcggagctgtggcggctgcggcacagagatcaagaatggccaggccctggtggccctggacaagcactggcacctgggctgcttcaagtgcaagagctgtgggaagctgctgaatgctgagtacatcagcaaggatggcctgccctactgtgaggccgactaccacgccaagtttggcatccgctgtgacagctgtgagaagtacatcaccggccgggtgctggaggccggggagaagcactaccaccccagctgtgccctgtgtgtgcgctgtggccagatgtttgctgagggggaggagatgtacctgcagggcagcagcatctggcacccagcctgccggcaggccgccaggacagaggacaggaacaaggagaccaggaccagcagcgagagcatcatctctgtgcctgccagcagcaccagcggcagccccagcagggtcatctatgccaagctgggcggggagatcctggactacagagacctggccgccctgcccaagagcaaggccatctatgacatcgacagaccagacatgatctcctacagcccctacatcagccacagcgctggggaccggcagagctatggagagggggaccaggatgacaggagctacaagcagtgcaggaccagcagccccagcagcacaggctctgtgtccctgggccgctacacccccaccagccgcagcccccagcactacagcaggcctggcagcgagagcggccgcagcacccccagcctgtctgtgctgagtgacagcaagcccccacccagcacctaccagcaggcccccaggcacttccacgtgcctgacacaggagtgaaggacaacatctacaggaagccacccatctaccggcagcacgccgcccggcggagtgatggagaagatggcagcctggaccaggacaacaggaagcagaagagctcctggctgatgctgaagggagatgctgacaccaggaccaacagcccagacctggacacccagagcctgagccacagcagcggcacagaccgggaccccctgcagaggatggccggggacagcttccacagccgggagaagatctacccctatgacagcctgattgtgaccaaccgcatccgggtgaagctgcccaaggatgtggacaggacccggctggagcggcacctgagccctgaggagttccaggaggtgtttggcatgagcattgaggagtttgaccggctggccctgtggaagagaaatgacctgaagaagaaggccctgctcttctag

SEQ ID NO: 142267 - DNA, 1041 bp, synthetic construct
  misc_feature 1..1041: note = Description of Artificial Sequence: Synthetic coding sequence
  source 1..1041: mol_type = other DNA
atgtttgctgagggggaggagatgtacctgcagggcagcagcatctggcacccagcctgccggcaggccgccaggacagaagatagaaacaaggagaccaggaccagcagcgagagcatcatctctgtgcctgccagcagcaccagcggcagccccagcagggtcatctatgccaagctgggcggggagatcctggactacagagacctggccgccctgcccaagagcaaggccatctatgacatcgacagaccagacatgatctcctacagcccctacatcagccacagcgctggggaccggcagagctatggagagagcccccagctgctgagccccacccccacagaaggagaccaggatgacaggagctacaagcagtgcaggaccagcagccccagcagcacaggctctgtgtccctgggccgctacacccccaccagccgcagcccccagcactacagcaggccagacacaggagtgaaggacaacatctacaggaagccacccatctaccggcagcacgccgcccggcggagtgatggagaagatggcagcctggaccaggacaacaggaagcagaagagctcctggctgatgctgaagggagatgctgacaccaggaccaacagcccagacctggacacccagagcctgagccacagcagcggcacagaccgggaccccctgcagaggatggccggggacagcttccacagccgcttcccctacagcaagagtgaccccctgcccggccacggcaagaatggcctggaccagagaaatgccaacctggccccctgtggggctgaccctgatgcctcctggggcatgagggagtacaagatctacccctatgacagcctcatcgtgaccaaccgcatccgggtgaagctgcccaaggatgtggacaggacccggctggagcggcacctgagccctgaggagttccaggaggtgtttggcatgagcattgaggagtttgaccggctggccctgtggaagagaaatgacctgaagaagaaggccctgctcttctag

SEQ ID NO: 142268 - DNA, 1836 bp, synthetic construct
  misc_feature 1..1836: note = Description of Artificial Sequence: Synthetic coding sequence
  source 1..1836: mol_type = other DNA
atgtctgctgtgtcccagccccaggccgcccccagccccctggagaagagccccagcacagccatcctgtgcaacacctgtggaaatgtgtgcaagggggaggtgctgcgggtgcaggacaagtacttccacatcaagtgctttgtgtgcaaggcctgtggctgtgacctggccgagggcggcttctttgtgcggcagggcgagtacatctgcaccctggactaccagaggctgtatggcacccgctgcttcagctgtgaccagttcatcgagggggaggtggtgtctgccctgggcaagacctaccacccagactgctttgtgtgtgctgtgtgccgcctgcccttccccccaggggacagagtgaccttcaacgggaaggagtgcatgtgccagaagtgcagcctgcctgtgtctgtgggcagcagcgcccacctgagccagggcctgcggagctgtggcggctgcggcacagagatcaagaatggccaggccctggtggccctggacaagcactggcacctgggctgcttcaagtgcaagagctgtgggaagctgctgaatgctgagtacatcagcaaggatggcctgccctactgtgaggccgactaccacgccaagtttggcatccgctgtgacagctgtgagaagtacatcaccggccgggtgctggaggccggggagaagcactaccaccccagctgtgccctgtgtgtgcgctgtggccagatgtttgctgagggggaggagatgtacctgcagggcagcagcatctggcacccagcctgccggcaggccgccaggacagaggacaggaacaaggagaccaggaccagcagcgagagcatcatctctgtgcctgccagcagcaccagcggcagccccagcagggtcatctatgccaagctgggcggggagatcctggactacagagacctggccgccctgcccaagagcaaggccatctatgacatcgacagaccagacatgatctcctacagcccctacatcagccacagcgctggggaccggcagagctatggagagggggaccaggatgacaggagctacaagcagtgcaggaccagcagccccagcagcacaggctctgtgtccctgggccgctacacccccaccagccgcagcccccagcactacagcaggcctggcagcgagagcggccgcagcacccccagcctgtctgtgctgagtgacagcaagcccccacccagcacctaccagcaggcccccaggcacttccacgtgcctgacacaggagtgaaggacaacatctacaggaagccacccatctaccggcagcacgccgcccggcggagtgatggagaagatggcagcctggaccaggacaacaggaagaagagctcctggctgatgctgaagggagatgctgacaccaggaccaacagcccagacctggacacccagagcctgagccacagcagcggcacagaccgggaccccctgcagaggatggccggggacagcttccacagccgcttcccctacagcaagagtgaccccctgcccggccacggcaagaatggcctggaccagagaaatgccaacctggccccctgtggggctgaccctgatgcctcctggggcatgagggagtacaagatctacccctatgacagcctgattgtgaccaaccgcatccgggtgaagctgcccaaggatgtggacaggacccggctggagcggcacctgagccctgaggagttccaggaggtgtttggcatgagcattgaggagtttgaccggctggccctgtggaagagaaatgacctgaagaagaaggccctgctcttctag

SEQ ID NO: 142269 - DNA, 1719 bp, synthetic construct
  misc_feature 1..1719: note = Description of Artificial Sequence: Synthetic coding sequence
  source 1..1719: mol_type = other DNA
atgtctgctgtgtcccagccccaggccgcccccagccccctggagaagagccccagcacagccatcctgtgcaacacctgtggaaatgtgtgcaagggggaggtgctgcgggtgcaggacaagtacttccacatcaagtgctttgtgtgcaaggcctgtggctgtgacctggccgagggcggcttctttgtgcggcagggcgagtacatctgcaccctggactaccagaggctgtatggcacccgctgcttcagctgtgaccagttcatcgagggggaggtggtgtctgccctgggcaagacctaccacccagactgctttgtgtgtgctgtgtgccgcctgcccttccccccaggggacagagtgaccttcaacgggaaggagtgcatgtgccagaagtgcagcctgcctgtgtctgtgggcagcagcgcccacctgagccagggcctgcggagctgtggcggctgcggcacagagatcaagaatggccaggccctggtggccctggacaagcactggcacctgggctgcttcaagtgcaagagctgtgggaagctgctgaatgctgagtacatcagcaaggatggcctgccctactgtgaggccgactaccacgccaagtttggcatccgctgtgacagctgtgagaagtacatcaccggccgggtgctggaggccggggagaagcactaccaccccagctgtgccctgtgtgtgcgctgtggccagatgtttgctgagggggaggagatgtacctgcagggcagcagcatctggcacccagcctgccggcaggccgccaggacagaggacaggaacaaggagaccaggaccagcagcgagagcatcatctctgtgcctgccagcagcaccagcggcagccccagcagggtcatctatgccaagctgggcggggagatcctggactacagagacctggccgccctgcccaagagcaaggccatctatgacatcgacagaccagacatgatctcctacagcccctacatcagccacagcgctggggaccggcagagctatggagagggggaccaggatgacaggagctacaagcagtgcaggaccagcagccccagcagcacaggctctgtgtccctgggccgctacacccccaccagccgcagcccccagcactacagcaggcctggcagcgagagcggccgcagcacccccagcctgtctgtgctgagtgacagcaagcccccacccagcacctaccagcaggcccccaggcacttccacgtgcctgacacaggagtgaaggacaacatctacaggaagccacccatctaccggcagcacgccgcccggcggagtgatggagaagatggcagcctggaccaggacaacaggaagaagagctcctggctgatgctgaagggagatgctgacaccaggaccaacagcccagacctggacacccagagcctgagccacagcagcggcacagaccgggaccccctgcagaggatggccggggacagcttccacagccagtacaagatctacccctatgacagcctcatcgtgaccaaccgcatccgggtgaagctgcccaaggatgtggacaggacccggctggagcggcacctgagccctgaggagttccaggaggtgtttggcatgagcattgaggagtttgaccggctggccctgtggaagagaaatgacctgaagaagaaggccctgctcttctag

SEQ ID NO: 142270 - DNA, 1596 bp, synthetic construct
  misc_feature 1..1596: note = Description of Artificial Sequence: Synthetic coding sequence
  source 1..1596: mol_type = other DNA
atgtctgctgtgtcccagccccaggccgcccccagccccctggagaagagccccagcacagccatcctgtgcaacacctgtggaaatgtgtgcaagggggaggtgctgcgggtgcaggacaagtacttccacatcaagtgctttgtgtgcaaggcctgtggctgtgacctggccgagggcggcttctttgtgcggcagggcgagtacatctgcaccctggactaccagaggctgtatggcacccgctgcttcagctgtgaccagttcatcgagggggaggtggtgtctgccctgggcaagacctaccacccagactgctttgtgtgtgctgtgtgccgcctgcccttccccccaggggacagagtgaccttcaacgggaaggagtgcatgtgccagaagtgcagcctgcctgtgtctgtgggcagcagcgcccacctgagccagggcctgcggagctgtggcggctgcggcacagagatcaagaatggccaggccctggtggccctggacaagcactggcacctgggctgcttcaagtgcaagagctgtgggaagctgctgaatgctgagtacatcagcaaggatggcctgccctactgtgaggccgactaccacgccaagtttggcatccgctgtgacagctgtgagaagtacatcaccggccgggtgctggaggccggggagaagcactaccaccccagctgtgccctgtgtgtgcgctgtggccagatgtttgctgagggggaggagatgtacctgcagggcagcagcatctggcacccagcctgccggcaggccgccaggacagaggacaggaacaaggagaccaggaccagcagcgagagcatcatctctgtgcctgccagcagcaccagcggcagccccagcagggtcatctatgccaagctgggcggggagatcctggactacagagacctggccgccctgcccaagagcaaggccatctatgacatcgacagaccagacatgatctcctacagcccctacatcagccacagcgctggggaccggcagagctatggagagagcccccagctgctgagccccacccccacagaaggagaccaggatgacaggagctacaagcagtgcaggaccagcagccccagcagcactggatctgtgtccctgggccgctacacccccaccagccgcagcccccagcactacagcaggcctgctgccaggagaagtgatggagaagatggcagcctggaccaggacaacaggaagaagagctcctggctgatgctgaagggagatgctgacaccaggaccaacagcccagacctggacacccagagcctgagccacagcagcggcacagaccgggaccccctgcagaggatggccggggacagcttccacagccagtacaagatctacccctatgacagcctgattgtgaccaaccgcatccgggtgaagctgcccaaggatgtggacaggacccggctggagcggcacctgagccctgaggagttccaggaggtgtttggcatgagcattgaggagtttgaccggctggccctgtggaagagaaatgacctgaagaagaaggccctgctcttctag

SEQ ID NO: 142271 - DNA, 1935 bp, synthetic construct
  misc_feature 1..1935: note = Description of Artificial Sequence: Synthetic coding sequence
  source 1..1935: mol_type = other DNA
atgtctgctgtgtcccagccccaggccgcccccagccccctggagaagagccccagcacagccatcctgtgcaacacctgtggaaatgtgtgcaagggggaggtgctgcgggtgcaggacaagtacttccacatcaagtgctttgtgtgcaaggcctgtggctgtgacctggccgagggcggcttctttgtgcggcagggcgagtacatctgcaccctggactaccagaggctgtatggcacccgctgcttcagctgtgaccagttcatcgagggggaggtggtgtctgccctgggcaagacctaccacccagactgctttgtgtgtgctgtgtgccgcctgcccttccccccaggggacagagtgaccttcaacgggaaggagtgcatgtgccagaagtgcagcctgcctgtgtctgtgggcagcagcgcccacctgagccagggcctgcggagctgtggcggctgcggcacagagatcaagaatggccaggccctggtggccctggacaagcactggcacctgggctgcttcaagtgcaagagctgtgggaagctgctgaatgctgagtacatcagcaaggatggcctgccctactgtgaggccgactaccacgccaagtttggcatccgctgtgacagctgtgagaagtacatcaccggccgggtgctggaggccggggagaagcactaccaccccagctgtgccctgtgtgtgcgctgtggccagatgtttgctgagggggaggagatgtacctgcagggcagcagcatctggcacccagcctgccggcaggccgccaggacagaggacaggaacaaggagaccaggaccagcagcgagagcatcatctctgtgcctgccagcagcaccagcggcagccccagcagggtcatctatgccaagctgggcggggagatcctggactacagagacctggccgccctgcccaagagcaaggccatctatgacatcgacagaccagacatgatctcctacagcccctacatcagccacagcgctggggaccggcagagctatggagagggggaccaggatgacaggagctacaagcagtgcaggaccagcagccccagcagcacaggctctgtgtccctgggccgctacacccccaccagccgcagcccccagcactacagcaggcctgctggcaccgtgtctgtgggcaccagcagctgcctgagcctgagccagcaccccagccccacctctgtgttccgccaccactacatcccctacttccggggcagcgagagcggccgcagcacccccagcctgtctgtgctgagtgacagcaagcccccacctccacccaccagccgccacctggccacccacgtgcctgacacaggagtgaaggacaacatctacaggaagccacccatctaccggcagcacgccgcccggcggagtgatggagaagatggcagcctggaccaggacaacaggaagcagaagagctcctggctgatgctgaagggagatgctgacaccaggaccaacagcccagacctggacacccagagcctgagccacagcagcggcacagaccgggaccccctgcagaggatggccggggacagcttccacagccgcttcccctacagcaagagtgaccccctgcccggccacggcaagaatggcctggaccagagaaatgccaacctggccccctgtggggctgaccctgatgcctcctggggcatgagggagtacaagatctacccctatgacagcctcatcgtgaccaaccgcatccgggtgaagctgcccaaggatgtggacaggacccggctggagcggcacctgagccctgaggagttccaggaggtgtttggcatgagcattgaggagtttgaccggctggccctgtggaagagaaatgacctgaagaagaaggccctgctcttctag

SEQ ID NO: 142272 - DNA, 1566 bp, synthetic construct
  misc_feature 1..1566: note = Description of Artificial Sequence: Synthetic coding sequence
  source 1..1566: mol_type = other DNA
atgtctgctgtgtcccagccccaggccgcccccagccccctggagaagagccccagcacagccatcctgtgcaacacctgtggaaatgtgtgcaagggggaggtgctgcgggtgcaggacaagtacttccacatcaagtgctttgtgtgcaaggcctgtggctgtgacctggccgagggcggcttctttgtgcggcagggcgagtacatctgcaccctggactaccagaggctgtatggcacccgctgcttcagctgtgaccagttcatcgagggggaggtggtgtctgccctgggcaagacctaccacccagactgctttgtgtgtgctgtgtgccgcctgcccttccccccaggggacagagtgaccttcaacgggaaggagtgcatgtgccagaagtgcagcctgcctgtgtctgtgggcagcagcgcccacctgagccagggcctgcggagctgtggcggctgcggcacagagatcaagaatggccaggccctggtggccctggacaagcactggcacctgggctgcttcaagtgcaagagctgtgggaagctgctgaatgctgagtacatcagcaaggatggcctgccctactgtgaggccgactaccacgccaagtttggcatccgctgtgacagctgtgagaagtacatcaccggccgggtgctggaggccggggagaagcactaccaccccagctgtgccctgtgtgtgcgctgtggccagatgtttgctgagggggaggagatgtacctgcagggcagcagcatctggcacccagcctgccggcaggccgccaggacagaggacaggaacaaggagaccaggaccagcagcgagagcatcatctctgtgcctgccagcagcaccagcggcagccccagcagggtcatctatgccaagctgggcggggagatcctggactacagagacctggccgccctgcccaagagcaaggccatctatgacatcgacagaccagacatgatctcctacagcccctacatcagccacagcgctggggaccggcagagctatggagagggggaccaggatgacaggagctacaagcagtgcaggaccagcagccccagcagcacaggctctgtgtccctgggccgctacacccccaccagccgcagcccccagcactacagcaggcctgctgcccggcggagtgatggagaagatggcagcctggaccaggacaacaggaagcagaagagctcctggctgatgctgaagggagatgctgacaccaggaccaacagcccagacctggacacccagagcctgagccacagcagcggcacagaccgggaccccctgcagaggatggccggggacagcttccacagccagtacaagatctacccctatgacagcctgattgtgaccaaccgcatccgggtgaagctgcccaaggatgtggacaggacccggctggagcggcacctgagccctgaggagttccaggaggtgtttggcatgagcattgaggagtttgaccggctggccctgtggaagagaaatgacctgaagaagaaggccctgctcttctag

SEQ ID NO: 142273 - DNA, 1413 bp, synthetic construct
  misc_feature 1..1413: note = Description of Artificial Sequence: Synthetic coding sequence
  source 1..1413: mol_type = other DNA
atgtctgctgtgtcccagccccaggccgcccccagccccctggagaagagccccagcacagccatcctgtgcaacacctgtggaaatgtgtgcaagggggaggtgctgcgggtgcaggacaagtacttccacatcaagtgctttgtgtgcaaggcctgtggctgtgacctggccgagggcggcttctttgtgcggcagggcgagtacatctgcaccctggactaccagaggctgtatggcacccgctgcttcagctgtgaccagttcatcgagggggaggtggtgtctgccctgggcaagacctaccacccagactgctttgtgtgtgctgtgtgccgcctgcccttccccccaggggacagagtgaccttcaacgggaaggagtgcatgtgccagaagtgcagcctgcctgtgtctgtgggcagcagcgcccacctgagccagggcctgcggagctgtggcggctgcggcacagagatcaagaatggccaggccctggtggccctggacaagcactggcacctgggctgcttcaagtgcaagagctgtgggaagctgctgaatgctgagtacatcagcaaggatggcctgccctactgtgaggccgactaccacgccaagtttggcatccgctgtgacagctgtgagaagtacatcaccggccgggtgctggaggccggggagaagcactaccaccccagctgtgccctgtgtgtgcgctgtggccagatgtttgctgagggggaggagatgtacctgcagggcagcagcatctggcacccagcctgccggcaggccgccaggacagaggacaggaacaaggagaccaggaccagcagcgagagcatcatctctgtgcctgccagcagcaccagcggcagccccagcagggtcatctatgccaagctgggcggggagatcctggactacagagacctggccgccctgcccaagagcaaggccatctatgacatcgacagaccagacatgatctcctacagcccctacatcagccacagcgctggggaccggcagagctatggagagagcccccagctgctgagccccacccccacagaaggagaccaggatgacaggagctacaagcagtgcaggaccagcagccccagcagcactggatctgtgtccctgggccgctacacccccaccagccgcagcccccagcactacagcaggcctgctgccaggagaagtgatggagaagatggcagcctggaccaggacaacaggaagcagaagagctcctggctgatgctgaagggagatgctgacaccaggaccaacagcccagacctggacacccagagcctgagccacagcagcggcacagaccgggaccccctgcagaggatggccggggacagcttccacagccgggagtggttcttctag

SEQ ID NO: 142274 - DNA, 1938 bp, synthetic construct
  misc_feature 1..1938: note = Description of Artificial Sequence: Synthetic coding sequence
  source 1..1938: mol_type = other DNA
atgtctgctgtgtcccagccccaggccgcccccagccccctggagaagagccccagcacagccatcctgtgcaacacctgtggaaatgtgtgcaagggggaggtgctgcgggtgcaggacaagtacttccacatcaagtgctttgtgtgcaaggcctgtggctgtgacctggccgagggcggcttctttgtgcggcagggcgagtacatctgcaccctggactaccagaggctgtatggcacccgctgcttcagctgtgaccagttcatcgagggggaggtggtgtctgccctgggcaagacctaccacccagactgctttgtgtgtgctgtgtgccgcctgcccttccccccaggggacagagtgaccttcaacgggaaggagtgcatgtgccagaagtgcagcctgcctgtgtctgtgggcagcagcgcccacctgagccagggcctgcggagctgtggcggctgcggcacagagatcaagaatggccaggccctggtggccctggacaagcactggcacctgggctgcttcaagtgcaagagctgtgggaagctgctgaatgctgagtacatcagcaaggatggcctgccctactgtgaggccgactaccacgccaagtttggcatccgctgtgacagctgtgagaagtacatcaccggccgggtgctggaggccggggagaagcactaccaccccagctgtgccctgtgtgtgcgctgtggccagatgtttgctgagggggaggagatgtacctgcagggcagcagcatctggcacccagcctgccggcaggccgccaggacagaggacaggaacaaggagaccaggaccagcagcgagagcatcatctctgtgcctgccagcagcaccagcggcagccccagcagggtcatctatgccaagctgggcggggagatcctggactacagagacctggccgccctgcccaagagcaaggccatctatgacatcgacagaccagacatgatctcctacagcccctacatcagccacagcgctggggaccggcagagctatggagagggggaccaggatgacaggagctacaagcagtgcaggaccagcagccccagcagcacaggctctgtgtccctgggccgctacacccccaccagccgcagcccccagcactacagcaggcctgctggcaccgtgtctgtgggcaccagcagctgcctgagcctgagccagcaccccagccccacctctgtgttccgccaccactacatcccctacttccggggcagcgagagcggccgcagcacccccagcctgtctgtgctgagtgacagcaagcccccacccagcacctaccagcaggcccccaggcacttccacgtgcctgacaccggggtgaaggacaacatctacaggaagccacccatctaccggcagcacgccgccaggagaagtgatggagaagatggcagcctggaccaggacaacaggaagcagaagagctcctggctgatgctgaagggagatgctgacaccaggaccaacagcccagacctggacacccagagcctgagccacagcagcggcacagaccgggaccccctgcagaggatggccggggacagcttccacagccgcttcccctacagcaagagtgaccccctgcccggccacggcaagaatggcctggaccagagaaatgccaacctggccccctgtggggctgaccctgatgcctcctggggcatgagggagtacaagatctacccctatgacagcctgattgtgaccaaccgcatccgggtgaagctgcccaaggatgtggacaggacccggctggagcggcacctgagccctgaggagttccaggaggtgtttggcatgagcattgaggagtttgaccggctggccctgtggaagagaaatgacctgaagaagaaggccctgctcttctag

SEQ ID NO: 142275 - DNA, 1680 bp, synthetic construct
  misc_feature 1..1680: note = Description of Artificial Sequence: Synthetic coding sequence
  source 1..1680: mol_type = other DNA
atgtctgctgtgtcccagccccaggccgcccccagccccctggagaagagccccagcacagccatcctgtgcaacacctgtggaaatgtgtgcaagggggaggtgctgcgggtgcaggacaagtacttccacatcaagtgctttgtgtgcaaggcctgtggctgtgacctggccgagggcggcttctttgtgcggcagggcgagtacatctgcaccctggactaccagaggctgtatggcacccgctgcttcagctgtgaccagttcatcgagggggaggtggtgtctgccctgggcaagacctaccacccagactgctttgtgtgtgctgtgtgccgcctgcccttccccccaggggacagagtgaccttcaacgggaaggagtgcatgtgccagaagtgcagcctgcctgtgtctgtgggcagcagcgcccacctgagccagggcctgcggagctgtggcggctgcggcacagagatcaagaatggccaggccctggtggccctggacaagcactggcacctgggctgcttcaagtgcaagagctgtgggaagctgctgaatgctgagtacatcagcaaggatggcctgccctactgtgaggccgactaccacgccaagtttggcatccgctgtgacagctgtgagaagtacatcaccggccgggtgctggaggccggggagaagcactaccaccccagctgtgccctgtgtgtgcgctgtggccagatgtttgctgagggggaggagatgtacctgcagggcagcagcatctggcacccagcctgccggcaggccgccaggacagaggacaggaacaaggagaccaggaccagcagcgagagcatcatctctgtgcctgccagcagcaccagcggcagccccagcagggtcatctatgccaagctgggcggggagatcctggactacagagacctggccgccctgcccaagagcaaggccatctatgacatcgacagaccagacatgatctcctacagcccctacatcagccacagcgctggggaccggcagagctatggagagggggaccaggatgacaggagctacaagcagtgcaggaccagcagccccagcagcacaggctctgtgtccctgggccgctacacccccaccagccgcagcccccagcactacagcaggcctgctgcccggcggagtgatggagaagatggcagcctggaccaggacaacaggaagaagagctcctggctgatgctgaagggagatgctgacaccaggaccaacagcccagacctggacacccagagcctgagccacagcagcggcacagaccgggaccccctgcagaggatggccggggacagcttccacagccgcttcccctacagcaagagtgaccccctgcccggccacggcaagaatggcctggaccagagaaatgccaacctggccccctgtggggctgaccctgatgcctcctggggcatgagggagtacaagatctacccctatgacagcctgattgtgaccaaccgcatccgggtgaagctgcccaaggatgtggacaggacccggctggagcggcacctgagccctgaggagttccaggaggtgtttggcatgagcattgaggagtttgaccggctggccctgtggaagagaaatgacctgaagaagaaggccctgctcttctag

SEQ ID NO: 142276 - DNA, 1041 bp, synthetic construct; identical to SEQ ID NO: 142267
  misc_feature 1..1041: note = Description of Artificial Sequence: Synthetic coding sequence
  source 1..1041: mol_type = other DNA

SEQ ID NO: 142277 - DNA, 1716 bp, synthetic construct
  misc_feature 1..1716: note = Description of Artificial Sequence: Synthetic coding sequence
  source 1..1716: mol_type = other DNA
atgtctgctgtgtcccagccccaggccgcccccagccccctggagaagagccccagcacagccatcctgtgcaacacctgtggaaatgtgtgcaagggggaggtgctgcgggtgcaggacaagtacttccacatcaagtgctttgtgtgcaaggcctgtggctgtgacctggccgagggcggcttctttgtgcggcagggcgagtacatctgcaccctggactaccagaggctgtatggcacccgctgcttcagctgtgaccagttcatcgagggggaggtggtgtctgccctgggcaagacctaccacccagactgctttgtgtgtgctgtgtgccgcctgcccttccccccaggggacagagtgaccttcaacgggaaggagtgcatgtgccagaagtgcagcctgcctgtgtctgtgggcagcagcgcccacctgagccagggcctgcggagctgtggcggctgcggcacagagatcaagaatggccaggccctggtggccctggacaagcactggcacctgggctgcttcaagtgcaagagctgtgggaagctgctgaatgctgagtacatcagcaaggatggcctgccctactgtgaggccgactaccacgccaagtttggcatccgctgtgacagctgtgagaagtacatcaccggccgggtgctggaggccggggagaagcactaccaccccagctgtgccctgtgtgtgcgctgtggccagatgtttgctgagggggaggagatgtacctgcagggcagcagcatctggcacccagcctgccggcaggccgccaggacagaggacaggaacaaggagaccaggaccagcagcgagagcatcatctctgtgcctgccagcagcaccagcggcagccccagcagggtcatctatgccaagctgggcggggagatcctggactacagagacctggccgccctgcccaagagcaaggccatctatgacatcgacagaccagacatgatctcctacagcccctacatcagccacagcgctggggaccggcagagctatggagagggggaccaggatgacaggagctacaagcagtgcaggaccagcagccccagcagcacaggctctgtgtccctgggccgctacacccccaccagccgcagcccccagcactacagcaggcctggcagcgagagcggccgcagcacccccagcctgtctgtgctgagtgacagcaagcccccacccagcacctaccagcaggcccccaggcacttccacgtgcctgacacaggagtgaaggacaacatctacaggaagccacccatctaccggcagcacgccgcccggcggagtgatggagaagatggcagcctggaccaggacaacaggaagaagagctcctggctgatgctgaagggagatgctgacaccaggaccaacagcccagacctggacacccagagcctgagccacagcagcggcacagaccgggaccccctgcagaggatggccggggacagcttccacagccagcagatctacccctatgacagcctgattgtgaccaaccgcatccgggtgaagctgcccaaggatgtggacaggacccggctggagcggcacctgagccctgaggagttccaggaggtgtttggcatgagcattgaggagtttgaccggctggccctgtggaagagaaatgacctgaagaagaaggccctgctcttctag

SEQ ID NO: 142278 - DNA, 1596 bp, synthetic construct
  misc_feature 1..1596: note = Description of Artificial Sequence: Synthetic coding sequence
  source 1..1596: mol_type = other DNA
atgtctgctgtgtcccagccccaggccgcccccagccccctggagaagagccccagcacagccatcctgtgcaacacctgtggaaatgtgtgcaagggggaggtgctgcgggtgcaggacaagtacttccacatcaagtgctttgtgtgcaaggcctgtggctgtgacctggccgagggcggcttctttgtgcggcagggcgagtacatctgcaccctggactaccagaggctgtatggcacccgctgcttcagctgtgaccagttcatcgagggggaggtggtgtctgccctgggcaagacctaccacccagactgctttgtgtgtgctgtgtgccgcctgcccttccccccaggggacagagtgaccttcaacgggaaggagtgcatgtgccagaagtgcagcctgcctgtgtctgtgggcagcagcgcccacctgagccagggcctgcggagctgtggcggctgcggcacagagatcaagaatggccaggccctggtggccctggacaagcactggcacctgggctgcttcaagtgcaagagctgtgggaagctgctgaatgctgagtacatcagcaaggatggcctgccctactgtgaggccgactaccacgccaagtttggcatccgctgtgacagctgtgagaagtacatcaccggccgggtgctggaggccggggagaagcactaccaccccagctgtgccctgtgtgtgcgctgtggccagatgtttgctgagggggaggagatgtacctgcagggcagcagcatctggcacccagcctgccggcaggccgccaggacagaggacaggaacaaggagaccaggaccagcagcgagagcatcatctctgtgcctgccagcagcaccagcggcagccccagcagggtcatctatgccaagctgggcggggagatcctggactacagagacctggccgccctgcccaagagcaaggccatctatgacatcgacagaccagacatgatctcctacagcccctacatcagccacagcgctggggaccggcagagctatggagagagcccccagctgctgagccccacccccacagaaggagaccaggatgacaggagctacaagcagtgcaggaccagcagccccagcagcactggatctgtgtccctgggccgctacacccccaccagccgcagcccccagcactacagcaggcctgctgccaggagaagtgatggagaagatggcagcctggaccaggacaacaggaagaagagctcctggctgatgctgaagggagatgctgacaccaggaccaacagcccagacctggacacccagagcctgagccacagcagcggcacagaccgggaccccctgcagaggatggccggggacagcttccacagccgggagcagatctacccctatgacagcctgattgtgaccaaccgcatccgggtgaagctgcccaaggatgtggacaggacccggctggagcggcacctgagccctgaggagttccaggaggtgtttggcatgagcattgaggagtttgaccggctggccctgtggaagagaaatgacctgaagaagaaggccctgctcttctag

SEQ ID NO: 142279 - DNA, 2193 bp, synthetic construct
  misc_feature 1..2193: note = Description of Artificial Sequence: Synthetic coding sequence
  source 1..2193: mol_type = other DNA
atggaggagctgattgtggagctgcggctcttcctggagctgctggaccacgagtacctgaccagcacagtgcgggagaagaaggctgtgatcaccaacatcctgctgcgcatccagagcagcaagggctttgatgtgaaggaccacgcccagaagcaggagacagccaacagcctgcctgccccaccccagatgcccctgcctgagatcccccagccctggctgcccccagattctggccccccacccctgcccaccagcagcctgcctgagggctactatgaggaggccgtgcccctgagccctgggaaggcccctgagtacatcaccagcaactatgacagtgatgccatgagcagcagctatgagagctatgatgaggaggaggaggatggcaagggcaagaagaccaggcaccagtggcccagcgaggaggcctccatggacctggtgaaggatgccaagatctgtgccttcctgctgaggaagaagcgcttcggccagtggaccaagctgctgtgtgtgatcaaggacaccaagctgctgtgctacaagagcagcaaggaccagcagccccagatggagctgcccctgcagggctgcaacatcacctacatccccaaggacagcaagaagaagaagcatgagctgaagatcacccagcagggcacagaccccctggtgctggccgtgcagagcaaggagcaggccgagcagtggctgaaggtgatcaaggaggcctacagcggctgcagcggccctgtggacagcgagtgccccccaccacccagcagccctgtgcacaaggccgagctggagaagaagctgagcagcgagcggcccagcagtgatggagaaggagtggtggagaatggcatcaccacctgcaatggcaaggagcaggtgaagaggaagaagagcagcaagtctgaggccaagggcaccgtgtccaaggtgacaggcaagaagatcaccaagatcatcagcctgggcaagaagaagcccagcacagatgagcagaccagcagcgctgaggaggatgtgcccacctgtggctacctgaatgtgctgagcaacagccgctggagggagcgctggtgccgggtgaaggacaacaagctgatcttccacaaggacagaacagacctgaagacccacatcgtgtccatccccctgcggggctgtgaggtgattcctggcctggacagcaagcaccccctgaccttccggctgctgagaaatggccaggaggtggccgtgctggaggccagcagcagcgaggacatgggccgctggattggcatcctgctggccgagaccggcagcagcacagatcctgaggccctgcactatgactacattgatgtggagatgtctgccagcgtcatccagacagccaagcagaccttctgcttcatgaacagaagagtcatcagcgccaacccctacctgggcggcaccagcaatggctacgcccaccccagcggcacagccctgcactatgatgatgtgccctgcatcaatggcagcctgaagggcaagaagccccctgtggccagcaatggagtgacaggcaagggcaagaccctgagcagccagcccaagaaggctgaccctgctgctgtggtgaagaggacaggcagcaatgctgcccagtacaagtatggcaagaacagagtggaggctgatgccaagaggctgcagaccaaggaggaggagctgctgaagaggaaggaggccctgaggaaccggctggcccagctgaggaaggagaggaaggacctgcgggccgccatcgaggtgaatgccggcaggaagccccaggccatcctggaggagaagctgaagcagctggaggaggagtgccggcagaaggaggccgagcgggtgtccctggagctggagctgacagaggtgaaggagagcctgaagaaggccctggccggcggcgtgaccctgggcctggccatcgagcccaagagcggcaccagcagcccccagagccctgtgttccgccacaggaccctggagaacagccccatcagcagctgtgacaccagtgacacagagggccctgtgcctgtgaacagcgctgctgtgctgaagaagagccaggccgcccctggcagcagcccctgccggggccacgtgctgaggaaggccaaggagtgggagctgaagaatggcacctag

SEQ ID NO: 142280 - DNA, 2193 bp, synthetic construct; identical to SEQ ID NO: 142279
  misc_feature 1..2193: note = Description of Artificial Sequence: Synthetic coding sequence
  source 1..2193: mol_type = other DNA

SEQ ID NO: 142281 - DNA, 2445 bp, synthetic construct
  misc_feature 1..2445: note = Description of Artificial Sequence: Synthetic coding sequence
  source 1..2445: mol_type = other DNA
atggaggagctgattgtggagctgcggctcttcctggagctgctggaccacgagtacctgaccagcacagtgcgggagaagaaggctgtgatcaccaacatcctgctgcgcatccagagcagcaagggctttgatgtgaaggaccacgcccagaagcaggagacagccaacagcctgcctgccccaccccagatgcccctgcctgagatcccccagccctggctgcccccagattctggccccccacccctgcccaccagcagcctgcctgagggctactatgaggaggccgtgcccctgagccctgggaaggcccctgagtacatcaccagcaactatgacagtgatgccatgagcagcagctatgagagctatgatgaggaggaggaggatggcaagggcaagaagaccaggcaccagtggcccagcgaggaggcctccatggacctggtgaaggatgccaagatctgtgccttcctgctgaggaagaagcgcttcggccagtggaccaagctgctgtgtgtgatcaaggacaccaagctgctgtgctacaagagcagcaaggaccagcagccccagatggagctgcccctgcagggctgcaacatcacctacatccccaaggacagcaagaagaagaagcatgagctgaagatcacccagcagggcacagaccccctggtgctggccgtgcagagcaaggagcaggccgagcagtggctgaaggtgatcaaggaggcctacagcggctgcagcggccctgtggacagcgagtgccccccaccacccagcagccctgtgcacaaggccgagctggagaagaagctgagcagcgagcggcccagcagtgatggagaaggagtggtggagaatggcatcaccacctgcaatggcaaggagcaggtgaagaggaagaagagcagcaagtctgaggccaagggcaccgtgtccaaggtgacaggcaagaagatcaccaagatcatcagcctgggcaagaagaagcccagcacagatgagcagaccagcagcgctgaggaggatgtgcccacctgtggctacctgaatgtgctgagcaacagccgctggagggagcgctggtgccgggtgaaggacaacaagctgatcttccacaaggacagaacagacctgaagacccacatcgtgtccatccccctgcggggctgtgaggtgattcctggcctggacagcaagcaccccctgaccttccggctgctgagaaatggccaggaggtggccgtgctggaggccagcagcagcgaggacatgggccgctggattggcatcctgctggccgagaccggcagcagcacagatcctgaggccctgcactatgactacattgatgtggagatgtctgccagcgtcatccagacagccaagcagaccttctgcttcatgaacagaagagtcatcagcgccaacccctacctgggcggcaccagcaatggctacgcccaccccagcggcacagccctgcactatgatgatgtgccctgcatcaatggctcctgggagccagaagatggcttccctgccagctgcagccggggcctgggggaggaggtgctgtatgacaatgccggcctgtatgacaacctgcccccaccccacatctttgcccgctacagccctgctgacaggaaggccagccggctgtctgctgacaagctgagcagcaaccactacaagtacccagccagcgcccagagcgtgaccaacaccagctctgtgggccgggccagcctgggcctgaacagccagctgaagggcaagaagccccctgtggccagcaatggagtgacaggcaagggcaagaccctgagcagccagcccaagaaggctgaccctgctgctgtggtgaagaggacaggcagcaatgctgcccagtacaagtatggcaagaacagagtggaggctgatgccaagaggctgcagaccaaggaggaggagctgctgaagaggaaggaggccctgaggaaccggctggcccagctgaggaaggagaggaaggacctgcgggccgccatcgaggtgaatgccggcaggaagccccaggccatcctggaggagaagctgaagcagctggaggaggagtgccggcagaaggaggccgagcgggtgtccctggagctggagctgacagaggtgaaggagagcctgaagaaggccctggccggcggcgtgaccctgggcctggccatcgagcccaagagcggcaccagcagcccccagagccctgtgttccgccacaggaccctggagaacagccccatcagcagctgtgacaccagtgacacagagggccctgtgcctgtgaacagcgctgctgtgctgaagaagagccaggccgcccctggcagcagcccctgccggggccacgtgctgaggaaggccaaggagtgggagctgaagaatggcacctag

SEQ ID NO: 142282 - DNA, 2307 bp, synthetic construct
  misc_feature 1..2307: note = Description of Artificial Sequence: Synthetic coding sequence
  source 1..2307: mol_type = other DNA
atggaccggggccaggtgctggagcagctgctgcctgagctgaccggcctgctgagcctgctggaccacgagtacctgagtgacaccaccctggagaagaagatggctgtggccagcatcctgcagagcctgcagcccctgcctgccaaggaggtgtcctacctgtatgtgaacacagctgacctgcacagcggccccagctttgtggagagcctgtttgaggagtttgactgtgacctgagtgacctgcgggacatgccagaagatgatggagagcccagcaaaggagccagccctgagctggccaagagcccccggctgagaaatgctgctgacctgcccccacccctgcccaacaagcccccacctgaggactactatgaggaggccctgcccctgggccctgggaagagccctgagtacatcagcagccacaacggctgcagccccagccacagcatcgtggatggctactatgaagatgctgacagcagctacccagccaccagggtgaatggagagctgaagagcagctacaatgacagtgatgccatgagcagcagctatgagagctatgatgaggaggaggaggagggcaagagcccccagcccaggcaccagtggcccagcgaggaggcctccatgcacctggtgcgggagtgccgcatctgtgccttcctgctgaggaagaagagatttggccagtgggccaagcagctgaccgtcatccgggaggaccagctgctgtgctacaagagcagcaaggaccggcagccccacctgcggctggccctggacacctgcagcatcatctacgtgcccaaggacagccgccacaagagacatgagctgcgcttcacccagggcgccacagaggtgctggtgctggccctgcagagccgggagcaggccgaggagtggctgaaggtgatccgggaggtgtccaagcctgtgggcggcgctgagggcgtggaggtgcccaggagccctgtgctgctgtgcaagctggacctggacaagaggctgagccaggagaagcagaccagtgacagcgacagcgtgggcgtgggggacaactgcagcaccctgggcagaagagagacctgtgaccacggcaagggcaagaagagcagcctggccgagctgaagggctccatgagcagagctgctggcaggaagatcacccgcatcatcggcttcagcaagaagaagaccctggctgatgacctgcagaccagcagcacagaggaggaggtgccctgctgcggctacctgaatgtgctggtgaaccagggctggaaggagcgctggtgccgcctgaagtgcaacaccctgtacttccacaaggaccacatggacctgcggacccacgtgaatgccatcgccctgcagggctgtgaggtggcccctggcttcggccccaggcacccctttgccttccgcatcctgaggaaccggcaggaggtggccatcctggaggccagctgcagcgaggacatgggccgctggctgggcctgctgctggtggagatgggcagccgggtgaccccagaggccctgcactatgactatgtggatgtggagaccctgaccagcatcgtgtctgctggcaggaacagcttcctgtatgcccggagctgccagaaccagtggccagagccccgggtgtatgatgatgtgccctatgagaagatgcaggatgaggagcctgagcggcccaccggggcccaggtgaagagacatgccagcagctgcagcgagaagagccaccgggtggacccccaggtgaaggtgaagagacatgccagcagcgccaaccagtacaagtatggcaagaacagagcagaagaagatgcccggcgctacctggtggagaaggagaagctggagaaggagaaggagaccatcagaacagagctgattgccctgcggcaggagaagcgggagctgaaggaggccatccgcagcagccctggggccaagctgaaggccctggaggaggccgtggccaccctggaggcccagtgccgggccaaggaggagaggagaattgacctggagctgaagctggtggccgtgaaggagcggctgcagcagagcctggccggcggccctgccctgggcctgtctgtgagcagcaagcccaagtctggagaaacagccaacaagccccagaacagcgtgcctgagcagcccctgcctgtgaactgtgtgtctgagctgaggaagaggagccccagcatcgtggccagcaaccagggccgggtgctgcagaaggccaaggagtgggagatgaagaagacctag

SEQ ID NO: 142283 - DNA, 2178 bp, synthetic construct
  misc_feature 1..2178: note = Description of Artificial Sequence: Synthetic coding sequence
  source 1..2178: mol_type = other DNA
atggaccggggccaggtgctggagcagctgctgcctgagctgaccggcctgctgagcctgctggaccacgagtacctgagtgacaccaccctggagaagaagatggctgtggccagcatcctgcagagcctgcagcccctgcctgccaaggaggtgtcctacctgtatgtgaacacagctgacctgcacagcggccccagctttgtggagagcctgtttgaggagtttgactgtgacctgagtgacctgcgggacatgccagaagatgatggagagcccagcaaaggagccagccctgagctggccaagagcccccggctgagaaatgctgctgacctgcccccacccctgcccaacaagcccccacctgaggactactatgaggaggccctgcccctgggccctgggaagagccctgagtacatcagcagccacaacggctgcagccccagccacagcatcgtggatggctactatgaagatgctgacagcagctacccagccaccagggtgaatggagagctgaagagcagctacaatgacagtgatgccatgagcagcagctatgagagctatgatgaggaggaggaggagggcaagagcccccagcccaggcaccagtggcccagcgaggaggcctccatgcacctggtgcgggagtgccgcatctgtgccttcctgctgaggaagaagagatttggccagtgggccaagcagctgaccgtcatccgggaggaccagctgctgtgctacaagagcagcaaggaccggcagccccacctgcggctggccctggacacctgcagcatcatctacgtgcccaaggacagccgccacaagagacatgagctgcgcttcacccagggcgccacagaggtgctggtgctggccctgcagagccgggagcaggccgaggagtggctgaaggtgatccgggaggtgtccaagcctgtgggcggcgctgagggcgtggaggtgcccaggagccctgtgctgctgtgcaagctggacctggacaagaggctgagccaggagaagcagaccagtgacagcgacagcgtgggcgtgggggacaactgcagcaccctgggcagaagagagacctgtgaccacggcaagggcaagaagagcagcctggccgagctgaagggctccatgagcagagctgctggcaggaagatcacccgcatcatcggcttcagcaagaagaagaccctggctgatgacctgcagaccagcagcacagaggaggaggtgccctgctgcggctacctgaatgtgctggtgaaccagggctggaaggagcgctggtgccgcctgaagtgcaacaccctgtacttccacaaggaccacatggacctgcggacccacgtgaatgccatcgccctgcagggctgtgaggtggcccctggcttcggccccaggcacccctttgccttccgcatcctgaggaaccggcaggaggtggccatcctggaggccagctgcagcgaggacatgggccgctggctgggcctgctgctggtggagatgggcagccgggtgaccccagaggccctgcactatgactatgtggatgtggagaccctgaccagcatcgtgtctgctggcaggaacagcttcctgtatgcccggagctgccagaaccagtggccagagccccgggtgtatgatgatgtgccctatgagaagatgcaggatgaggagcctgagcggcccaccggggcccaggtgaagagacatgccagcagctgcagcgagaagagccaccgggtggacccccaggtgaaggtgaagagacatgccagcagcgccaaccagtacaagtatggcaagaacagagcagaagaagatgcccggcgctacctggtggagaaggagaagctggagaaggagaaggagaccatcagaacagagctgattgccctgcggcaggagaagcgggagctgaaggaggccatccgcagcagccctggggccaagctgaaggccctggaggaggccgtggccaccctggaggcccagtgccgggccaaggaggagaggagaattgacctggagctgaagctggtggccgtgaaggagcggctgcagcagagcctggccggcggccctgccctgggcctgtctgtgagcagcaagcccaagtctggagagtgggagatgaagaagacctag

SEQ ID NO: 142284 - DNA, 2457 bp, synthetic construct
  misc_feature 1..2457: note = Description of Artificial Sequence: Synthetic coding sequence
  source 1..2457: mol_type = other DNA
atggagcgctacaaggccctggagcagctgctgacagagctggatgacttcctgaagatcctggaccaggagaacctgagcagcacagccctggtgaagaagagctgcctggccgagctgctgcggctgtacaccaagagcagcagcagtgatgaggagtacatctacatgaacaaggtgaccatcaacaagcagcagaatgctgagagccagggcaaggcccctgaggagcagggcctgctgcccaatggagagcccagccagcacagcagcgccccccagaagagcctgcctgacctgcccccacccaagatgatccctgagaggaagcagctggccatccccaagacagagagccctgagggctactatgaggaggccgagccctatgacaccagcctgaatgaagatggagaggccgtgagcagcagctatgagagctatgatgaagaagatggcagcaagggcaagagcgccccctaccagtggcccagccctgaggccggcatcgagctgatgagagatgcccgcatctgtgccttcctgtggaggaagaagtggctgggccagtgggccaagcagctgtgtgtgatcaaggacaaccggctgctgtgctacaagagcagcaaggaccacagcccccagctggatgtgaacctgctgggcagcagcgtcatccacaaggagaagcaggtgaggaagaaggagcacaagctgaagatcacccccatgaatgctgatgtgattgtgctgggcctgcagagcaaggaccaggccgagcagtggctgcgggtcatccaggaggtgtctggcctgcccagcgagggcgccagcgagggcaaccagtacaccccagatgcccagcgcttcaactgccagaagccagacattgctgagaagtacctgagcgcctctgaatatggcagctctgtggatggccaccctgaggtgcctgagaccaaggatgtgaagaagaagtgcagcgctggcctgaagctgagcaacctgatgaacctgggcaggaagaagagcaccagcctggagcctgtggagaggagcctggagaccagcagctacctgaatgtgctggtgaacagccagtggaagagccgctggtgcagcgtgcgggacaaccacctgcacttctaccaggacaggaacagaagcaaggtggcccagcagcccctgagcctggtgggctgtgaggtggtgcctgaccccagcccagaccacctgtacagcttccgcatcctgcacaagggggaggagctggccaagctggaggccaagagcagcgaggagatgggccactggctgggcctgctgctgtctgagagcggcagcaagacagatcctgaggagttcacctatgactatgtggatgctgacagagtgtcctgcatcgtgtctgctgccaagaacagcctgctgctgatgcagaggaagttcagcgagcccaacacctacattgatggcctgcccagccaggaccggcaggaggagctgtatgatgatgtggacctgtctgagctgacagctgctgtggagcccacagaggaggccacccctgtggctgatgaccccaatgaaagagaaagtgacagagtgtacctggacctgacccctgtgaagagcttcctgcacggccccagcagcgcccaggcccaggccagcagccccaccctgagctgcctggacaatgccacagaggccctgcctgctgacagcggccctggccccaccccagatgagccctgcatcaagtgcccagagaacctgggggagcagcagctggagagcctggagcctgaggaccccagcctgcgcatcaccaccgtgaagatccagacagagcagcagaggatctccttcccccccagctgcccagatgctgtggtggccaccccacctggggccagcccccctgtgaaggaccggctgcgggtgaccagcgctgagatcaagctgggcaagaacagaacagaagctgaggtgaagcgctacacagaggagaaggagcggctggagaagaagaaggaggagatccggggccacctggcccagctgaggaaggagaagcgggagctgaaggagaccctgctgaagtgcacagacaaggaggtgctggccagcctggagcagaagctgaaggagattgatgaggagtgccgcggggaggagagcagaagagtggacctggagctgagcatcatggaggtgaaggacaacctgaagaaggccgaggccggccctgtgaccctgggcaccaccgtggacaccacccacctggagaatgtgagcccccggcccaaggctgtgaccccagccagcgccccagactgcacccctgtgaacagcgccaccaccctgaagaaccggcccctgtctgtggtggtgacaggcaagggcaccgtgctgcagaaggccaaggagtgggagaagaagggggccagctag

SEQ ID NO: 142285 - DNA, 2445 bp, synthetic construct
  misc_feature 1..2445: note = Description of Artificial Sequence: Synthetic coding sequence
  source 1..2445: mol_type = other DNA
atggagcgctacaaggccctggagcagctgctgacagagctggatgacttcctgaagatcctggaccaggagaacctgagcagcacagccctggtgaagaagagctgcctggccgagctgctgcggctgtacaccaagagcagcagcagtgatgaggagtacatctacatgaacaaggtgaccatcaacaagcagcagaatgctgagagccagggcaaggcccctgaggagcagggcctgctgcccaatggagagcccagccagcacagcagcgccccccagaagagcctgcctgacctgcccccacccaagatgatccctgagaggaagcagctggccatccccaagacagagagccctgagggctactatgaggaggccgagccctatgacaccagcctgaatgaagatggagaggccgtgagcagcagctatgagagctatgatgaagaagatggcagcaagggcaagagcgccccctaccagtggcccagccctgaggccggcatcgagctgatgagagatgcccgcatctgtgccttcctgtggaggaagaagtggctgggccagtgggccaagcagctgtgtgtgatcaaggacaaccggctgctgtgctacaagagcagcaaggaccacagcccccagctggatgtgaacctgctgggcagcagcgtcatccacaaggagaagcaggtgaggaagaaggagcacaagctgaagatcacccccatgaatgctgatgtgattgtgctgggcctgcagagcaaggaccaggccgagcagtggctgcgggtcatccaggaggtgtctggcctgcccagcgagggcgccagcgagggcaaccagtacaccccagatgcccagcgcttcaactgccagaagccagacattgctgagaagtacctgagcgcctctgaatatggcagctctgtggatggccaccctgaggtgcctgagaccaaggatgtgaagaagaagtgcagcgctggcctgaagctgagcaacctgatgaacctgggcaggaagaagagcaccagcctggagcctgtggagaggagcctggagaccagcagctacctgaatgtgctggtgaacagccagtggaagagccgctggtgcagcgtgcgggacaaccacctgcacttctaccaggacaggaacagaagcaaggtggcccagcagcccctgagcctggtgggctgtgaggtggtgcctgaccccagcccagaccacctgtacagcttccgcatcctgcacaagggggaggagctggccaagctggaggccaagagcagcgaggagatgggccactggctgggcctgctgctgtctgagagcggcagcaagacagatcctgaggagttcacctatgactatgtggatgctgacagagtgtcctgcatcgtgtctgctgccaagaacagcctgctgctgatgcagaggaagttcagcgagcccaacacctacattgatggcctgcccagccaggaccggcaggaggagctgtatgatgatgtggacctgtctgagctgacagctgctgtggagcccacagaggaggccacccctgtggctgatgaccccaatgaaagagaaagtgacagagtgtacctggacctgacccctgtgaagagcttcctgcacggccccagcagcgcccaggcccaggccagcagccccaccctgagctgcctggacaatgccacagaggccctgcctgctgacagcggccctggccccaccccagatgagccctgcatcaagtgcccagagaacctgggggagcagcagctggagagcctggagcctgaggaccccagcctgcgcatcaccaccgtgaagatccagacagagcagcagaggatctccttcccccccagctgcccagatgctgtggtggccaccccacctggggccagcccccctgtgaaggaccggctgcgggtgaccagcgctgagatcaagctgggcaagaacagaacagaagctgaggtgaagcgctacacagaggagaaggagcggctggagaagaagaaggaggagatccggggccacctggcccagctgaggaaggagaagcgggagctgaaggagaccctgctgaagtgcacagacaaggaggtgctggccagcctggagcagaagctgaaggagattgatgaggagtgccgcggggaggagagcagaagagtggacctggagctgagcatcatggaggtgaaggacaacctgaagaaggccgaggccggccctgtgaccctgggcaccaccgtggacaccacccacctggagaaccccaaggctgtgaccccagccagcgccccagactgcacccctgtgaacagcgccaccaccctgaagaaccggcccctgtctgtggtggtgacaggcaagggcaccgtgctgcagaaggccaaggagtgggagaagaagggggccagctag

SEQ ID NO: 142286 - DNA, 2526 bp, synthetic construct
  misc_feature 1..2526: note = Description of Artificial Sequence: Synthetic coding sequence
  source 1..2526: mol_type = other DNA
cagagggtgcgggccctggagcagctgctgacagagctggatgacttcctgaagatcctggaccaggagaacctgagcagcacagccctggtgaagaagagctgcctggccgagctgctgcggctgtacaccaagagcagcagcagtgatgaggagtacatctacatgaacaaggtgaccatcaacaagcagcagaatgctgagagccagggcaaggcccctgaggagcagggcctgctgcccaacggggagcccagccagcacagcagcgccccccagaagagcctgcctgacctgcccccacccaagatgatccctgagaggaagcagctggccatccccaagacagagagccctgagggctactatgaggaggccgagccctatgacaccagcctgaatggccacagcggcggcttcctgcccactggagtgccccgctgggtgcaggtgcctgagggcgtcatctatgccaccatcaccctggaggatggagaggccgtgagcagcagctatgagagctatgatgaggaggatggcagcaagggcaagagcgccccctaccagtggcccagccctgaggccggcatcgagctgatgagagatgcccgcatctgtgccttcctgtggaggaagaagtggctgggccagtgggccaagcagctgtgtgtgatcaaggacaaccggctgctgtgctacaagagcagcaaggaccacagcccccagctggatgtgaacctgctgggcagcagcgtcatccacaaggagaagcaggtgaggaagaaggagcacaagctgaagatcacccccatgaatgctgatgtgattgtgctgggcctgcagagcaaggaccaggccgagcagtggctgcgggtcatccaggaggtgtctggcctgcccagcgagggcgccagcgagggcaaccagtacaccccagatgcccagcgcttcaactgccagaagccagacattgctgagaagtacctgagcgcctctgaatatggcagctctgtggatggccaccctgaggtgcctgagaccaaggatgtgaagaagaagtgcagcgctggcctgaagctgagcaacctgatgaacctgggcaggaagaagagcaccagcctggagcctgtggagaggagcctggagaccagcagctacctgaatgtgctggtgaacagccagtggaagagccgctggtgcagcgtgcgggacaaccacctgcacttctaccaggacaggaacagaagcaaggtggcccagcagcccctgagcctggtgggctgtgaggtggtgcctgaccccagcccagaccacctgtacagcttccgcatcctgcacaagggggaggagctggccaagctggaggccaagagcagcgaggagatgggccactggctgggcctgctgctgtctgagagcggcagcaagacagatcctgaggagttcacctatgactatgtggatgctgacagagtgtcctgcatcgtgtctgctgccaagaacagcctgctgctgatgcagaggaagttcagcgagcccaacacctacattgatggcctgcccagccaggaccggcaggaggagctgtatgatgatgtggacctgtctgagctgacagctgctgtggagcccacagaggaggccacccctgtggctgatgaccccaatgaaagagaaagtgacagagtgtacctggacctgacccctgtgaagagcttcctgcacggccccagcagcgcccaggcccaggccagcagccccaccctgagctgcctggacaatgccacagaggccctgcctgctgacagcggccctggccccaccccagatgagccctgcatcaagtgcccagagaacctgggggagcagcagctggagagcctggagcctgaggaccccagcctgcgcatcaccaccgtgaagatccagacagagcagcagaggatctccttcccccccagctgcccagatgctgtggtggccaccccacctggggccagcccccctgtgaaggaccggctgcgggtgaccagcgctgagatcaagctgggcaagaacagaacagaggccgaggtgaagcgctacacagaggagaaggagcggctggagaagaagaaggaggagatccggggccacctggcccagctgaggaaggagaagcgggagctgaaggagaccctgctgaagtgcacagacaaggaggtgctggccagcctggagcagaagctgaaggagattgatgaagaatgtagaggagaggagagccggcgggtggacctggagctgagcatcatggaggtgaaggacaacctgaagaaggccgaggccggccctgtgaccctgggcaccaccgtggacaccacccacctggagaaccccaaggctgtgaccccagccagcgccccagactgcacccctgtgaacagcgccaccaccctgaagaaccggcccctgtctgtggtggtgactggaaaaggaacagtgctgcagaaggccaaggagtgggagaagaagggggccagctag

SEQ ID NO: 142287 - DNA, 939 bp, synthetic construct
  misc_feature 1..939: note = Description of Artificial Sequence: Synthetic coding sequence
  source 1..939: mol_type = other DNA
atggagcgctacaaggcccagggctgctgctgcctggtggtgcagaggcgcatccggcaggtgtctgccagcctggagcagctgctgacagagctggatgacttcctgaagatcctggaccaggagaacctgagcagcacagccctggtgaagaagagctgcctggccgagctgctgcggctgtacaccaagagcagcagcagtgatgaggagtacatctacatgaacaaggtgaccatcaacaagcagcagaatgctgagagccagggcaaggcccctgaggagcagggcctgctgcccaatggagagcccagccagcacagcagcgccccccagaagagcctgcctgacctgcccccacccaagatgatccctgagaggaagcagctggccatccccaagacagagagccctgagggctactatgaggaggccgagccctatgacaccagcctgaatgaagatggagaggccgtgagcagcagctatgagagctatgatgaagaagatggcagcaagggcaagagcgccccctaccagtggcccagccctgaggccggcatcgagctgatgagagatgcccgcatctgtgccttcctgtggaggaagaagtggctgggccagtgggccaagcagctgtgtgtgatcaaggacaaccggctgctgtgctacaagagcagcaaggaccacagcccccagctggatgtgaacctgctgggcagcagcgtcatccacaaggagaagcaggtgaggaagaaggagcacaagctgaagatcacccccatgaatgctgatgtgattgtgctgggcctgcagagcaaggaccaggccgagcagtggctgcgggtcatccaggaggtgtctggcctgcccagcgagggcgccagcgagggcaaccagtacaccccagatgcccagcgcttcaactgccagaagtag

SEQ ID NO: 142288 - DNA, 939 bp, synthetic construct; identical to SEQ ID NO: 142287
  misc_feature 1..939: note = Description of Artificial Sequence: Synthetic coding sequence
  source 1..939: mol_type = other DNA

SEQ ID NO: 142289 - DNA, 2616 bp, synthetic construct
  misc_feature 1..2616: note = Description of Artificial Sequence: Synthetic coding sequence
  source 1..2616: mol_type = other DNA
atggagcgctacaaggccctggagcagctgctgacagagctggatgacttcctgaagatcctggaccaggagaacctgagcagcacagccctggtgaagaagagctgcctggccgagctgctgcggctgtacaccaagagcagcagcagtgatgaggagtacatctacatgaacaaggtgaccatcaacaagcagcagaatgctgagagccagggcaaggcccctgaggagcagggcctgctgcccaatggagagcccagccagcacagcagcgccccccagaagagcctgcctgacctgcccccacccaagatgaggatcctgaccctgggccagatcagcggggcccagagcttctccccagatggcacccacctgactggaacagagttcctgggcggctggagctggaggcccagccagatccggctgatgagccctggcacccactggggagacctgacagccacagagatccctgagaggaagcagctggccatccccaagacagagagccctgagggctactatgaggaggccgagccctatgacaccagcctgaatgaagatggagaggccgtgagcagcagctatgagagctatgatgaggaggatggcagcaagggcaagagcgccccctaccagtggcccagccctgaggccggcatcgagctgatgagagatgcccgcatctgtgccttcctgtggaggaagaagtggctgggccagtgggccaagcagctgtgtgtgatcaaggacaaccggctgctgtgctacaagagcagcaaggaccacagcccccagctggatgtgaacctgctgggcagcagcgtcatccacaaggagaagcaggtgaggaagaaggagcacaagctgaagatcacccccatgaatgctgatgtgattgtgctgggcctgcagagcaaggaccaggccgagcagtggctgcgggtcatccaggaggtgtctggcctgcccagcgagggcgccagcgagggcaaccagtacaccccagatgcccagcgcttcaactgccagaagccagacattgctgagaagtacctgagcgcctctgaatatggcagctctgtggatggccaccctgaggtgcctgagaccaaggatgtgaagaagaagtgcagcgctggcctgaagctgagcaacctgatgaacctgggcaggaagaagagcaccagcctggagcctgtggagaggagcctggagaccagcagctacctgaatgtgctggtgaacagccagtggaagagccgctggtgcagcgtgcgggacaaccacctgcacttctaccaggacaggaacagaagcaaggtggcccagcagcccctgagcctggtgggctgtgaggtggtgcctgaccccagcccagaccacctgtacagcttccgcatcctgcacaagggggaggagctggccaagctggaggccaagagcagcgaggagatgggccactggctgggcctgctgctgtctgagagcggcagcaagacagatcctgaggagttcacctatgactatgtggatgctgacagagtgtcctgcatcgtgtctgctgccaagaacagcctgctgctgatgcagaggaagttcagcgagcccaacacctacattgatggcctgcccagccaggaccggcaggaggagctgtatgatgatgtggacctgtctgagctgacagctgctgtggagcccacagaggaggccacccctgtggctgatgaccccaatgaaagagaaagtgacagagtgtacctggacctgacccctgtgaagagcttcctgcacggccccagcagcgcccaggcccaggccagcagccccaccctgagctgcctggacaatgccacagaggccctgcctgctgacagcggccctggccccaccccagatgagccctgcatcaagtgcccagagaacctgggggagcagcagctggagagcctggagcctgaggaccccagcctgcgcatcaccaccgtgaagatccagacagagcagcagaggatctccttcccccccagctgcccagatgctgtggtggccaccccacctggggccagcccccctgtgaaggaccggctgcgggtgaccagcgctgagatcaagctgggcaagaacagaacagaggccgaggtgaagcgctacacagaggagaaggagcggctggagaagaagaaggaggagatccggggccacctggcccagctgaggaaggagaagcgggagctgaaggagaccctgctgaagtgcacagacaaggaggtgctggccagcctggagcagaagctgaaggagattgatgaagaatgtagaggagaggagagccggcgggtggacctggagctgagcatcatggaggtgaaggacaacctgaagaaggccgaggccggccctgtgaccctgggcaccaccgtggacaccacccacctggagaatgtgagcccccggcccaaggctgtgaccccagccagcgccccagactgcacccctgtgaacagcgccaccaccctgaagaaccggcccctgtctgtggtggtgactggaaaaggaacagtgctgcagaaggccaaggagtgggagaagaagggggccagctag

SEQ ID NO: 142290 - DNA, 1002 bp, synthetic construct
  misc_feature 1..1002: note = Description of Artificial Sequence: Synthetic coding sequence
  source 1..1002: mol_type = other DNA
atgtgtgaggaggagaccacagccctggtgtgtgacaatggaagtggcctgtgcaaggccggctttgctggagatgatgcccccagggctgtgttccccagcatcgtgggccggcccaggcaccagatctggcaccacagcttctacaatgagctgcgggtggcccctgaggagcaccccaccctgctgacagaggcccccctgaaccccaaggccaaccgggagaagatgacccagatcatgtttgagaccttcaacgtgcctgccatgtatgtggccatccaggccgtgctgagcctgtatgccagcggccgcaccactggaattgtgctggacagcggagatggagtgacccacaacgtgcccatctatgagggctacgccctgccccacgccatcatgaggctggacctggccggccgggacctgacagactacctgatgaagatcctgacagagcggggctacagctttgtgaccacagctgagcgggagatcgtgcgggacatcaaggagaagctgtgctacgtggccctggactttgaaaatgagatggccacagctgccagcagcagcagcctggagaagagctatgagctgcctgatggccaggtgatcaccatcggaaatgaacgcttccgctgcccagagaccctcttccagcccagcttcatcggcatggagagcgctggcatccacgagaccacctacaacagcatcatgaagtgtgacatcgacatcaggaaggacctgtatgccaacaacgtgctgagcggcggcaccaccatgtacccaggcattgctgacaggatgcagaaggagatcacagccctggcccccagcaccatgaagatcaagatcatcgcccctcctgagaggaagtacagcgtgtggattggaggcagcatcctggccagcctgagcaccttccagcagatgtggatcagcaagccagaatatgatgaagctggccccagcatcgtgcacaggaagtgcttctag

SEQ ID NO: 142291 - DNA, 1113 bp, synthetic construct
  misc_feature 1..1113: note = Description of Artificial Sequence: Synthetic coding sequence
  source 1..1113: mol_type = other DNA
atgagcctgcaccagttcctgctggagcccatcacctgccacgcctggaacagagacaggacccagatcgccctgagccccaacaaccacgaggtgcacatctacaagaagaatggcagccagtgggtgaaggcccacgagctgaaggagcacaacggccacatcaccggcatcgactgggcccccaagagtgacagaattgtgacctgtggggctgacagaaatgcctacgtgtggagccagaaggatggagtgtggaagcccaccctggtgatcctgcgcatcaacagagctgccacctttgtgaagtggagccccctggagaacaagtttgctgtgggcagcggggcccggctcatctctgtgtgctactttgaaagtgaaaatgactggtgggtgtccaagcacatcaagaagcccatccgcagcacagtgctgagcctggactggcaccccaacaacgtgctgctggccgccggcagctgtgacttcaagtgcagggtcttcagcgcctacatcaaggaggtggatgagaagccagccagcaccccctggggcagcaagatgcccttcggccagctgatgtctgaatttggaggcagcggcactggaggctgggtgcacggcgtgtccttcagcgccagcggcagccggctggcctgggtgtcccatgacagcacagtgtctgtggctgatgccagcaagtctgtgcaggtgtccaccctgaagacagagttcctgcccctgctgtctgtgtcctttgtgtctgaaaattctgtggtggccgccggccatgactgctgccccatgctgttcaactatgatgaccggggctgcctgacctttgtgtccaagctggacatccccaagcagagcatccagaggaacatgtctgccatggagcgcttcaggaacatggacaagagggccaccacagaagatagaaacacagccctggagaccctgcaccagaacagcatcacccaggtgtccatctatgaggtggacaagcaggactgcaggaagttctgcaccaccggcattgatggagccatgaccatctgggacttcaagaccctggagagcagcatccagggcctgcgcatcatgtag

SEQ ID NO: 142292 - DNA, 1038 bp, synthetic construct
  misc_feature 1..1038: note = Description of Artificial Sequence: Synthetic coding sequence
  source 1..1038: mol_type = other DNA
atgcatgagcgcttcatccactgcttctgcatcgactgggcccccaagagtgaccgcatcgtgacctgtggggctgacagaaatgcctacgtgtggagccagaaggatggagtgtggaagcccaccctggtgatcctgcgcatcaacagagctgccacctttgtgaagtggagccccctggagaacaagtttgctgtgggcagcggggcccggctcatctctgtgtgctactttgaaagtgaaaatgactggtgggtgtccaagcacatcaagaagcccatccgcagcacagtgctgagcctggactggcaccccaacaacgtgctgctggccgccggcagctgtgacttcaagtgcagggtcttcagcgcctacatcaaggaggtggatgagaagccagccagcaccccctggggcagcaagatgcccttcggccagctgatgtctgaatttggaggcagcggcaccggcggctgggtgcatggagtgtccttcagcgccagcggcagccggctggcctgggtgtcccatgacagcacagtgtctgtggctgatgccagcaagtctgtgcaggtgtccaccctgaagacagagttcctgcccctgctgtctgtgtcctttgtgtctgagaacagcgtggtggccgccggccatgactgctgccccatgctgttcaactatgatgaccggggctgcctgacctttgtgtccaagctggacatccccaagcagagcatccagaggaacatgtctgccatggagcgcttcaggaacatggacaagagggccaccacagaggacaggaacacagccctggagaccctgcaccagaacagcatcacccaggtgtccatctatgaggtggacaagcaggactgcaggaagttctgcaccactggaattgatggagccatgaccatctgggacttcaaggagcccagccgccacggcctgccccagctgcccggcggggcccaccagctgccccggctggagcagggcccccacccagactgccacctgccccagcagccctag

SEQ ID NO: 142293 - DNA, 1119 bp, synthetic construct
  misc_feature 1..1119: note = Description of Artificial Sequence: Synthetic coding sequence
  source 1..1119: mol_type = other DNA
atggcctaccacagcttcctggtggagcccatcagctgccacgcctggaacaaggacaggacccagatcgccatctgccccaacaaccacgaggtgcacatctatgagaagagcggggccaagtggaccaaggtgcatgagctgaaggagcacaacggccaggtgacaggcatcgactgggcccctgagagcaacagaattgtgacctgtggcacagacagaaatgcctacgtgtggaccctgaagggccgcacctggaagcccaccctggtgatcctgcgcatcaacagagctgcccgctgtgtgcgctgggccccaaatgaaaacaagtttgctgtgggcagcggcagcagggtcatcagcatctgctactttgagcaggagaatgactggtgggtgtgcaagcacatcaagaagcccatccgcagcacagtgctgagcctggactggcaccccaacaacgtgctgctggccgccggcagctgtgacttcaagtgccgcatcttcagcgcctacatcaaggaggtggaggagaggcctgcccccaccccctggggcagcaagatgccctttggagagctgatgtttgagagcagcagcagctgtggctgggtgcacggcgtgtgcttcagcgccagcggcagccgggtggcctgggtgtcccatgacagcacagtgtgcctggctgatgctgacaagaagatggctgtggccaccctggccagcgagaccctgcccctgctggccctgaccttcatcacagacaacagcctggtggccgccggccatgactgcttccctgtgctcttcacctatgatgctgctgctggcatgctgagctttggaggccgcctggatgtgcccaagcagagcagccagaggggcctgacagcccgggagcgcttccagaacctggacaagaaggccagcagcgagggcggcacagctgctggagctggcctggacagcctgcacaagaacagcgtgtcccagatctctgtgctgagcggcggcaaggccaagtgcagccagttctgcaccaccggcatggatggcggcatgagcatctgggatgtgaagagcctggagagcgccctgaaggacctgaagatcaagtag

SEQ ID NO: 142294 - DNA, 309 bp, synthetic construct
  misc_feature 1..309: note = Description of Artificial Sequence: Synthetic coding sequence
  source 1..309: mol_type = other DNA
atggcctaccacagcttcctggtggagcccatcagctgccacgcctggaacaaggacaggacccagatcgccatctgccccaacaaccacgaggtgcacatctatgagaagagcggggccaagtggaccaaggtgcatgagctgaaggagcacaacggccaggtgacaggcatcgactgggcccctgagagcaacagaattgtgacctgtggcacagacagaaatgcctacgtgtggaccctgaagggccgcacctggaagcccaccctggtgatcctgcgcatcaacagagctgcccgctgtgtgtag

SEQ ID NO: 142295 - DNA, 393 bp, synthetic construct
  misc_feature 1..393: note = Description of Artificial Sequence: Synthetic coding sequence
  source 1..393: mol_type = other DNA
atggcctaccacagcttcctggtggagcccatcagctgccacgcctggaacaaggacaggacccagatcgccatctgccccaacaaccacgaggtgcacatctatgagaagagcggggccaagtggaccaaggtgcatgagctgaaggagcacaacggccaggtgacaggcatcgactgggcccctgagagcaacagaattgtgacctgtggcacagacagaaatgcctacgtgtggaccctgaagggccgcacctggaagcccaccctggtgatcctgcgcatcaacagagctgcccgctgtgtgcgctgggccccaaatgaaaacaagtttgctgtgggcagcggcagcagggtcatcagcatctgctactttgagcaggagaatgactag

SEQ ID NO: 142296 - DNA, 252 bp, synthetic construct
  misc_feature 1..252: note = Description of Artificial Sequence: Synthetic coding sequence
  source 1..252: mol_type = other DNA
atggcctaccacagcttcctggtggagcccatcagctgccacgcctggaacaaggacaggacccagatcgccatctgccccaacaaccacgaggtgcacatctatgagaagagcggggccaagtggaccaaggtgcatgagctgaaggagcacaacggccaggtgacaggcatcgactgggcccctgagagcaacagaattgtgacctgtggcacagacagaaatgcctacgtgtggaccctgaagggctag

SEQ ID NO: 142297 - DNA, 402 bp, synthetic construct
  misc_feature 1..402: note = Description of Artificial Sequence: Synthetic coding sequence
  source 1..402: mol_type = other DNA
atggcctaccacagcttcctggtggagcccatcagctgccacgcctggaacaaggacaggacccagatcgccatctgccccaacaaccacgaggtgcacatctatgagaagagcggggccaagtggaccaaggtgcatgagctgaaggagcacaacggccaggtgacaggcatcgactgggcccctgagagcaacagaattgtgacctgtggcacagacagaaatgcctacgtgtggaccctgaagggccgcacctggaagcccaccctggtgatcctgcgcatcaacagagctgcccgctgtgtgcgctgggccccaaatgaaaacaagtttgctgtgggcagcggcagcagggtcatcagcatctgctactttgagcaggagaatgactggtgggtgtag

SEQ ID NO: 142298 - DNA, 66 bp, synthetic construct
  misc_feature 1..66: note = Description of Artificial Sequence: Synthetic coding sequence
  source 1..66: mol_type = other DNA
atggcctaccacagcttcctggtggagcccatcagctgccacgcctggaacaaggacagaacatag

SEQ ID NO: 142299 - DNA, 402 bp, synthetic construct; identical to SEQ ID NO: 142297
  misc_feature 1..402: note = Description of Artificial Sequence: Synthetic coding sequence
  source 1..402: mol_type = other DNA

SEQ ID NO: 142300 - DNA, 327 bp, synthetic construct
  misc_feature 1..327: note = Description of Artificial Sequence: Synthetic coding sequence
  source 1..327: mol_type = other DNA
atggcctaccacagcttcctggtggagcccatcagctgccacgcctggaacaaggacaggacccagatcgccatctgccccaacaaccacgaggtgcacatctatgagaagagcggggccaagtggaccaaggtgcatgagctgaaggagcacaacggccaggtgacaggcatcgactgggcccctgagagcaacagaattgtgacctgtggcacagacagaaatgcctacgtgtggaccctgaagggccgcacctggaagcccaccctggtgatcctgcgcatcaacagagctgcccgctgtgtgcgctgggccccaaatgaatag

SEQ ID NO: 142301 - DNA, 1119 bp, synthetic construct; identical to SEQ ID NO: 142293
  misc_feature 1..1119: note = Description of Artificial Sequence: Synthetic coding sequence
  source 1..1119: mol_type = other DNA

SEQ ID NO: 142302 - DNA, 387 bp, synthetic construct
  misc_feature 1..387: note = Description of Artificial Sequence: Synthetic coding sequence
  source 1..387: mol_type = other DNA
atggcctaccacagcttcctggtggagcccatcagctgccacgcctggaacaaggacaggacccagatcgccatctgccccaacaaccacgaggtgcacatctatgagaagagcggggccaagtggaccaaggtgcatgagctgaaggagcacaacggccaggtgacaggcatcgactgggcccctgagagcaacagaattgtgacctgtggcacagacagaaatgcctacgtgtggaccctgaagggccgcacctggaagcccaccctggtgatcctgcgcatcaacagagctgcccgctgtgtgcgctgggccccaaatgaaaacaagtttgctgtgggcagcggcagcagggtcatcagcatctgctactttgagcaggagtag

SEQ ID NO: 142303 - DNA, 402 bp, synthetic construct; identical to SEQ ID NO: 142297
  misc_feature 1..402: note = Description of Artificial Sequence: Synthetic coding sequence
  source 1..402: mol_type = other DNA

SEQ ID NO: 142304 - DNA, 903 bp, synthetic construct
  misc_feature 1..903: note = Description of Artificial Sequence: Synthetic coding sequence
  source 1..903: mol_type = other DNA
atgatcctgctggaggtgaacaaccgcatcatcgaggagaccctggccctgaagtttgaaaatgctgctgctggcaacaagccagaggccgtggaggtgacctttgctgactttgatggagtgctgtaccacatcagcaaccccaatggagacaagaccaaggtgatggtgtccatcagcctgaagttctacaaggagctgcaggcccacggggctgatgagctgctgaagagggtgtatggcagcttcctggtgaaccctgagagcggctacaacgtgtccctgctgtatgacctggagaacctgcctgccagcaaggacagcatcgtgcaccaggccggcatgctgaagaggaactgctttgcctctgtgtttgagaagtacttccagttccaggaggagggcaaggagggagaaaatagagctgtgatccactacagagatgatgagaccatgtatgtggagagcaagaaggacagagtgacagtggtgttcagcacagtgttcaaggatgatgatgatgtggtgattggcaaggtgttcatgcaggagttcaaggagggcagaagagccagccacacagccccccaggtgctcttcagccaccgggagccccccctggagctgaaggacacagatgctgctgtgggggacaacatcggctacatcacctttgtgctcttccccaggcacaccaatgccagcgcccgggacaacaccatcaacctgatccacaccttccgggactacctgcactaccacatcaagtgcagcaaggcctacatccacaccaggatgagggccaagaccagtgacttcctgaaggtgctgaacagagcccggccagatgctgagaagaaggagatgaagaccatcaccgggaagaccttcagcagcaggtag

SEQ ID NO: 142305 - DNA, 903 bp, synthetic construct; identical to SEQ ID NO: 142304
  misc_feature 1..903: note = Description of Artificial Sequence: Synthetic coding sequence
  source 1..903: mol_type = other DNA

SEQ ID NO: 142306 - DNA, 273 bp, synthetic construct
  misc_feature 1..273: note = Description of Artificial Sequence: Synthetic coding sequence
  source 1..273: mol_type = other DNA
atgatcctgctggaggtgaacaaccgcatcatcgaggagaccctggccctgaagtttgaaaatgctgctgctggcaacaagccagaggccgtggaggtgacctttgctgactttgatggagtgctgtaccacatcagcaaccccaatggagacaagaccaaggtgatggtgtccatcagcctgaagttctacaaggagctgcaggcccacggggctgatgagctgctgaagagggtgtatggcagcttcctggtgaaccctgagagcggctag

SEQ ID NO: 142307 - DNA, 864 bp, synthetic construct
  misc_feature 1..864: note = Description of Artificial Sequence: Synthetic coding sequence
  source 1..864: mol_type = other DNA
atgtgtgatgaagatgagaccacagccctggtgtgtgacaatggcagcggcctggtgaaggccggctttgctggagatgatgcccccagggctgtgttccccagcatcgtgggccggcccaggcaccagggcgtgatggtgggcatgggccagaaggacagctatgtgggagatgaggcccagagcaagaggggcatcctgaccctgaagtaccccattgaacatggcatcatcaccaactgggatgacatggagaagatctggcaccacaccttctacaatgagctgcgggtggcccctgaggagcaccccaccctgctgacagaggcccccctgaaccccaaggccaaccgggagatcgtgcgggacatcaaggagaagctgtgctacgtggccctggactttgaaaatgagatggccacagctgccagcagcagcagcctggagaagagctatgagctgcctgatggccaggtgatcaccatcggaaatgaacgcttccgctgcccagagaccctcttccagcccagcttcatcggcatggagagcgctggcatccacgagaccacctacaacagcatcatgaagtgtgacatcgacatcaggaaggacctgtatgccaacaacgtgatgtctgggggcaccaccatgtacccaggcattgctgacaggatgcagaaggagatcacagccctggcccccagcaccatgaagatcaagatcatcgcccctcctgagaggaagtacagcgtgtggattggaggcagcatcctggccagcctgagcaccttccagcagatgtggatcaccaagcaggagtatgatgaagctggccccagcatcgtgcacaggaagtgcttctag

SEQ ID NO: 142308 - DNA, 765 bp, synthetic construct
  misc_feature 1..765: note = Description of Artificial Sequence: Synthetic coding sequence
  source 1..765: mol_type = other DNA
atgtgtgatgaagatgagaccacagccctggtgtgtgacaatggcagcggcctggtgaaggccggctttgctggagatgatgcccccagggctgtgttccccagcatcgtgggccggcccaggcaccagggcgtgatggtgggcatgggccagaaggacagctatgtgggagatgaggcccagagcaagaggggcatcctgaccctgaagtaccccattgaacatggcatcatcaccaactgggatgacatggagaagatctggcaccacaccttctacaatgagctgcgggtggcccctgaggagcaccccaccctgctgacagaggcccccctgaaccccaaggccaaccgggagaagatgacccagatcatgtttgagaccttcaacgtgcctgccatgtatgtggccatccaggccgtgctgagcctgtatgccagcggccgcaccactggaattgtgctggacagcggagatggcatcatgaagtgtgacatcgacatcaggaaggacctgtatgccaacaacgtgatgtctgggggcaccaccatgtacccaggcattgctgacaggatgcagaaggagatcacagccctggcccccagcaccatgaagatcaagatcatcgcccctcctgagaggaagtacagcgtgtggattggaggcagcatcctggccagcctgagcaccttccagcagatgtggatcaccaagcaggagtatgatgaggccggccccagcatcgtgcacaggaagtgcttctag

SEQ ID NO: 142309 - DNA, 1029 bp, synthetic construct
  misc_feature 1..1029: note = Description of Artificial Sequence: Synthetic coding sequence
  source 1..1029: mol_type = other DNA
atgtgtgatgaagatgagaccacagccctggtgtgtgacaatggcagcggcctggtgaaggccggctttgctggagatgatgcccccagggctgtgttccccagcatcgtgggccggcccaggcaccagggcgtgatggtgggcatgggccagaaggacagctatgtgggagatgaggcccagagcaagaggggcatcctgaccctgaagtaccccattgaacatggcatcatcaccaaggccaaccgggagaagatgacccagatcatgtttgagaccttcaacgtgcctgccatgtatgtggccatccaggccgtgctgagcctgtatgccagcggccgcaccaccggcatcgtgctggacagcggagatggagtgacccacaacgtgcccatctatgagggctacgccctgccccacgccatcatgaggctggacctggccggccgggacctgacagactacctgatgaagatcctgacagagcggggctacagctttgtgaccacagctgagcgggagatcgtgcgggacatcaaggagaagctgtgctacgtggccctggactttgaaaatgagatggccacagctgccagcagcagcagcctggagaagagctatgagctgcctgatggccaggtgatcaccatcggaaatgaacgcttccgctgcccagagaccctcttccagcccagcttcatcggcatggagagcgctggcatccacgagaccacctacaacagcatcatgaagtgtgacatcgacatcaggaaggacctgtatgccaacaacgtgatgtctgggggcaccaccatgtacccaggcattgctgacaggatgcagaaggagatcacagccctggcccccagcaccatgaagatcaagatcatcgcccctcctgagaggaagtacagcgtgtggattggaggcagcatcctggccagcctgagcaccttccagcagatgtggatcaccaagcaggagtatgatgaggccggccccagcatcgtgcacaggaagtgcttctag

SEQ ID NO: 142310 - DNA, 870 bp, synthetic construct
  misc_feature 1..870: note = Description of Artificial Sequence: Synthetic coding sequence
  source 1..870: mol_type = other DNA
atgtgtgatgaagatgagaccacagccctggtgtgtgacaatggcagcggcctggtgaaggccggctttgctggagatgatgcccccagggctgtgttccccagcatcgtgggccggcccaggcaccagggcgtgatggtgggcatgggccagaaggacagctatgtgggagatgaggcccagagcaagaggggcatcctgaccctgaagtaccccattgaacatggcatcatcaccaactgggatgacatggagaagatctggcaccacaccttctacaatgagctgcgggtggcccctgaggagcaccccaccctgctgacagaggcccccctgaaccccaaggccaaccctgagcgggagatcgtgcgggacatcaaggagaagctgtgctacgtggccctggactttgaaaatgagatggccacagctgccagcagcagcagcctggagaagagctatgagctgcctgatggccaggtgatcaccatcggaaatgaacgcttccgctgcccagagaccctcttccagcccagcttcatcggcatggagagcgctggcatccacgagaccacctacaacagcatcatgaagtgtgacatcgacatcaggaaggacctgtatgccaacaacgtgatgtctgggggcaccaccatgtacccaggcattgctgacaggatgcagaaggagatcacagccctggcccccagcaccatgaagatcaagatcatcgcccctcctgagaggaagtacagcgtgtggattggaggcagcatcctggccagcctgagcaccttccagcagatgtggatcaccaagcaggagtatgatgaagctggccccagcatcgtgcacaggaagtgcttctag

SEQ ID NO: 142311 - DNA, 1134 bp, synthetic construct
  misc_feature 1..1134: note = Description of Artificial Sequence: Synthetic coding sequence
  source 1..1134: mol_type = other DNA
atgtgtgatgaagatgagaccacagccctggtgtgtgacaatggcagcggcctggtgaaggccggctttgctggagatgatgcccccagggctgtgttccccagcatcgtgggccggcccaggcaccagggcgtgatggtgggcatgggccagaaggacagctatgtgggagatgaggcccagagcaagaggggcatcctgaccctgaagtaccccattgaacatggcatcatcaccaactgggatgacatggagaagatctggcaccacaccttctacaatgagctgcgggtggcccctgaggagcaccccaccctgctgacagaggcccccctgaaccccaaggccaaccgggagaagatgacccagatcatgtttgagaccttcaacgtgcctgccatgtatgtggccatccaggccgtgctgagcctgtatgccagcggccgcaccactggaattgtgctggacagcggagatggagtgacccacaacgtgcccatctatgagggctacgccctgccccacgccatcatgaggctggacctggccggccgggacctgacagactacctgatgaagatcctgacagagcggggctacagctttgtgaccacagctgagcgggagatcgtgcgggacatcaaggagaagctgtgctacgtggccctggactttgaaaatgagatggccacagctgccagcagcagcagcctggagaagagctatgagctgcctgatggccaggtgatcaccatcggaaatgaacgcttccgctgcccagagaccctcttccagcccagcttcatcggcatggagagcgctggcatccacgagaccacctacaacagcatcatgaagtgtgacatcgacatcaggaaggacctgtatgccaacaacgtgatgtctgggggcaccaccatgtacccaggcattgctgacaggatgcagaaggagatcacagccctggcccccagcaccatgaagatcaagatcatcgcccctcctgagaggaagtacagcgtgtggattggaggcagcatcctggccagcctgagcaccttccagcagatgtggatcaccaagcaggagtatgatgaagctggccccagcatcgtgcacaggaagtgcttctag

SEQ ID NO: 142312 - DNA, 1146 bp, synthetic construct
  misc_feature 1..1146: note = Description of Artificial Sequence: Synthetic coding sequence
  source 1..1146: mol_type = other DNA
atggcccctggagagaaggagagcggggagggccctgccaagagcgccctgaggaagatcagaacagccaccctggtgatcagcctggcccggggctggcagcagtgggccaatgaaaattccatccggcaggcccaggagcccaccggctggctgcccggcggcacccaggacagcccccaggcccccaagcccatcaccccacccaccagccaccagaaggcccagagcgcccccaagagccccccccggctgcctgagggccatggagatggccagagcagcgagaaggcccctgaggtgagccacatcaagaagaaggaggtgtccaagacagtggtgtccaagacctatgaaagaggaggagatgtgagccacctgagccacagatatgaaagagatgctggggtgctggagcccggccagccagaaaatgacatcgaccgcatcctgcacagccacggcagccccaccaggaggaggaaatgtgccaacctggtgtctgagctgaccaagggctggagggtgatggagcaggaggagcccacctggaggagtgacagcgtggacacagaggacagcggctacggcggggaggccgaggagaggcctgagcaggatggagtgcaggtggccgtggtgcgcatcaagaggcccctgcccagccaggtgaaccgcttcacagagaagctgaactgcaaggcccagcagaagtacagccctgtgggcaacctgaagggccgctggcagcagtgggcagatgagcacatccagagccagaagctgaaccccttcagcgaggagtttgattatgagctggccatgagcacccggctgcacaagggagatgagggctacggccggcccaaggagggcaccaagacagctgagcgggccaagagagctgaggagcacatctaccgggagatgatggacatgtgcttcatcatctgcaccatggcccggcacagaagagatggcaagatccaggtgacctttggagacctgtttgaccgctacgtgcgcatcagtgacaaggtggtgggcatcctgatgagggccaggaagcacggcctggtggactttgaaggagagatgctgtggcagggcagagatgaccacgtggtgatcaccctgctgaagtag

SEQ ID NO: 142313 - DNA, 2685 bp, synthetic construct
  misc_feature 1..2685: note = Description of Artificial Sequence: Synthetic coding sequence
  source 1..2685: mol_type = other DNA
atgaaccagatcgagcccggggtgcagtacaactacgtgtatgatgaagatgagtacatgatccaggaggaggagtgggaccgggacctgctgctggaccctgcctgggagaagcagcagaggaagaccttcaccgcctggtgcaacagccacctgaggaaggccggcacccagatcgagaacatcgaggaggacttcagaaatggcctgaagctgatgctgctgctggaggtgatcagcggggagcggctgcccaagccagaccggggcaagatgaggttccacaagatcgccaacgtgaacaaggccctggactacatcgccagcaagggcgtgaagctggtgtccattggagctgaggagatcgtggatggaaatgtgaagatgaccctgggcatgatctggaccatcatcctgcgctttgccatccaggacatctctgtggaggagaccagcgccaaggagggcctgctgctgtggtgccagaggaagacagccccctacagaaatgtgaacatccagaacttccacacctcctggaaggatggcctgggcctgtgtgccctgatccaccgccacaggccagacctgattgactacagcaagctgaacaaggatgaccccatcggcaacatcaacctggccatggagattgctgagaagcacctggacatccccaagatgctggatgctgaggacatcgtgaacacccccaagccagatgagcgggccatcatgacctacgtgtcctgcttctaccacgcctttgctggagctgagcaggccgagacagctgccaaccgcatctgcaaggtgctggccgtgaaccaggagaatgaaaggctgatggaggagtatgaaaggctggccagcgagctgctggagtggatccggaggaccatcccctggctggagaacagaacacctgagaagaccatgcaggccatgcagaagaagctggaggacttccgggactacagaaggaagcacaagccacccaaggtgcaggagaagtgccagctggagatcaacttcaacaccctgcagaccaagctgcgcatcagcaacagacctgccttcatgcccagcgagggcaagatggtgtctgacattgctggggcctggcagaggctggagcaggccgagaagggctatgaggagtggctgctgaatgagatccggcggctggagcggctggagcacctggccgagaagttccggcagaaggccagcacccatgagacctgggcctacggcaaggagcagatcctgctgcagaaggactatgaaagtgccagcctgacagaggtgcgggccctgctgaggaagcatgaggcctttgaaagtgacctggccgcccaccaggacagagtggagcagattgctgccatcgcccaggagctgaatgagctggactaccatgatgctgtgaatgtgaatgaccgctgccagaagatctgtgaccagtgggaccggctgggcaccctgacccagaagaggcgggaggccctggagaggatggagaagctgctggagaccatcgaccagctgcacctggagtttgccaagagagctgcccccttcaacaactggatggagggcgccatggaggacctgcaggacatgttcatcgtgcacagcattgaggagatccagagcctcatcacagcccacgagcagttcaaggccaccctgcctgaggctgatggagagcggcagagcatcatggccatccagaatgaggtggagaaggtgatccagagctacaacatccgcatcagcagcagcaacccctacagcacagtgaccatggatgagctgcggaccaagtgggacaaggtgaagcagctggtgcccatccgggaccagagcctgcaggaggagctggcccggcagcacgccaatgaaaggctgcggcggcagtttgctgcccaggccaatgccatcggcccctggatccagaacaagatggaggagatcgcccggagcagcatccagatcaccggggccctggaggaccagatgaaccagctgaagcagtatgagcacaacatcatcaactacaagaacaacatcgacaagctggagggggaccaccagctgatccaggaggccctggtgtttgacaacaagcacaccaactacaccatggagcacatccgggtgggctgggagctgctgctgaccaccatcgcccggaccatcaatgaggtggagacccagatcctgaccagagatgccaagggcatcacccaggagcagatgaatgagttccgggccagcttcaaccactttgacaggaggaagaatggcctgatggaccacgaggacttccgggcctgcctgatctccatgggctatgacctgggggaggccgagtttgcccgcatcatgaccctggtggaccccaacggccagggcaccgtgaccttccagagcttcatcgacttcatgacccgggagacagctgacacagacacagctgagcaggtgattgccagcttccgcatcctggccagtgacaagccctacatcctggccgaggagctgcggcgggagctgcccccagaccaggcccagtactgcatcaagaggatgcctgcctacagcggccctggctctgtgcctggggccctggactatgctgccttcagcagcgccctgtatggagagagtgacctgtag

SEQ ID NO: 142314 - DNA, 2685 bp, synthetic construct
  misc_feature 1..2685: note = Description of Artificial Sequence: Synthetic coding sequence
  source 1..2685: mol_type = other DNA
atgaaccagatcgagcccggggtgcagtacaactacgtgtatgatgaagatgagtacatgatccaggaggaggagtgggaccgggacctgctgctggaccctgcctgggagaagcagcagaggaagaccttcaccgcctggtgcaacagccacctgaggaaggccggcacccagatcgagaacatcgaggaggacttcagaaatggcctgaagctgatgctgctgctggaggtgatcagcggggagcggctgcccaagccagaccggggcaagatgaggttccacaagatcgccaacgtgaacaaggccctggactacatcgccagcaagggcgtgaagctggtgtccattggagctgaggagatcgtggatggaaatgtgaagatgaccctgggcatgatctggaccatcatcctgcgctttgccatccaggacatctctgtggaggagaccagcgccaaggagggcctgctgctgtggtgccagaggaagacagccccctacagaaatgtgaacatccagaacttccacacctcctggaaggatggcctgggcctgtgtgccctgatccaccgccacaggccagacctgattgactacagcaagctgaacaaggatgaccccatcggcaacatcaacctggccatggagattgctgagaagcacctggacatccccaagatgctggatgctgaggacctggtgtacacagcccggccagatgagcgggccatcatgacctacgtgtcctgctactaccacgcctttgctggggcccagaaggccgagacagctgccaaccgcatctgcaaggtgctggccgtgaaccaggagaatgaaaggctgatggaggagtatgaaaggctggccagcgagctgctggagtggatccggaggaccatcccctggctggagaacagaacacctgagaagaccatgcaggccatgcagaagaagctggaggacttccgggactacagaaggaagcacaagccacccaaggtgcaggagaagtgccagctggagatcaacttcaacaccctgcagaccaagctgcgcatcagcaacagacctgccttcatgcccagcgagggcaagatggtgtctgacattgctggggcctggcagaggctggagcaggccgagaagggctatgaggagtggctgctgaatgagatccggcggctggagcggctggagcacctggccgagaagttccggcagaaggccagcacccatgagacctgggcctacggcaaggagcagatcctgctgcagaaggactatgaaagtgccagcctgacagaggtgcgggccctgctgaggaagcatgaggcctttgaaagtgacctggccgcccaccaggacagagtggagcagattgctgccatcgcccaggagctgaatgagctggactaccatgatgctgtgaatgtgaatgaccgctgccagaagatctgtgaccagtgggaccggctgggcaccctgacccagaagaggcgggaggccctggagaggatggagaagctgctggagaccatcgaccagctgcacctggagtttgccaagagagctgcccccttcaacaactggatggagggcgccatggaggacctgcaggacatgttcatcgtgcacagcattgaggagatccagagcctcatcacagcccacgagcagttcaaggccaccctgcctgaggctgatggagagcggcagagcatcatggccatccagaatgaggtggagaaggtgatccagagctacaacatccgcatcagcagcagcaacccctacagcacagtgaccatggatgagctgcggaccaagtgggacaaggtgaagcagctggtgcccatccgggaccagagcctgcaggaggagctggcccggcagcacgccaatgaaaggctgcggcggcagtttgctgcccaggccaatgccatcggcccctggatccagaacaagatggaggagatcgcccggagcagcatccagatcaccggggccctggaggaccagatgaaccagctgaagcagtatgagcacaacatcatcaactacaagaacaacatcgacaagctggagggggaccaccagctgatccaggaggccctggtgtttgacaacaagcacaccaactacaccatggagcacatccgggtgggctgggagctgctgctgaccaccatcgcccggaccatcaatgaggtggagacccagatcctgaccagagatgccaagggcatcacccaggagcagatgaatgagttccgggccagcttcaaccactttgacaggaggaagaatggcctgatggaccacgaggacttccgggcctgcctgatctccatgggctatgacctgggggaggccgagtttgcccgcatcatgaccctggtggaccccaacggccagggcaccgtgaccttccagagcttcatcgacttcatgacccgggagacagctgacacagacacagctgagcaggtgattgccagcttccgcatcctggccagtgacaagccctacatcctggccgaggagctgcggcgggagctgcccccagaccaggcccagtactgcatcaagaggatgcctgcctacagcggccctggctctgtgcctggggccctggactatgctgccttcagcagcgccctgtatggagagagtgacctgtag

SEQ ID NO: 142315 - DNA, 1992 bp, synthetic construct
  misc_feature 1..1992: note = Description of Artificial Sequence: Synthetic coding sequence
  source 1..1992: mol_type = other DNA
agcaccctgagctctgtggagggccccccagagagcagcacctgcagctaccaggagatgagaagaagctctgtgaacagcagcgccatggccgagacagctgccaaccgcatctgcaaggtgctggccgtgaaccaggagaatgaaaggctgatggaggagtatgagcggctggccagcgagctgctggagtggatccggaggaccatcccctggctggagaacagaacacctgagaagaccatgcaggccatgcagaagaagctggaggacttccgggactacagaaggaagcacaagccacccaaggtgcaggagaagtgccagctggagatcaacttcaacaccctgcagaccaagctgcgcatcagcaacagacctgccttcatgcccagcgagggcaagatggtgtctgacattgctggggcctggcagaggctggagcaggccgagaagggctatgaggagtggctgctgaatgagatccggcggctggagcggctggagcacctggccgagaagttccggcagaaggccagcacccatgagacctgggcctacggcaaggagcagatcctgctgcagaaggactatgagagcgccagcctgacagaggtgcgggccctgctgaggaagcatgaggcctttgaaagtgacctggccgcccaccaggacagagtggagcagattgctgccatcgcccaggagctgaatgagctggactaccatgatgctgtgaatgtgaatgaccgctgccagaagatctgtgaccagtgggaccggctgggcaccctgacccagaagagaagagaggccctggagaggatggagaagctgctggagaccatcgaccagctgcacctggagtttgccaagagagctgcccccttcaacaactggatggagggcgccatggaggacctgcaggacatgtttattgtgcacagcattgaggagatccagagcctcatcacagcccacgagcagttcaaggccaccctgcctgaggctgatggagagcggcagagcatcatggccatccagaatgaggtggagaaggtgatccagagctacaacatccgcatcagcagcagcaacccctacagcacagtgaccatggatgagctgcggaccaagtgggacaaggtgaagcagctggtgcccatccgggaccagagcctgcaggaggagctggcccggcagcacgccaatgaaaggctgcggcggcagtttgctgcccaggccaatgccatcggcccctggatccagaacaagatggaggagatcgcccggagcagcatccagatcactggagccctggaggaccagatgaaccagctgaagcagtatgagcacaacatcatcaactacaagaacaacatcgacaagctggagggggaccaccagctgatccaggaggccctggtgtttgacaacaagcacaccaactacaccatggagcacatccgggtgggctgggagctgctgctgaccaccatcgcccggaccatcaatgaggtggagacccagatcctgaccagagatgccaagggcatcacccaggagcagatgaatgagttccgggccagcttcaaccactttgacaggaggaagaatggcctgatggaccacgaggacttccgggcctgcctgatctccatgggctatgacctgggggaggccgagtttgcccgcatcatgaccctggtggaccccaacggccagggcaccgtgaccttccagagcttcatcgacttcatgacccgggagacagctgacacagacacagctgagcaggtgattgccagcttccgcatcctggccagtgacaagccctacatcctggccgaggagctgcggcgggagctgcccccagaccaggcccagtactgcatcaagaggatgcctgcctacagcggccctggctctgtgcctggggccctggactatgctgccttcagcagcgccctgtatggagagagtgacctgtag

SEQ ID NO: 142316 - DNA, 1167 bp, synthetic construct
  misc_feature 1..1167: note = Description of Artificial Sequence: Synthetic coding sequence
  source 1..1167: mol_type = other DNA
atggagaagctgctggagaccatcgaccagctgcacctggagtttgccaagagagctgcccccttcaacaactggatggagggcgccatggaggacctgcaggacatgttcatcgtgcacagcattgaggagatccagagcctcatcacagcccacgagcagttcaaggccaccctgcctgaggctgatggagagcggcagagcatcatggccatccagaatgaggtggagaaggtgatccagagctacaacatccgcatcagcagcagcaacccctacagcacagtgaccatggatgagctgcggaccaagtgggacaaggtgaagcagctggtgcccatccgggaccagagcctgcaggaggagctggcccggcagcacgccaatgaaaggctgcggcggcagtttgctgcccaggccaatgccatcggcccctggatccagaacaagatggaggagatcgcccggagcagcatccagatcaccggggccctggaggaccagatgaaccagctgaagcagtatgagcacaacatcatcaactacaagaacaacatcgacaagctggagggggaccaccagctgatccaggaggccctggtgtttgacaacaagcacaccaactacaccatggagcacatccgggtgggctgggagctgctgctgaccaccatcgcccggaccatcaatgaggtggagacccagatcctgaccagagatgccaagggcatcacccaggagcagatgaatgagttccgggccagcttcaaccactttgacaggaggaagaatggcctgatggaccacgaggacttccgggcctgcctgatctccatgggctatgacctgggggaggccgagtttgcccgcatcatgaccctggtggaccccaacggccagggcaccgtgaccttccagagcttcatcgacttcatgacccgggagacagctgacacagacacagctgagcaggtgattgccagcttccgcatcctggccagtgacaagccctacatcctggccgaggagctgcggcgggagctgcccccagaccaggcccagtactgcatcaagaggatgcctgcctacagcggccctggctctgtgcctggggccctggactatgctgccttcagcagcgccctgtatggagagagtgacctgtag

SEQ ID NO: 142317 - DNA, 1131 bp, synthetic construct
  misc_feature 1..1131: note = Description of Artificial Sequence: Synthetic coding sequence
  source 1..1131: mol_type = other DNA
atgttcaacccccacgccctggatgtgcctgctgtgatctttgacaatggcagcggcctgtgcaaggccggcctgagcggggagatcggccccaggcatgtgatcagctctgtgctgggccactgcaagttcaacgtgcccctggcccggctgaaccagaagtactttgtgggccaggaggccctgtacaagtatgaggccctgcacctgcactaccccatcgagcggggcctggtgacaggctgggatgacatggagaagctgtggaagcacctgtttgagcgggagctgggcgtgaagcccagccagcagcctgtgctgatgacagagcccagcctgaacccccgggagatccgggagaagctggccgagatgatgtttgagaccttctctgtgcccggcttctacctgagcaaccacgctgtggccgccctgtatgccagcgcctgtgtgacaggcctggtggtggacagcggagatggagtgacctgcaccgtgcccatctttgagggctacagcctgccccatgctgtgaccaagctgtgcatggccggccgggacatcacagagcacctgacccggctgctgtttgccagcggcttcaacttcccctgcatcctgaacaaggctgtggtgaacaacatcaaggagaagctgtgctacatcgccctggagcctgagaaggagctgaggaagagcagaggagaggtgctgggcgcctaccgcctgcctgatggccacgtgatccactttggagatgagctgtaccaggtgcctgaggtgctgtttgccccagaccagctgggcatccacagccctggcctgagcaagatggtgagcagcagcatcatgaagtgtgacacagacatccagaacaagctgtatgctgacatcgtgctgagcggcggcaccaccctgctgcccggcctggaggagcggctgatgaaggaggtggagcagctggccagcaagggcacccccatcaagatcacagccagcccagaccgctgcttcagcgcctggattggagccagcatcatgacctccatgagcagcttcaagcagatgtgggtgaccagcgctgacttcaaggagtatggcacctctgtggtgcagaggcgctgcttctag

SEQ ID NO: 142318 - DNA, 1134 bp, synthetic construct
  misc_feature 1..1134: note = Description of Artificial Sequence: Synthetic coding sequence
  source 1..1134: mol_type = other DNA
atgttcaacccccacgccctggacagccctgctgtgatctttgacaatggcagcggcttctgcaaggccggcctgagcggggagtttggccccaggcacatggtgagcagcatcgtgggccacctgaagttccaggcccccagcgctgaggccaaccagaagaagtactttgtgggggaggaggccctgtacaagcaggaggccctgcagctgcacagcccctttgagcggggcctcatcaccggctgggatgatgtggagcggctgtggaagcacctgtttgagtgggagctgggcgtgaagcccagcgaccagcccctgctggccacagagcccagcctgaacccccgggagaaccgggagaagatggccgaggtgatgtttgaaaattttggagtgcctgccttctacctgagtgaccaggccgtgctggccctgtatgccagcgcctgtgtgacaggcctggtggtggacagcggagatgctgtgacctgcaccgtgcccatctttgagggctacagcctgccccatgctgtgaccaagctgcacgtggccggccgggacatcacagagctgctgatgcagctgctgctggccagcggccacaccttcccctgccagctggacaagggcctggtggatgacatcaagaagaagctgtgctacgtggccctggagcctgagaaggagctgagcagaagacctgaggaggtgctgcgggagtacaagctgcctgatggcaacatcatcagcctgggggaccccctgcaccaggcccctgaggccctgtttgtgccccagcagctgggcagccagagccctggcctgagcaacatggtgagcagcagcatcaccaagtgtgacacagacatccagaagatcctgtttggagaaattgtgctgagcggcggcaccaccctcttccacggcctggatgaccggctgctgaaggagctggagcagctggccagcaaggacacccccatcaagatcacagcccccccagaccgctggttcagcacctggattggagccagcatcgtgaccagcctgagcagcttcaagcagatgtgggtgacagctgctgacttcaaggagtttggcacctctgtggtgcagaggcgctgcttctag

SEQ ID NO: 142319 - DNA, 987 bp, synthetic construct
  misc_feature 1..987: note = Description of Artificial Sequence: Synthetic coding sequence
  source 1..987: mol_type = other DNA
atgttcaacccccacgccctggacagccctgctgtgatctttgacaatggcagcggcttctgcaaggccggcctgagcggggagtttggccccaggcacatggtgagcagcatcgtgggccacctgaagttccaggcccccagcgctgaggccaaccagaagaagtactttgtgggggaggaggccctgtacaagcaggaggccctgcagctgcacagcccctttgagcggggcctcatcaccggctgggatgatgtggagcggctgtggaagcacctgtttgagtgggagctgggcgtgaagcccagcgaccagcccctgctggccacagagcccagcctgaacccccgggagaaccgggagaagatggccgaggtgatgtttgaaaattttggagtgcctgccttctacctgagtgaccaggccgtgctggccctgtatgccagcgcctgtgtgacaggcctggtggtggacagcggagatgctgtgacctgcaccgtgcccatctttgagggctacagcctgccccatgctgtgaccaagctgcacgtggccggccgggacatcacagagctgctgatgcagctgctgctggccagcggccacaccttcccctgccagctggacaagggcctggtggatgacatcaagaagaagctgtgctacgtggccctggagcctgagaaggagctgagcagaagacctgaggaggtgctgcgggagtacaagctgcctgatggcaacatcatcagcctgggggaccccctgcaccaggcccctgaggccctgtttgtgccccagcagctgggcagccagagccctggcctgagcaacatggtgagcagcagcatcaccaagtgtgacacagacatccagaagatcctgtttggagaaattgtgctgagcggcggcaccaccctcttccacggcctggatgaccggctgctgcacctggactggagcctgcaccgccacctgtctgagtag

SEQ ID NO: 142320 - DNA, 1752 bp, synthetic construct
  misc_feature 1..1752: note = Description of Artificial Sequence: Synthetic coding sequence
  source 1..1752: mol_type = other DNA
atggagagcaagggggccagcagctgccgcctgctcttctgcctgctgatcagcgccaccgtcttccggcccggcctgggctggtacacagtgaacagcgcctatggagacaccatcatcatcccctgccgcctggatgtgccccagaacctgatgtttgggaagtggaagtatgagaagccagatggcagccctgtgttcatcgccttccgcagcagcaccaagaagtctgtgcagtatgatgatgtgcctgagtacaaggaccggctgaacctgtctgagaactacaccctgagcatcagcaatgcccgcatcagtgatgagaagagatttgtgtgcatgctggtgacagaggacaacgtgtttgaggcccccaccatcgtgaaggtgttcaagcagcccagcaagccagaaattgtgtccaaggccctcttcctggagacagagcagctgaagaagctgggggactgcatcagcgaggacagctacccagatggcaacatcacctggtacagaaatggcaaggtgctgcaccccctggagggcgctgtggtgatcatcttcaagaaggagatggaccctgtgacccagctgtacaccatgaccagcaccctggagtacaagaccaccaaggctgacatccagatgcccttcacctgcagcgtgacctactacggccccagcggccagaagaccatccacagcgagcaggccgtgtttgacatctactaccccacagagcaggtgaccatccaggtgctgccccccaagaatgccatcaaggagggggacaacatcaccctgaagtgcctgggcaatggaaaccccccacctgaggagttcctgttctacctgcccggccagcctgagggcatccgcagcagcaacacctacaccctgacagatgtgagaagaaatgccaccggggactacaagtgcagcctgattgacaagaagtccatgattgccagcacagccatcaccgtgcactacctggacctgagcctgaaccccagcggggaggtgacccggcagattggagatgccctgcctgtgtcctgcaccatcagcgccagcagaaatgccaccgtggtgtggatgaaggacaacatccggctgcggagcagccccagcttcagcagcctgcactaccaggatgctggcaactacgtgtgtgaaacagccctgcaggaggtggagggcctgaagaagcgggagagcctgaccctgattgtggagggcaagccccagatcaagatgaccaagaagacagaccccagcggcctgagcaagaccatcatctgccacgtggagggcttccccaagccagccatccagtggaccatcaccggcagcggcagcgtcatcaaccagacagaggagagcccctacatcaatggccgctactacagcaagatcatcatcagcccagaagaaaatgtgaccctgacctgcacagctgagaaccagctggagaggacagtgaacagcctgaatgtgtctgccatcagcatccctgagcatgatgaagcagatgagatcagtgatgaaaatcgggagaaggtgaatgaccaggccaagctgattgtgggcatcgtggtgggcctgctgctggccgccctggtggccggcgtggtgtactggctgtacatgaagaagagcaagacagccagcaagcacgtgaacaaggacctgggcaacatggaggagaacaagaagctggaggagaacaaccacaagacagaggcctag

SEQ ID NO: 142321 - DNA, 918 bp, synthetic construct
  misc_feature 1..918: note = Description of Artificial Sequence: Synthetic coding sequence
  source 1..918: mol_type = other DNA
atggaccctgtgacccagctgtacaccatgaccagcaccctggagtacaagaccaccaaggctgacatccagatgcccttcacctgcagcgtgacctactacggccccagcggccagaagaccatccacagcgagcaggccgtgtttgacatctactacctggacctgagcctgaaccccagcggggaggtgacccggcagattggagatgccctgcctgtgtcctgcaccatcagcgccagcagaaatgccaccgtggtgtggatgaaggacaacatccggctgcggagcagccccagcttcagcagcctgcactaccaggatgctggcaactacgtgtgtgaaacagccctgcaggaggtggagggcctgaagaagcgggagagcctgaccctgattgtggagggcaagccccagatcaagatgaccaagaagacagaccccagcggcctgagcaagaccatcatctgccacgtggagggcttccccaagccagccatccagtggaccatcaccggcagcggcagcgtcatcaaccagacagaggagagcccctacatcaatggccgctactacagcaagatcatcatcagcccagaagaaaatgtgaccctgacctgcacagctgagaaccagctggagaggacagtgaacagcctgaatgtgtctgccatcagcatccctgagcatgatgaagcagatgagatcagtgatgaaaatcgggagaaggtgaatgaccaggccaagctgattgtgggcatcgtggtgggcctgctgctggccgccctggtggccggcgtggtgtactggctgtacatgaagaagagcaagacagccagcaagcacgtgaacaaggacctgggcaacatggaggagaacaagaagctggaggagaacaaccacaagacagaggcctag

SEQ ID NO: 142322 - DNA, 1035 bp, synthetic construct
  misc_feature 1..1035: note = Description of Artificial Sequence: Synthetic coding sequence
  source 1..1035: mol_type = other DNA
tgactgggggactgcatcagcgaggacagctacccagatggcaacatcacctggtacagaaatggcaaggtgctgcaccccctggagggcgctgtggtgatcatcttcaagaaggagatggaccctgtgacccagctgtacaccatgaccagcaccctggagtacaagaccaccaaggctgacatccagatgcccttcacctgcagcgtgacctactacggccccagcggccagaagaccatccacagcgagcaggccgtgtttgacatctactacctggacctgagcctgaaccccagcggggaggtgacccggcagattggagatgccctgcctgtgtcctgcaccatcagcgccagcagaaatgccaccgtggtgtggatgaaggacaacatccggctgcggagcagccccagcttcagcagcctgcactaccaggatgctggcaactacgtgtgtgaaacagccctgcaggaggtggagggcctgaagaagcgggagagcctgaccctcatcgtggagggcaagccccagatcaagatgaccaagaagacagaccccagcggcctgagcaagaccatcatctgccacgtggagggcttccccaagccagccatccagtggaccatcactggaagtggcagcgtcatcaaccagacagaggagagcccctacatcaatggccgctactacagcaagatcatcatcagccctgaggagaatgtgaccctgacctgcacagctgagaaccagctggagaggacagtgaacagcctgaatgtgtctgccatcagcatccctgagcatgatgaagcagatgagatcagtgatgagaaccgggagaaggtgaatgaccaggccaagctgattgtgggcatcgtggtgggcctgctgctggccgccctggtggccggcgtggtgtactggctgtacatgaagaagagcaagacagccagcaagcacgtgaacaaggacctgggcaacatggaggagaacaagaagctggaggagaacaaccacaagacagaggcctag

SEQ ID NO: 142323 - DNA, 1713 bp, synthetic construct
  misc_feature 1..1713: note = Description of Artificial Sequence: Synthetic coding sequence
  source 1..1713: mol_type = other DNA
atggagagcaagggggccagcagctgccgcctgctcttctgcctgctgatcagcgccaccgtcttccggcccggcctgggctggtacacagtgaacagcgcctatggagacaccatcatcatcccctgccgcctggatgtgccccagaacctgatgtttgggaagtggaagtatgagaagccagatggcagccctgtgttcatcgccttccgcagcagcaccaagaagtctgtgcagtatgatgatgtgcctgagtacaaggaccggctgaacctgtctgagaactacaccctgagcatcagcaatgcccgcatcagtgatgagaagagatttgtgtgcatgctggtgacagaggacaacgtgtttgaggcccccaccatcgtgaaggtgttcaagcagcccagcaagccagaaattgtgtccaaggccctcttcctggagacagagcagctgaagaagctgggggactgcatcagcgaggacagctacccagatggcaacatcacctggtacagaaatggcaaggtgctgcaccccctggagggcgctgtggtgatcatcttcaagaaggagatggaccctgtgacccagctgtacaccatgaccagcaccctggagtacaagaccaccaaggctgacatccagatgcccttcacctgcagcgtgacctactacggccccagcggccagaagaccatccacagcgagcaggccgtgtttgacatctactaccccacagagcaggtgaccatccaggtgctgccccccaagaatgccatcaaggagggggacaacatcaccctgaagtgcctgggcaatggaaaccccccacctgaggagttcctgttctacctgcccggccagcctgagggcatccgcagcagcaacacctacaccctgacagatgtgagaagaaatgccaccggggactacaagtgcagcctgattgacaagaagtccatgattgccagcacagccatcaccgtgcactacctggacctgagcctgaaccccagcggggaggtgacccggcagattggagatgccctgcctgtgtcctgcaccatcagcgccagcagaaatgccaccgtggtgtggatgaaggacaacatccggctgcggagcagccccagcttcagcagcctgcactaccaggatgctggcaactacgtgtgtgaaacagccctgcaggaggtggagggcctgaagaagcgggagagcctgaccctgattgtggagggcaagccccagatcaagatgaccaagaagacagaccccagcggcctgagcaagaccatcatctgccacgtggagggcttccccaagccagccatccagtggaccatcaccggcagcggcagcgtcatcaaccagacagaggagagcccctacatcaatggccgctactacagcaagatcatcatcagcccagaagaaaatgtgaccctgacctgcacagctgagaaccagctggagaggacagtgaacagcctgaatgtgtctgccaatgaaaatcgggagaaggtgaatgaccaggccaagctgattgtgggcatcgtggtgggcctgctgctggccgccctggtggccggcgtggtgtactggctgtacatgaagaagagcaagacagccagcaagcacgtgaacaaggacctgggcaacatggaggagaacaagaagctggaggagaacaaccacaagacagaggcctag

SEQ ID NO: 142324 - DNA, 1074 bp, synthetic construct
  misc_feature 1..1074: note = Description of Artificial Sequence: Synthetic coding sequence
  source 1..1074: mol_type = other DNA
atggaggtgctgcggccccagctgatcagaattgatggcaggaactacaggaagaaccctgtgcaggagcagacctaccagcacgaggaggatgaggaggacttctaccagggctccatggagtgtgctgatgagccctgtgatgcctatgaggtggagcagaccccccagggcttccgcagcaccctgcgggcccccagcctgctgtacaagcacatcgtgggcaagagaggagacaccaggaagaagattgagatggagaccaagaccagcatcagcatccccaagccaggccaggatggagaaattgtcatcaccggccagcacagaaatggagtcatcagcgcccggaccagaattgatgtgctgctggacaccttccggaggaagcagcccttcacccacttcctggccttcttcctgaatgaggtggaggtgcaggagggcttcctgcgcttccaggaggaggtgctggccaagtgcagcatggaccatggagtggacagcagcatcttccagaaccccaagaagctgcacctgaccatcggcatgctggtgctgctgtctgaggaggagatccagcagacctgtgagatgctgcagcagtgcaaggaggagttcatcaatgacatcagcggcggcaagcccctggaggtggagatggccggcatcgagtacatgaatgatgatcctggcatggtggatgtgctgtatgccaaggtgcacatgaaggatggcagcaaccggctgcaggagctggtggacagagtgctggagcgcttccaggccagcggcctgattgtgaaggagtggaacagcgtgaagctgcacgccaccgtgatgaacaccctcttcaggaaggaccccaatgctgagggccgctacaacctgtacacagctgagggcaagtacatcttcaaggagcgggagagctttgatggaagaaacatcctgaagctgtttgagaacttctacttcggcagcctgaagctgaacagcatccacatcagccagcgcttcaccgtggacagctttggaaattatgccagctgtggccagattgacttctcctag

SEQ ID NO: 142325 - DNA, 1074 bp, synthetic construct; identical to SEQ ID NO: 142324
  misc_feature 1..1074: note = Description of Artificial Sequence: Synthetic coding sequence
  source 1..1074: mol_type = other DNA

SEQ ID NO: 142326 - DNA, 1203 bp, synthetic construct
  misc_feature 1..1203: note = Description of Artificial Sequence: Synthetic coding sequence
  source 1..1203: mol_type = other DNA
atggaggtgctgcggccccagctgatcagaattgatggcaggaactacaggaagaaccctgtgcaggagcagacctaccagcacgaggaggatgaggaggacttctaccagggctccatggagtgtgctgatgagccctgtgatgcctatgaggtggagcagaccccccagggcttccgcagcaccctgcgggcccccagcctgctgtacaacctgatccacctgaacaccagcaatgactgtggcttccagaagatcaccctggactgccagaacatctacacctggaagagccgccacatcgtgggcaagagaggagacaccaggaagaagattgagatggagaccaagaccagcatcagcatccccaagccaggccaggatggagaaattgtcatcaccggccagcacagaaatggagtcatcagcgcccggaccagaattgatgtgctgctggacaccttccggaggaagcagcccttcacccacttcctggccttcttcctgaatgaggtggaggtgcaggagggcttcctgcgcttccaggaggaggtgctggccaagtgcagcatggaccatggagtggacagcagcatcttccagaaccccaagaagctgcacctgaccatcggcatgctggtgctgctgtctgaggaggagatccagcagacctgtgagatgctgcagcagtgcaaggaggagttcatcaatgacatcagcggcggcaagcccctggaggtggagatggccggcatcgagtacatgaatgatgatcctggcatggtggatgtgctgtatgccaaggtgcacatgaaggatggcagcaaccggctgcaggagctggtggacagagtgctggagcgcttccaggccagcggcctgattgtgaaggagtggaacagcgtgaagctgcacgccaccgtgatgaacaccctcttcaggaaggaccccaatgctgagggccgctacaacctgtacacagctgagggcaagtacatcttcaaggagcgggagagctttgatggaagaaacatcctgaagagctttgccctgctgccccggctggagtacaatgatgccatcagcgcccactgcaacctgtgcctgcccggcagcagtgacagccctgccagcgccagccaggtggccggcatcaccggggtgtctgatgcctacagccagagcctgcccgggaagagctag

SEQ ID NO: 142327 - DNA, 1074 bp, synthetic construct; identical to SEQ ID NO: 142324
  misc_feature 1..1074: note = Description of Artificial Sequence: Synthetic coding sequence
  source 1..1074: mol_type = other DNA

SEQ ID NO: 142328 - DNA, 1203 bp, synthetic construct; identical to SEQ ID NO: 142326
  misc_feature 1..1203: note = Description of Artificial Sequence: Synthetic coding sequence
  source 1..1203: mol_type = other DNA

SEQ ID NO: 142329 - DNA, 1074 bp, synthetic construct; identical to SEQ ID NO: 142324
  misc_feature 1..1074: note = Description of Artificial Sequence: Synthetic coding sequence
  source 1..1074: mol_type = other DNA

SEQ ID NO: 142330 - DNA, 879 bp, synthetic construct
  misc_feature 1..879: note = Description of Artificial Sequence: Synthetic coding sequence
  source 1..879: mol_type = other DNA
tgatacaagcacatcgtgggcaagagaggagacaccaggaagaagattgagatggagaccaagaccagcatcagcatccccaagccaggccaggatggagaaattgtcatcaccggccagcacagaaatggagtcatcagcgcccggaccagaattgatgtgctgctggacaccttccggaggaagcagcccttcacccacttcctggccttcttcctgaatgaggtggaggtgcaggagggcttcctgcgcttccaggaggaggtgctggccaagtgcagcatggaccatggagtggacagcagcatcttccagaaccccaagaagctgcacctgaccatcggcatgctggtgctgctgtctgaggaggagatccagcagacctgtgagatgctgcagcagtgcaaggaggagttcatcaatgacatcagcggcggcaagcccctggaggtggagatggccggcatcgagtacatgaatgatgatcctggcatggtggatgtgctgtatgccaaggtgcacatgaaggatggcagcaaccggctgcaggagctggtggacagagtgctggagcgcttccaggccagcggcctgattgtgaaggagtggaacagcgtgaagctgcacgccaccgtgatgaacaccctcttcaggaaggaccccaatgctgagggccgctacaacctgtacacagctgagggcaagtacatcttcaaggagcgggagagctttgatggaagaaacatcctgaagagctttgccctgctgccccggctggagtacaatgatgccatcagcgcccactgcaacctgtgcctgcccggcagcagtgacagccctgccagcgccagccaggtggccggcatcaccgtggtgtag

SEQ ID NO: 142331 - DNA, 828 bp, synthetic construct
  misc_feature 1..828: note = Description of Artificial Sequence: Synthetic coding sequence
  source 1..828: mol_type = other DNA
atggagaccaagaccagcatcagcatccccaagccaggccaggatggagagatcgtcatcaccggccagcacagaaatggagtcatcagcgcccggaccagaattgatgtgctgctggacaccttccggaggaagcagcccttcacccacttcctggccttcttcctgaatgaggtggaggtgcaggagggcttcctgcgcttccaggaggaggtgctggccaagtgcagcatggaccacggcgtggacagcagcatcttccagaaccccaagaagctgcacctgaccatcggcatgctggtgctgctgtctgaggaggagatccagcagacctgtgagatgctgcagcagtgcaaggaggagttcatcaatgacatcagcggcggcaagcccctggaggtggagatggccggcatcgagtacatgaatgatgaccccggcatggtggatgtgctgtatgccaaggtgcacatgaaggatggcagcaaccggctgcaggagctggtggacagagtgctggagcgcttccaggccagcggcctcatcgtgaaggagtggaacagcgtgaagctgcacgccaccgtgatgaacaccctcttcaggaaggaccccaatgctgagggccgctacaacctgtacacagctgagggcaagtacatcttcaaggagcgggagagctttgatggcaggaacatcctgaagagctttgccctgctgccccggctggagtacaatgatgccatcagcgcccactgcaacctgtgcctgcccggcagcagtgacagccctgccagcgccagccaggtggccggcatcaccgtggtgtag

SEQ ID NO: 142332 - DNA, 372 bp, synthetic construct
  misc_feature 1..372: note = Description of Artificial Sequence: Synthetic coding sequence
  source 1..372: mol_type = other DNA
atggaggtgctgcggccccagctgatcagaattgatggcaggaactacaggaagaaccctgtgcaggagcagacctaccagcacgaggaggatgaggaggacttctaccagggctccatggagtgtgctgatgagccctgtgatgcctatgaggtggagcagaccccccagggcttccgcagcaccctgcgggcccccagcctgctgtacaagcacatcgtgggcaagagaggagacaccaggaagaagattgagatggagaccaagaccagcatcagcatccccaagccaggccaggatggagaaattgtcatcaccggccagcacagaaatggagtcatcagcgcccggaccagaattgatgtgctgtag

SEQ ID NO: 142333 - DNA, 312 bp, synthetic construct
  misc_feature 1..312: note = Description of Artificial Sequence: Synthetic coding sequence
  source 1..312: mol_type = other DNA
atggaggtgctgcggccccagctgatcagaattgatggcaggaactacaggaagaaccctgtgcaggagcagacctaccagcacgaggaggatgaggaggacttctaccagggctccatggagtgtgctgatgagccctgtgatgcctatgaggtggagcagaccccccagggcttccgcagcaccctgcgggcccccagcctgctgtacaagcacatcgtgggcaagagaggagacaccaggaagaagattgagatggagaccaagaccagcatcagcatccccaagccaggccaggatggagagatctag

SEQ ID NO: 142334 - DNA, 459 bp, synthetic construct
  misc_feature 1..459: note = Description of Artificial Sequence: Synthetic coding sequence
  source 1..459: mol_type = other DNA
atggaggtgctgcggccccagctgatcagaattgatggcaggaactacaggaagaaccctgtgcaggagcagacctaccagcacgaggaggatgaggaggacttctaccagggctccatggagtgtgctgatgagccctgtgatgcctatgaggtggagcagaccccccagggcttccgcagcaccctgcgggcccccagcctgctgtacaagcacatcgtgggcaagagaggagacaccaggaagaagattgagatggagaccaagaccagcatcagcatccccaagccaggccaggatggagaaattgtcatcaccggccagcacagaaatggagtcatcagcgcccggaccagaattgatgtgctgctggacaccttccggaggaagcagcccttcacccacttcctggccttcttcctgaatgaggtggaggtgcaggagggcttcctgaggtag

SEQ ID NO: 142335 - DNA, 171 bp, synthetic construct
  misc_feature 1..171: note = Description of Artificial Sequence: Synthetic coding sequence
  source 1..171: mol_type = other DNA
atggaggtgctgcggccccagctgatcagaattgatggcaggaactacaggaagaaccctgtgcaggagcagacctaccagcacgaggaggatgaggaggacttctaccagggctccatggagtgtgctgatgagccctgtgatgcctatgaggtggagcagaccccctag

SEQ ID NO: 142336 - DNA, 1140 bp, synthetic construct
  misc_feature 1..1140: note = Description of Artificial Sequence: Synthetic coding sequence
  source 1..1140: mol_type = other DNA
atgatgaagtacccaggcacctggccctgccagggcatcatcggcatcagctttggagagagcgtgatggaggtgctgcggccccagctgatcagaattgatggcaggaactacaggaagaaccctgtgcaggagcagacctaccagcacgaggaggatgaggaggacttctaccagggctccatggagtgtgctgatgagccctgtgatgcctatgaggtggagcagaccccccagggcttccgcagcaccctgcgggcccccagcctgctgtacaagcacatcgtgggcaagagaggagacaccaggaagaagattgagatggagaccaagaccagcatcagcatccccaagccaggccaggatggagaaattgtcatcaccggccagcacagaaatggagtcatcagcgcccggaccagaattgatgtgctgctggacaccttccggaggaagcagcccttcacccacttcctggccttcttcctgaatgaggtggaggtgcaggagggcttcctgcgcttccaggaggaggtgctggccaagtgcagcatggaccatggagtggacagcagcatcttccagaaccccaagaagctgcacctgaccatcggcatgctggtgctgctgtctgaggaggagatccagcagacctgtgagatgctgcagcagtgcaaggaggagttcatcaatgacatcagcggcggcaagcccctggaggtggagatggccggcatcgagtacatgaatgatgatcctggcatggtggatgtgctgtatgccaaggtgcacatgaaggatggcagcaaccggctgcaggagctggtggacagagtgctggagcgcttccaggccagcggcctgattgtgaaggagtggaacagcgtgaagctgcacgccaccgtgatgaacaccctcttcaggaaggaccccaatgctgagggccgctacaacctgtacacagctgagggcaagtacatcttcaaggagcgggagagctttgatggaagaaacatcctgaagctgtttgagaacttctacttcggcagcctgaagctgaacagcatccacatcagccagcgcttcaccgtggacagctttggaaattatgccagctgtggccagattgacttctcctag

SEQ ID NO: 142337 - DNA, 2274 bp, synthetic construct
  misc_feature 1..2274: note = Description of Artificial Sequence: Synthetic coding sequence
  source 1..2274: mol_type = other DNA
atgcctgccctgcccctggaccagctgcagatcacccacaaggaccccaagacaggcaagctgcggaccagccctgccctgcaccctgagcagaaggctgaccgctactttgtgctgtacaagcccccacccaaggacaacatcccagccctggtggaggagtacctggagcgggccacctttgtggccaatgacctggactggctgctggccctgccccatgacaagttctggtgccaggtgatctttgatgagaccctgcagaagtgcctggacagctacctgcgctacgtgcccaggaagtttgatgaaggagtggccagcgcccctgaggtggtggacatgcagaagaggctgcacaggagcgtcttcctgaccttcctgaggatgagcacccacaaggagagcaaggaccacttcatcagccccagcgccttcggggagatcctgtacaacaacttcctgtttgacatccccaagatcctggacctgtgtgtgctgtttgggaagggcaacagccccctgctgcagaagatgattggcaacatcttcacccagcagcccagctactacagcgacctggatgagaccctgcccaccatcctgcaggtgttcagcaacatcctgcagcactgcggcctgcagggagatggagccaacaccaccccccagaagctggaggagcggggccgcctgacccccagcgacatgcccctgctggagctgaaggacatcgtgctgtacctgtgtgacacctgcaccaccctgtgggccttcctggacatcttccccctggcctgccagaccttccagaagcatgacttctgctaccgcctggccagcttctatgaagctgccatccctgagatggagagcgccatcaagaagaggcggctggaggacagcaagctgctgggggacctgtggcagaggctgagccacagcaggaagaagctgatggagatcttccacatcatcctgaaccagatctgcctgctgcccatcctggagagcagctgtgacaacatccagggcttcatcgaggagttcctgcagatcttcagcagcctgctgcaggagaagcgcttcctgcgggactatgatgccctcttccctgtggccgaggacatcagcctgctgcagcaggccagctctgtgctggatgagaccaggacagcctacatcctgcaggccgtggagagcgcctgggagggcgtggacaggaggaaggccacagatgccaaggaccccagcgtcatcgaggagcccaacggggagcccaacggggtgacagtgacagctgaggccgtgtcccaggccagcagccacccagaaaattctgaggaggaggagtgcatgggcgctgctgctgctgtgggccctgccatgtgtggggtggagctggacagcctcatcagccaggtgaaggacctgctgcctgacctgggggagggcttcatcctggcctgcctggagtactaccactatgaccctgagcaggtgatcaacaacatcctggaggagcggctggcccccaccctgagccagctggacaggaacctggaccgggagatgaagccagaccccacccccctgctgaccagccgccacaacgtgttccagaatgatgaatttgatgtgttcagccgggacagcgtggacctgagccgggtgcacaagggcaagagcaccaggaaggaggagaacaccaggagcctgctgaatgacaagagagctgtggccgcccagaggcagagatatgagcagtacagcgtggtggtggaggaggtgcccctgcagcctggagagagcctgccctaccacagcgtgtactatgaagatgaatatgatgacacctatgatggcaaccaggtgggcgccaatgatgctgacagtgatgatgagctgatcagcagaagacccttcaccatcccccaggtgctgcggaccaaggtgccccgggagggccaggaggaggatgatgatgatgaagaagatgatgctgatgaggaggcccccaagccagaccactttgtgcaggaccctgctgtgctgcgggagaaggccgaggcccggaggatggccttcctggccaagaagggctacagacatgacagcagcacagctgtggccggcagcccccggggccacggccagagccgggagaccacccaggagaggaggaagaaggaggccaacaaggccacccgggccaaccacaacagaaggaccatggctgacaggaagaggagcaagggcatgatccccagctag

SEQ ID NO: 142338 - DNA, 2274 bp, synthetic construct; identical to SEQ ID NO: 142337
  misc_feature 1..2274: note = Description of Artificial Sequence: Synthetic coding sequence
  source 1..2274: mol_type = other DNA

SEQ ID NO: 142339 - DNA, 723 bp, synthetic construct
  misc_feature 1..723: note = Description of Artificial Sequence: Synthetic coding sequence
  source 1..723: mol_type = other DNA
atgcctgccctgcccctggaccagctgcagatcacccacaaggaccccaagacaggcaagctgcggaccagccctgccctgcaccctgagcagaaggctgaccgctactttgtgctgtacaagcccccacccaaggacaacatcccagccctggtggaggagtacctggagcgggccacctttgtggccaatgacctggactggctgctggccctgccccatgacaagttctggtgccaggtgatctttgatgagaccctgcagaagtgcctggacagctacctgcgctacgtgcccaggaagtttgatgaaggagtggccagcgcccctgaggtggtggacatgcagaagaggctgcacaggagcgtcttcctgaccttcctgaggatgagcacccacaaggagagcaaggaccacttcatcagccccagcgccttcggggagatcctgtacaacaacttcctgtttgacatccccaagatcctggacctgtgtgtgctgtttgggaagggcaacagccccctgctgcagaagatgattggcaacatcttcacccagcagcccagctactacagcgacctggatgagaccctgcccaccatcctgcaggtgttcagcaacatcctgcagcactgcggcctgcagggagatggagccaacaccaccccccagaagctggaggagcggggccgcctgacccccagcgacatgcccctgctgtag

SEQ ID NO: 142340 - DNA, 2046 bp, synthetic construct
  misc_feature 1..2046: note = Description of Artificial Sequence: Synthetic coding sequence
  source 1..2046: mol_type = other DNA
atgcctgccctgcccctggaccagctgcagatcacccacaaggaccccaagacaggcaagctgcggaccagccctgccctggtgatctttgatgagaccctgcagaagtgcctggacagctacctgcgctacgtgcccaggaagtttgatgagggcgtggccagcgcccctgaggtggtggacatgcagaagaggctgcacaggtctgtgttcctgaccttcctgaggatgagcacccacaaggagagcaagatcctggacctgtgtgtgctgtttgggaagggcaacagccccctgctgcagaagatgattggcaacatcttcacccagcagcccagctactacagcgacctggatgagaccctgcccaccatcctgcaggtgttcagcaacatcctgcagcactgcggcctgcagggagatggagccaacaccaccccccagaagctggaggagcggggccgcctgacccccagcgacatgcccctgctggagctgaaggacatcgtgctgtacctgtgtgacacctgcaccaccctgtgggccttcctggacatcttccccctggcctgccagaccttccagaagcatgacttctgctaccgcctggccagcttctatgaagctgccatccctgagatggagagcgccatcaagaagaggcggctggaggacagcaagctgctgggggacctgtggcagaggctgagccacagcaggaagaagctgatggagatcttccacatcatcctgaaccagatctgcctgctgcccatcctggagagcagctgtgacaacatccagggcttcatcgaggagttcctgcagatcttcagcagcctgctgcaggagaagcgcttcctgcgggactatgatgccctcttccctgtggccgaggacatcagcctgctgcagcaggccagctctgtgctggatgagaccaggacagcctacatcctgcaggccgtggagagcgcctgggagggcgtggacaggaggaaggccacagatgccaaggaccccagcgtcatcgaggagcccaacggggagcccaacggggtgacagtgacagctgaggccgtgtcccaggccagcagccacccagaaaattctgaggaggaggagtgcatgggcgctgctgctgctgtgggccctgccatgtgtggggtggagctggacagcctcatcagccaggtgaaggacctgctgcctgacctgggggagggcttcatcctggcctgcctggagtactaccactatgaccctgagcaggtgatcaacaacatcctggaggagcggctggcccccaccctgagccagctggacaggaacctggaccgggagatgaagccagaccccacccccctgctgaccagccgccacaacgtgttccagaatgatgaatttgatgtgttcagccgggacagcgtggacctgagccgggtgcacaagggcaagagcaccaggaaggaggagaacaccaggagcctgctgaatgacaagagagctgtggccgcccagaggcagagatatgagcagtacagcgtggtggtggaggaggtgcccctgcagcctggagagagcctgccctaccacagcgtgtactatgaagatgaatatgatgacacctatgatggcaaccaggtgggcgccaatgatgctgacagtgatgatgagctgatcagcagaagacccttcaccatcccccaggtgctgcggaccaaggtgccccgggagggccaggaggaggatgatgatgatgaagaagatgatgctgatgaggaggcccccaagccagaccactttgtgcaggaccctgctgtgctgcgggagaaggccgaggcccggaggatggccttcctggccaagaagggctacagacatgacagcagcacagctgtggccggcagcccccggggccacggccagagccgggagaccacccaggagaggaggaagaaggaggccaacaaggccacccgggccaaccacaacagaaggaccatggctgacaggaagaggagcaagggcatgatccccagctag

SEQ ID NO: 142341 - DNA, 531 bp, synthetic construct
  misc_feature 1..531: note = Description of Artificial Sequence: Synthetic coding sequence
  source 1..531: mol_type = other DNA
atggccctgccccggctgactggagccctgcggagcttcagcaatgtgaccaagcaggacaactacaatgaggaggtggccgacctgaagatcaagaggagcaagctgcacgagcaggtgctggacctgggcctgacctggaagaagatcatcaagttcctgaatgagaagctggagaagagcaagatgcagagcatcaatgaagacctgaaggacatcctgcacgccgccaagcagatcgtgggcacagacaatggccgggaggccatcgagagcggggccgccttcctgttcatgaccttccacctgaaggacagcgtgggccacaaggagaccaaggccatcaagcagatgtttggccccttccccagcagcagcgccacagctgcctgcaatgccaccaaccgcatcatcagccacttcagccaggatgacctgacagccctggtgcagatgacagagaaggagcacggggacagagtcttcttcggcaagaacctggccttctcctttgacatgcatgacctgtag

SEQ ID NO: 142342 - DNA, 336 bp, synthetic construct
  misc_feature 1..336: note = Description of Artificial Sequence: Synthetic coding sequence
  source 1..336: mol_type = other DNA
atggccctgccccggctgactggagccctgcggagcttcagcaatgtgaccaagcaggacaactacaatgaggaggtggccgacctgaagatcaagaggagcaagctgcacgagcaggtgctggacctgggcctgacctggaagaagatcatcaagttcctgaatgagaagctggagaagagcaagatgcagagcatcaatgaagacctgaaggacatcctgcacgccgccaagcagatcgaggtgaactgccccttccagaagaggcggctggatggcaaggaggaggatgagaagatgagccgggccagtgaccgcttccggggcctgaggtag

SEQ ID NO: 142343 - DNA, 6609 bp, synthetic construct
  misc_feature 1..6609: note = Description of Artificial Sequence: Synthetic coding sequence
  source 1..6609: mol_type = other DNA
atggccctgccccggctgactggagccctgcggagcttcagcaatgtgaccaagcaggacaactacaatgaggaggtggccgacctgaagatcaagaggagcaagctgcacgagcaggtgctggacctgggcctgacctggaagaagatcatcaagttcctgaatgagaagctggagaagagcaagatgcagagcatcaatgaagacctgaaggacatcctgcacgccgccaagcagatcgtgggcacagacaatggccgggaggccatcgagagcggggccgccttcctgttcatgaccttccacctgaaggacagcgtgggccacaaggagaccaaggccatcaagcagatgtttggccccttccccagcagcagcgccacagctgcctgcaatgccaccaaccgcatcatcagccacttcagccaggatgacctgacagccctggtgcagatgacagagaaggagcacggggacagagtcttcttcggcaagaacctggccttctcctttgacatgcatgacctggaccactttgatgagctgcccatcaatggagagacccagaagaccatcagcctggactacaagaagttcctgaatgagcacctgcaggaggcctgcaccccagagctgaagcctgtggagaagaccaacggcagcttcctgtggtgtgaggtggagaagtacctgaacagcaccctgaaggagatgacagaggtgccccgggtggaggacctgtgctgcaccctgtatgacatgctggccagcatcaagtctggagatgagctgcaggatgagctgtttgagctgctgggccctgagggcctggagctgattgagaagctgctgcagaaccgcatcaccatcgtggaccgcttcctgaacagcagcaatgaccaccgcttccaggccctgcaggacaactgcaagaagatcctgggggagaatgccaagcccaactacggctgccaggtgaccatccagagcgagcaggagaagcagctgatgaagcagtacagaagagaggagaagagaattgcccggcgggagaagaaggccggggaggacctggaggtgtctgagggcctgatgtgctttgaccccaaggagctgcgcatccagcgggagcaggccctgctgaatgcccggtctgtgcccatcctgagccggcagagagatgctgatgtggagaagatccactacccccacgtgtatgacagccaggccgaggccatgaagaccagcgccttcatcgccggggccaagatgatcctgcctgagggcatccagcgggagaacaacaagctgtatgaggaggtgcgcatcccctacagcgagcccatgcccctgagctttgaggagaagcctgtgtacatccaggacctggatgagatcggccagctggccttcaagggcatgaagaggctgaaccgcatccagagcatcgtgtttgaaacagcctacaacaccaatgaaaacatgctgatctgtgcccccactggagctgggaagaccaacatcgccatgctgactgtgctgcacgagatccggcagcacttccagcagggcgtcatcaagaagaatgagttcaagatcgtgtatgtggcccccatgaaggccctggccgctgagatgacagactacttcagccggcggctggagcccctgggcatcatcgtgaaggagctgactggagacatgcagctgagcaagtctgagatcctgcggacccagatgctggtgaccaccccagagaagtgggatgtggtgaccaggaagtctgtgggagatgtggccctgagccagatcgtgcggctgctgatcctggatgaggtgcacctgctgcacgaggaccggggccctgtgctggagagcatcgtggcccggaccctgcggcaggtggagagcacccagagcatgatccgcatcctgggcctgagcgccaccctgcccaactacctggatgtggccaccttcctgcacgtgaacccctacatcggcctcttcttctttgatggccgcttccggcctgtgcccctgggccagaccttcctgggcatcaagtgtgccaacaagatgcagcagctgaacaacatggatgaggtgtgctatgaaaatgtgctgaagcaggtgaaggccggccaccaggtgatggtgtttgtgcacgccagaaatgccaccgtgaggacagccatgagcctcatcgagcgggccaagaactgtggccacatccccttcttcttccccacccagggccatgactatgtgctggccgagaagcaggtgcagaggagcaggaacaagcaggtgcgggagctgttcccagatggcttcagcatccaccacgccggcatgctgcggcaggacaggaacctggtggagaacctcttcagcaatggccacatcaaggtgctggtgtgcacagccaccctggcctggggcgtgaacctgcctgcccacgccgtcatcatcaagggcacccagatctatgctgccaagaggggcagctttgtggacctgggcatcctggatgtgatgcagatcttcggccgggccggccggccccagtttgacaagtttggagagggcatcatcatcaccacccatgacaagctgagccactacctgaccctgctgacccagaggaaccccatcgagagccagttcctggagagcctggccgacaacctgaatgctgagatcgccctgggcaccgtgaccaacgtggaggaggccgtgaagtggatctcctacacctacctgtatgtgaggatgagggccaaccccctggcctacggcatcagccacaaggcctaccagattgaccccaccctgaggaagcaccgggagcagctggtgattgaggtgggcaggaagctggacaaggcccagatgatccgctttgaggagaggacaggctacttcagcagcacagacctgggccgcacagccagccactactacatcaagtacaacaccatcgagaccttcaatgagctgtttgatgcccacaagacagaaggagacatctttgccatcgtgtccaaggccgaggagtttgaccagatcaaggtgcgggaggaggagattgaggagctggacaccctgctgagcaacttctgtgagctgagcaccccaggaggagtggagaacagctatggcaagatcaacatcctgctgcagacctacatcagcagaggagagatggacagcttcagcctcatcagtgacagcgcctacgtggcccagaatgctgccagaattgtgcgggccctgtttgagatcgccctgaggaagcgctggcccaccatgacctaccgcctgctgaacctgagcaaggtgattgacaagaggctgtggggctgggccagccccctgcggcagttcagcatcctgcccccccacatcctgacccggctggaggagaagaagctgactgtggacaagctgaaggacatgaggaaggatgaaattggccacatcctgcaccacgtgaacatcggcctgaaggtgaagcagtgtgtgcaccagatccccagcgtgatgatggaggccagcatccagcccatcaccaggacagtgctgcgggtgaccctgagcatctatgctgacttcacctggaatgaccaggtgcatggaacagtgggggagccctggtggatctgggtggaggaccccaccaatgaccacatctaccacagcgagtacttcctggccctgaagaagcaggtgatcagcaaggaggcccagctgctggtgttcaccatccccatctttgagcccctgcccagccagtactacatccgggctgtgtctgaccgctggctgggcgctgaggccgtgtgcatcatcaacttccagcacctgatcctgcctgagcggcaccccccccacacagagctgctggacctgcagcccctgcccatcacagccctgggctgcaaggcctatgaggccctgtacaacttcagccacttcaaccctgtgcagacccagatcttccacaccctgtaccacacagactgcaatgtgctgctgggcgcccccactggaagtggcaagacagtggccgctgagctggccatcttccgggtcttcaacaagtaccccaccagcaaggctgtgtacatcgcccccctgaaggccctggtgcgggagaggatggatgactggaaggtgcgcatcgaggagaagctgggcaagaaggtgattgagctgactggagatgtgaccccagacatgaagagcatcgccaaggctgacctgattgtgaccaccccagagaagtgggatggagtgagccgctcctggcagaacagaaattatgtgcagcaggtgaccatcctgatcattgatgagatccacctgctgggggaggagcggggccctgtgctggaggtgattgtgtccaggaccaacttcatcagcagccacacagagaagcctgtgcgcatcgtgggcctgagcacagccctggccaatgcccgggacctggccgactggctgaacatcaagcagatgggcctcttcaacttccggcccagcgtgcggcctgtgcccctggaggtgcacatccagggcttccctggccagcactactgccccaggatggcctccatgaacaagccagccttccaggccatccgcagccacagccctgccaagcctgtgctgatctttgtgagcagccggcggcagacccggctgacagccctggagctgattgccttcctggccacagaggaggaccccaagcagtggctgaacatggatgagcgggagatggagaacatcatcgccaccgtgcgggacagcaacctgaagctgaccctggccttcggcatcggcatgcaccacgccggcctgcacgagcgggacaggaagacagtggaggagctgtttgtgaactgcaaggtgcaggtgctgattgccaccagcaccctggcctggggcgtgaacttccctgcccacctggtgatcatcaagggcacagagtactatgatggcaagaccaggagatatgtggacttccccatcacagatgtgctgcagatgatgggccgggccggccggccccagtttgatgaccagggcaaggctgtgatcctggtgcatgacatcaagaaggacttctacaagaagttcctgtatgagcccttccctgtggagagcagcctgctgggcgtgctgagtgaccacctgaatgctgagattgctgggggcaccatcaccagcaagcaggatgccctggactacatcacctggacctacttcttcagaagactcatcatgaaccccagctactacaacctgggagatgtgtcccatgattctgtgaacaagttcctgagccacctgattgagaagagcctgattgagctggagctgagctactgcattgaaattggagaggacaacagaagcattgagcccctgacctacggccgcatcgccagctactactacctgaagcaccagacagtgaagatgttcaaggaccggctgaagccagaatgttccacagaggagctgctgagcatcctgagtgatgctgaggagtacacagacctgcctgtgcgccacaatgaagaccacatgaacagcgagctggccaagtgcctgcccatcgagagcaacccccacagctttgacagcccccacaccaaggcccacctgctgctgcaggcccacctgagccgggccatgctgccctgcccagactatgacacagacaccaagacagtgctggaccaggccctgcgggtgtgccaggccatgctggatgtggccgccaaccagggctggctggtgacagtgctgaacatcaccaacctgatccagatggtgatccagggccgctggctgaaggacagcagcctgctgaccctgcccaacatcgagaaccaccacctgcacctgttcaagaagtggaagcccatcatgaagggcccccacgcccggggccgcaccagcattgagagcctgcctgagctgattcatgcctgtggcggcaaggaccacgtgttcagctccatggtggagagcgagctgcacgccgccaagaccaagcaggcctggaacttcctgagccacctgcccgtcatcaacgtgggcatctctgtgaagggctcctgggatgacctggtggagggccacaatgagctgtctgtgtccaccctgacagctgacaagagagatgacaacaagtggatcaagctgcacgccgaccaggagtatgtgctgcaggtgtccctgcagagggtgcacttcggcttccacaagggcaagccagagagctgtgctgtgaccccccgcttccccaagagcaaggatgagggctggttcctgatcctgggggaggtggacaagcgggagctgattgccctgaagagggtgggctacatccggaaccaccacgtggccagcctgtccttctacaccccagagatccctggccgctacatctacaccctgtacttcatgtctgactgctacctgggcctggaccagcagtatgacatctacctgaatgtgacccaggccagcctgagcgcccaggtgaacaccaaggtgtctgacagcctgacagacctggccctgaagtag

SEQ ID NO: 142344 - DNA, 816 bp, synthetic construct
  misc_feature 1..816: note = Description of Artificial Sequence: Synthetic coding sequence
  source 1..816: mol_type = other DNA
atggaggacagccacaagagcaccaccagcgagacagccccccagcccggcagcgctgtgcagggcgcccacatcagccacatcgcccagcaggtgagcagcctgtctgagagcgaggagagccaggacagcagtgacagcatcggcagcagccagaaggcccacggcatcctggcccggcggcccagctacaggaagatcctgaaggacctgagcagcgaggacacccggggcaggaaaggagatggagagaacagcggcgtgtctgctgctgtgacctccatgtctgtgcccacccccatctaccagaccagcagcggccagtacatcgccatcgccccaaatggagccctgcagctggccagccctggaacagatggagtgcagggcctgcagaccctgaccatgaccaacagcggcagcacccagcagggcaccaccatcctgcagtatgcccagaccagtgatggccagcagatcctggtgcccagcaaccaggtggtggtgcagacagccagcggggacatgcagacctaccagatccgcaccacccccagcgccaccagcctgccccagacagtggtgatgaccagccctgtgaccctgaccagccagaccaccaagacagatgacccccagctgaagcgggagatccggctgatgaagaaccgggaggccgccagagaatgtagaaggaagaagaaggagtatgtgaagtgcctggagaacagagtggccgtgctggagaaccagaacaagaccctcatcgaggagctgaagaccctgaaggacctgtacagcaacaagtctgtgtag

SEQ ID NO: 142345 - DNA, 411 bp, synthetic construct
  misc_feature 1..411: note = Description of Artificial Sequence: Synthetic coding sequence
  source 1..411: mol_type = other DNA
atgaccaacagcggcagcacccagcagggcaccaccatcctgcagtatgcccagaccagtgatggccagcagatcctggtgcccagcaaccaggtggtggtgcagacagccagcggggacatgcagacctaccagatccgcaccaccccatctgccaccagcctgccccagacagtggtgatgaccagccctgtgaccctgaccagccagaccaccaagacagatgacccccagctgaagcgggagatccggctgatgaagaaccgggaggccgcccgggagtgcaggaggaagaagaaggagtatgtgaagtgcctggagaacagagtggccgtgctggagaaccagaacaagaccctgattgaggagctgaagaccctgaaggacctgtacagcaacaagtctgtgtag

SEQ ID NO: 142346 - DNA, 603 bp, synthetic construct
  misc_feature 1..603: note = Description of Artificial Sequence: Synthetic coding sequence
  source 1..603: mol_type = other DNA
atggaggacagccacaagagcaccaccagcgagacagccccccagcccggcagcgctgtgcagggcgcccacatcagccacatcgcccagcaggtgagcagcctgtctgagagcgaggagagccaggacagcagtgacagcatcggcagcagccagaaggcccacggcatcctggcccggcggcccagctacaggaagatcctgaaggacctgagcagcgaggacacccggggcaggaaaggagatggagagaacagcggcgtgtctgctgctgtgacctccatgtctgtgcccacccccatctaccagaccagcagcggccagtacatcgccatcgccccaaatggagccctgcagctggccagccctggaacagatggagtgcagggcctgcagaccctgaccatgaccaacagcggcagcacccagcagggcaccaccatcctgcagtatgcccagaccagtgatggccagcagatcctggtgcccagcaaccaggtggtggtgcagacagccagcggggacatgcagacctaccagatccgcaccacccccagcgccaccagcctgccccagacagtggtgatgaccagccctgtgtag

SEQ ID NO: 142347 - DNA, 513 bp, synthetic construct
  misc_feature 1..513: note = Description of Artificial Sequence: Synthetic coding sequence
  source 1..513: mol_type = other DNA
atggaggacagccacaagagcaccaccagcgagacagccccccagcccggcagcgctgtgcagggcgcccacatcagccacatcgcccagcaggtgagcagcctgtctgagagcgaggagagccaggacagcagtgacagcatcggcagcagccagaaggcccacggcatcctggcccggcggcccagctacaggaagatcctgaaggacctgagcagcgaggacacccggggcaggaaaggagatggagagaacagcggcgtgtctgctgctgtgacctccatgtctgtgcccacccccatctaccagaccagcagcggccagtacatcgccatcgccccaaatggagccctgcagctggccagccctggaacagatggagtgcagggcctgcagaccctgaccatgaccaacagcggcagcacccagcagggcaccaccatcctgcagtatgcccagaccagtgatggccagcagatcctggtgcccagcaaccaggtggtggtgcagtag

SEQ ID NO: 142348 - DNA, 321 bp, synthetic construct
  misc_feature 1..321: note = Description of Artificial Sequence: Synthetic coding sequence
  source 1..321: mol_type = other DNA
atgatgctgcagcaccctggccaggtgtctgccagcgaggaggagctgcgctttgccatccagaacaagcacctgtgccacaggatgagcagcgccctggagagcgtgacagtgtctgaccggcccctgggcgtgtccatcaccaaggccgaggtggcccctgaggaggatgagaggaagaagagaagaagagagaggaacaagattgctgctgccaagtgcaggaacaagaagaaggagaagacagaatgtctgcagaagctgccccggcccttctgggtgcagaagacctgcatctgggccgtggacagctgcaagtag

SEQ ID NO: 142349 - DNA, 546 bp, synthetic construct
  misc_feature 1..546: note = Description of Artificial Sequence: Synthetic coding sequence
  source 1..546: mol_type = other DNA
atgatgctgcagcaccctggccaggtgtctgccagcgaggtgtctgccagcgccatcgtgccctgcctgagccccccaggcagcctggtgtttgaggactttgccaacctgaccccatttgtgaaggaggagctgcgctttgccatccagaacaagcacctgtgccacaggatgagcagcgccctggagagcgtgacagtgtctgaccggcccctgggcgtgtccatcaccaaggccgaggtggccccagaagaagatgagaggaagaagagaagaagagaaagaaacaagattgctgctgccaagtgcaggaacaagaagaaggagaagacagagtgcctgcagaaggagagcgagaagctggagagcgtgaatgctgagctgaaggcccagatcgaggagctgaagaatgagaagcagcacctgatctacatgctgaacctgcaccggcccacctgcatcgtgcgggcccagaatggaagaacaccagaagatgaaagaaacctcttcatccagcagatcaaggagggcaccctgcagagctag

SEQ ID NO: 142350 - DNA, 528 bp, synthetic construct
  misc_feature 1..528: note = Description of Artificial Sequence: Synthetic coding sequence
  source 1..528: mol_type = other DNA
atgatgctgcagcaccctggccaggtgtctgccagcgaggtgtctgccagcgccatcgtgccctgcctgagccccccaggcagcctggtgtttgaggactttgccaacctgaccccatttgtgaaggaggagctgcgctttgccatccagaacaagcacctgtgccacaggatgagcagcgccctggagagcgtgacagtgtctgaccggcccctgggcgtgtccatcaccaaggccgaggtggccccagaagaagatgagaggaagaagagaagaagagaaagaaacaagattgctgctgccaagtgcaggaacaagaagaaggagaagacagagtgcctgcagaaggagagcgagaagctggagagcgtgaatgctgagctgaaggcccagatcgaggagctgaagaatgagaagcagcacctgatctacatgctgaacctgcaccggcccacctgcatcgtgcgggcccagaatggaagaacaccagaagatgaaagaaacctcttcatccagcagatcaagtag

SEQ ID NO: 142351 - DNA, 408 bp, synthetic construct
  misc_feature 1..408: note = Description of Artificial Sequence: Synthetic coding sequence
  source 1..408: mol_type = other DNA
atgatgctgcagcaccctggccaggtgtctgccagcgaggtgtctgccagcgccatcgtgccctgcctgagccccccaggcagcctggtgtttgaggactttgccaacctgaccccatttgtgaaggaggagctgcgctttgccatccagaacaagcacctgtgccacaggatgagcagcgccctggagagcgtgacagtgtctgaccggcccctgggcgtgtccatcaccaaggccgaggtggccccagaagaagatgagaggaagaagagaagaagagaaagaaacaagattgctgctgccaagtgcaggaacaagaagaaggagaagacagagtgcctgcagaagctgccccggcccttctgggtgcagaagacctgcatctgggccgtggacagctgcaagtag

SEQ ID NO: 142352 - DNA, 375 bp, synthetic construct
  misc_feature 1..375: note = Description of Artificial Sequence: Synthetic coding sequence
  source 1..375: mol_type = other DNA
atgagcagcgccctggagagcgtgacagtgtctgaccggcccctgggcgtgtccatcaccaaggccgaggtggcccctgaggaggatgagaggaagaagagaagaagagagaggaacaagattgctgctgccaagtgcaggaacaagaagaaggagaagacagaatgtctgcagaaggagagcgagaagctggagagcgtgaatgctgagctgaaggcccagatcgaggagctgaagaatgagaagcagcacctgatctacatgctgaacctgcaccggcccacctgcatcgtgcgggcccagaatggccgcaccccagaagatgagaggaacctcttcatccagcagatcaaggagggcaccctgcagagctag

SEQ ID NO: 142353 - DNA, 546 bp, synthetic construct; identical to SEQ ID NO: 142349
  misc_feature 1..546: note = Description of Artificial Sequence: Synthetic coding sequence
  source 1..546: mol_type = other DNA

SEQ ID NO: 142354 - DNA, 408 bp, synthetic construct; identical to SEQ ID NO: 142351
  misc_feature 1..408: note = Description of Artificial Sequence: Synthetic coding sequence
  source 1..408: mol_type = other DNA

SEQ ID NO: 142355 - DNA, 1056 bp, synthetic construct
  misc_feature 1..1056: note = Description of Artificial Sequence: Synthetic coding sequence
  source 1..1056: mol_type = other DNA
atgacagagatgtccttcctgagcagcgaggtgctggtgggggacctgatgagcccctttgaccagagcggcctgggcgctgaggagagcctgggcctgctggatgactacctggaggtggccaagcacttcaagccccacggcttcagcagtgacaaggccaaggccggcagcagcgagtggctggccgtggatggcctggtgagccccagcaacaacagcaaggaggatgccttcagcggcacagactggatgctggagaagatggacctgaaggagtttgacctggatgccctgctgggcattgatgacctggagaccatgccagatgacctgctgaccaccctggatgacacctgtgacctgtttgcccccctggtgcaggagaccaacaagcagcccccccagacagtgaaccccatcggccacctgcctgagagcctgaccaagccagaccaggtggcccccttcaccttcctgcagcccctgcccctgagccctggggtgctgagcagcaccccagaccacagcttcagcctggagctgggcagcgaggtggacatcacagaaggagacaggaagccagactacacagcctacgtggccatgatcccccagtgcatcaaggaggaggacacccccagcgacaatgattctggcatctgcatgagccctgagagctacctgggcagcccccagcacagccccagcacccggggcagccccaacagaagcctgcccagccctggggtgctgtgtggcagcgcccggcccaagccctatgaccccccaggagagaagatggtggccgccaaggtgaagggggagaagctggacaagaagctgaagaagatggagcagaacaagacagctgccacccgctaccggcagaagaagagagctgagcaggaggccctgactggagagtgcaaggagctggagaagaagaatgaggccctgaaggagagagctgacagcctggccaaggagatccagtacctgaaggacctgattgaggaggtgaggaaggcccggggcaagaagagggtgccctag

SEQ ID NO: 142356 - DNA, 1056 bp, synthetic construct; identical to SEQ ID NO: 142355
  misc_feature 1..1056: note = Description of Artificial Sequence: Synthetic coding sequence
  source 1..1056: mol_type = other DNA

SEQ ID NO: 142357 - DNA, 1056 bp, synthetic construct; identical to SEQ ID NO: 142355
  misc_feature 1..1056: note = Description of Artificial Sequence: Synthetic coding sequence
  source 1..1056: mol_type = other DNA

SEQ ID NO: 142358 - DNA, 849 bp, synthetic construct
  misc_feature 1..849: note = Description of Artificial Sequence: Synthetic coding sequence
  source 1..849: mol_type = other DNA
atgagcctgctggccaccctgggcctggagctggaccgggccctgctgcctgccagcggcctgggctggctggtggactatggcaagctgcccccagccccagcccccctggccccctatgaggtgctgggcggggccctggagggcggcctgcctgtgggcggggagcccctggccggagatggcttcagtgactggatgacagagcgggtggacttcaccgccctgctgcccctggagccccccctgcccccaggcaccctgccccagcccagccccaccccaccagacctggaggccatggccagcctgctgaagaaggagctggagcagatggaggacttcttcctggatgccccacccctgcccccacccagccccccacccctgcccccaccacccctgcccccagcccccagcctgcccctgagcctgcccagctttgacctgccccagccccctgtgctggacaccctggacctgctggccatctactgcagaaatgaggccggccaggaggaggtgggcatgccacccctgcccccaccccagcagcccccaccacccagccccccccagcccagccggctggccccctacccccacccagccaccaccaggggggacaggaagcagaagaagagggaccagaacaagtctgctgccctgcgctaccggcagaggaagagagctgagggggaggccctggagggggagtgccagggcctggaggccaggaaccgggagctgaaggagcgggcagagagcgtggagcgggagatccagtatgtgaaggacctgctgattgaggtgtacaaggcccggagccagaggaccaggagctgctag

SEQ ID NO: 142359 - DNA, 2013 bp, synthetic construct
  misc_feature 1..2013: note = Description of Artificial Sequence: Synthetic coding sequence
  source 1..2013: mol_type = other DNA
atgggagagcctgctggggtggccggcaccatggagagccccttcagccctggcctcttccaccggctggatgaggactgggacagcgccctgtttgctgagctgggctacttcacagacacagatgagctgcagctggaggccgccaatgagacctatgagaacaactttgacaacctggactttgacctggacctgatgccctgggagagtgacatctgggacatcaacaaccagatctgcaccgtgaaggacatcaaggccgagccccagcccctgagccctgccagcagcagctacagcgtgagcagccccaggtctgtggacagctacagcagcacccagcacgtgcctgaggagctggacctgagcagcagcagccagatgagccccctgagcctgtatggagagaacagcaacagcctgagcagcgctgagcccctgaaggaggacaagcctgtgacaggccccaggaacaagacagaaaatggcctgacccccaagaagaagatccaggtgaacagcaagcccagcatccagcccaagcccctgctgctgcctgctgcccccaagacccagaccaacagctctgtgcctgccaagaccatcatcatccagacagtgcccaccctgatgcccctggccaagcagcagcccatcatcagcctgcagcctgcccccaccaagggccagacagtgctgctgagccagcccaccgtggtgcagctgcaggcccctggggtgctgcccagcgcccagcctgtgctggccgtggccggcggcgtgacccagctgcccaaccacgtggtgaatgtggtgcctgcccccagcgccaacagccctgtgaatggcaagctgtctgtgaccaagcctgtgctgcagagcaccatgagaaatgtgggcagtgacattgctgtgctgcggcggcagcagaggatgatcaagaaccgggagagcgcctgccagagcaggaagaagaagaaggagtacatgctgggcctggaggcccggctgaaggccgccctgtctgaaaatgagcagctgaagaaggaaaatggcaccctgaagaggcagctggatgaggtggtgtctgagaaccagaggctgaaggtgcccagccccaagagaagagtggtgtgtgtgatgattgtgctggccttcatcatcctgaactacggccccatgtccatgctggagcaggacagcaggaggatgaaccccagcgtgtccccagccaaccagaggaggcacctgctgggcttcagcgccaaggaggcccaggacaccagtgatggcatcatccagaagaacagctaccgctatgaccacagcgtgtccaatgacaaggccctgatggtgctgacagaggagcccctgctgtacatccccccaccaccctgccagcccctcatcaacaccacagagagcctgcggctgaaccacgagctgcggggctgggtgcacagacatgaggtggagaggaccaagagcaggaggatgaccaacaaccagcagaagacccgcatcctgcagggcgccctggagcagggcagcaacagccagctgatggctgtgcagtacacagagaccaccagcagcatcagcaggaacagcggcagcgagctgcaggtgtactatgccagccccaggagctaccaggacttctttgaggccatcagaagaagaggagacaccttctacgtggtgtccttccggcgggaccacctgctgctgcctgccaccacccacaacaagaccacccggcccaagatgagcatcgtgctgcctgccatcaacatcaatgaaaatgtcatcaatggccaggactatgaggtgatgatgcagattgactgccaggtgatggacacccgcatcctgcacatcaagagcagctctgtgcccccctacctgcgggaccagcagaggaaccagaccaacaccttcttcggcagccccccagctgccacagaggccacccacgtggtgtccaccatccctgagagcctgcagtag

SEQ ID NO: 142360 - DNA, 2112 bp, synthetic construct
  misc_feature 1..2112: note = Description of Artificial Sequence: Synthetic coding sequence
  source 1..2112: mol_type = other DNA
atggccgagctgatgctgctgtctgaaattgctgaccccacccgcttcttcacagacaacctgctgagccctgaggactggggcctgcagaacagcaccctgtacagcggcctggatgaggtggccgaggagcagacccagctgttccgctgcccagagcaggatgtgccctttgatggcagcagcctggatgtgggcatggatgtgagccccagcgagcccccctgggagctgctgcccatcttcccagacctgcaggtgaagtctgagcccagcagcccctgcagcagcagcagcctgagcagcgagagcagccggctgagcacagagcccagcagcgaggccctgggcgtgggggaggtgctgcacgtgaagacagagagcctggccccacccctgtgcctgctgggagatgaccccaccagcagctttgagaccgtgcagatcaacgtcatccccaccagtgatgacagcagtgatgtgcagaccaagattgagcctgtgagcccctgcagctctgtgaacagcgaggccagcctgctgtctgctgacagcagcagccaggccttcatcggggaggaggtgctggaggtgaagacagagagcctgagccccagcggctgcctgctgtgggatgtgcctgcccccagcctgggcgctgtgcagatctccatgggccccagcctggatggcagcagcggcaaggccctgcccaccaggaagccacccctgcagcccaagcctgtggtgctgaccaccgtgcccatgcccagcagagctgtgccccccagcaccaccgtgctgctgcagagcctggtgcagcccccacctgtgtcccctgtggtgctgatccagggcgccatccgggtgcagcctgagggccctgcccccagcctgcccaggcctgagaggaagagcatcgtgcctgcccccatgcctggcaacagctgccccccagaggtggatgccaagctgctgaagaggcagcagaggatgatcaagaaccgggagagcgcctgccagagcaggaggaagaagaaggagtacctgcagggcctggaggcccggctgcaggccgtgctggccgacaaccagcagctgcggcgggagaatgctgccctgcggcggcggctggaggccctgctggccgagaacagcgagctgaagctgggcagcggcaacaggaaggtggtgtgcatcatggtgttcctgctcttcatcgccttcaactttggacctgtgtccatcagcgagcccccatctgcccccatcagccccaggatgaacaagggggagccccagccccggcggcacctgctgggcttcagcgagcaggagcctgtgcagggcgtggagcccctgcagggcagcagccagggccccaaggagccccagcccagccccacagaccagcccagcttcagcaacctgacagccttccctggaggagccaaggagctgctgctgcgggacctggaccagctgttcctgagcagtgactgccgccacttcaacagaacagagagcctgcggctggctgatgagctgagcggctgggtgcagaggcaccagagaggaagaaggaagatcccccagagggcccaggagcggcagaagagccagcccaggaagaagagcccccctgtgaaggctgtgcccatccagcccccaggccccccagagcgggacagcgtgggccagctgcagctgtaccgccacccagacaggagccagcctgccttcctggatgccatcgacagaagagaggacaccttctacgtggtgtccttccggcgggaccacctgctgctgcctgccatcagccacaacaagaccagccggcccaagatgagcctggtgatgcctgccatggccccaaatgagaccctgagcggccgcggggcccctggggactatgaggagatgatgcagattgaatgtgaggtgatggacaccagggtcatccacatcaagaccagcacagtgccccccagcctgaggaagcagcccagccccaccccaggaaatgccaccggcggccccctgcctgtgtctgctgccagccaggcccaccaggccagccaccagcccctgtacctgaaccacccctag

SEQ ID NO: 142361 - DNA, 669 bp, synthetic construct
  misc_feature 1..669: note = Description of Artificial Sequence: Synthetic coding sequence
  source 1..669: mol_type = other DNA
atggccgagctgatgctgctgtctgaaattgctgaccccacccgcttcttcacagacaacctgctgagccctgaggactggggcctgcagaacagcaccctgtacagcggcctggatgaggtggccgaggagcagacccagctgttccgctgcccagagcaggatgtgccctttgatggcagcagcctggatgtgggcatggatgtgagccccacagaccagcccagcttcagcaacctgacagccttccctgggggcgccaaggagctgctgctgcgggacctggaccagctgttcctgagcagtgactgccgccacttcaacagaacagagagcctgcggctggctgatgagctgagcggctgggtgcagaggcaccagaggggccgcaggaagatcccccagagggcccaggagcggcagaagagccagcccaggaagaagagcccccctgtgaaggctgtgcccatccagcccccaggccccccagagcgggacagcgtgggccagctgcagctgtaccgccacccagacaggagccagcctgccttcctggatgccatcgaccggcgggaggacaccttctacgtggtgtccttccggaggaccacctgctgcagccagcccagcgccaccaccaggcctcctggcccccgctgcccctggtag

SEQ ID NO: 142362 - DNA, 2103 bp, synthetic construct
  misc_feature 1..2103: note = Description of Artificial Sequence: Synthetic coding sequence
  source 1..2103: mol_type = other DNA
atggccgagctgatgctgctgtctgaaattgctgaccccacccgcttcttcacagacaacctgctgagccctgaggactgggacagcaccctgtacagcggcctggatgaggtggccgaggagcagacccagctgttccgctgcccagagcaggatgtgccctttgatggcagcagcctggatgtgggcatggatgtgagccccagcgagcccccctgggagctgctgcccatcttcccagacctgcaggtgaagtctgagcccagcagcccctgcagcagcagcagcctgagcagcgagagcagccggctgagcacagagcccagcagcgaggccctgggcgtgggggaggtgctgcacgtgaagacagagagcctggccccacccctgtgcctgctgggagatgaccccaccagcagctttgaaacagtgcagatcaacgtcatccccaccagtgatgacagcagtgatgtgcagaccaagattgagcctgtgagcccctgcagctctgtgaacagcgaggccagcctgctgtctgctgacagcagcagccaggccttcatcggggaggaggtgctggaggtgaagacagagagcctgagccccagcggctgcctgctgtgggatgtgcctgcccccagcctgggcgctgtgcagatctccatgggccccagcctggatggcagcagcggcaaggccctgcccaccaggaagccacccctgcagcccaagcctgtggtgctgaccaccgtgcccatgcccagcagagctgtgccccccagcaccaccgtgctgctgcagagcctggtgcagcccccacctgtgtcccctgtggtgctgatccagggcgccatccgggtgcagcctgagggccctgcccccagcctgcccaggcctgagaggaagagcatcgtgcctgcccccatgcctggcaacagctgccccccagaggtggatgccaagctgctgaagaggcagcagaggatgatcaagaaccgggagagcgcctgccagagcaggaggaagaagaaggagtacctgcagggcctggaggcccggctgcaggccgtgctggccgacaaccagcagctgcggagagaaaatgctgccctgcggcggcggctggaggccctgctggctgaaaattctgagctgaagctgggcagcggcaacaggaaggtggtgtgcatcatggtgttcctgctcttcatcgccttcaactttggacctgtgtccatcagcgagccccccagcgcccccatcagccccaggatgaacaagggggagccccagcccaggaggcacctgctgggcttcagcgagcaggagcctgtgcagggcgtggagcccctgcagggcagcagccagggccccaaggagccccagcccagccccacagaccagcccagcttcagcaacctgacagccttccctgggggcgccaaggagctgctgctgcgggacctggaccagctgttcctgagcagtgactgccgccacttcaacagaacagagagcctgcggctggctgatgagctgagcggctgggtgcagaggcaccagaggggccgcaggaagatcccccagagggcccaggagcggcagaagagccagcccaggaagaagagcccccctgtgaaggctgtgcccatccagcccccaggccccccagagcgggacagcgtgggccagctgcagctgtaccgccacccagacaggagccagcctgccttcctggatgccatcgaccggcgggaggacaccttctacgtggtgtccttcagaagagaccacctgctgctgcctgccatcagccacaacaagaccagccggcccaagatgagcctggtgatgcctgccatggccccaaatgagaccctgagcggccgcggggcccctggggactatgaggagatgatgcagattgaatgtgaggtgatggacaccagggtcatccacatcaagaccagcacagtgccccccagcctgaggaagcagcccagccccaccccaggaaatgccactggaggccccctgcctgtgtctgctgccagccaggcccaccaggccagccaccagcccctgtacctgaaccacccctag

SEQ ID NO: 142363 - DNA, 2112 bp, synthetic construct; identical to SEQ ID NO: 142360
  misc_feature 1..2112: note = Description of Artificial Sequence: Synthetic coding sequence
  source 1..2112: mol_type = other DNA

SEQ ID NO: 142364 - DNA, 2103 bp, synthetic construct; identical to SEQ ID NO: 142362
  misc_feature 1..2103: note = Description of Artificial Sequence: Synthetic coding sequence
  source 1..2103: mol_type = other DNA

SEQ ID NO: 142365 - DNA, 429 bp, synthetic construct
  misc_feature 1..429: note = Description of Artificial Sequence: Synthetic coding sequence
  source 1..429: mol_type = other DNA
tgacagcccagccccacagaccagcccagcttcagcaacctgacagccttccctgggggcgccaaggagctgctgctgcgggacctggaccagctgttcctgagcagtgactgccgccacttcaacagaacagagagcctgcggctggctgatgagctgagcggctgggtgcagaggcaccagaggggccgcaggaagatcccccagagggcccaggagcggcagagcctggacaccagccccagccgcagcctgagccacggccgcagccacctgcagctgcggcagagccccagcaaccccctggacccccagaagggcatcctgtgggccagctgcaactacatcgccacccagacagtgcgcagccagcacagctggatgcagctgacagatggcaagacccacttcatgctgagcctgtcctag

SEQ ID NO: 142366 - DNA, 429 bp, synthetic construct; identical to SEQ ID NO: 142365
  misc_feature 1..429: note = Description of Artificial Sequence: Synthetic coding sequence
  source 1..429: mol_type = other DNA

SEQ ID NO: 142367 - DNA, 2112 bp, synthetic construct; identical to SEQ ID NO: 142360
  misc_feature 1..2112: note = Description of Artificial Sequence: Synthetic coding sequence
  source 1..2112: mol_type = other DNA

SEQ ID NO: 142368 - DNA, 2112 bp, synthetic construct; identical to SEQ ID NO: 142360
  misc_feature 1..2112: note = Description of Artificial Sequence: Synthetic coding sequence
  source 1..2112: mol_type = other DNA

SEQ ID NO: 142369 - DNA, 2103 bp, synthetic construct; identical to SEQ ID NO: 142362
  misc_feature 1..2103: note = Description of Artificial Sequence: Synthetic coding sequence
  source 1..2103: mol_type = other DNA

SEQ ID NO: 142370 - DNA, 429 bp, synthetic construct; identical to SEQ ID NO: 142365
  misc_feature 1..429: note = Description of Artificial Sequence: Synthetic coding sequence
  source 1..429: mol_type = other DNA

SEQ ID NO: 142371 - DNA, 2103 bp, synthetic construct; identical to SEQ ID NO: 142362
  misc_feature 1..2103: note = Description of Artificial Sequence: Synthetic coding sequence
  source 1..2103: mol_type = other DNA

SEQ ID NO: 142372 - DNA, 429 bp, synthetic construct; identical to SEQ ID NO: 142365
  misc_feature 1..429: note = Description of Artificial Sequence: Synthetic coding sequence
  source 1..429: mol_type = other DNA

SEQ ID NO: 142373 - DNA, 669 bp, synthetic construct; identical to SEQ ID NO: 142361
  misc_feature 1..669: note = Description of Artificial Sequence: Synthetic coding sequence
  source 1..669: mol_type = other DNA

SEQ ID NO: 142374 - DNA, 669 bp, synthetic construct; identical to SEQ ID NO: 142361
  misc_feature 1..669: note = Description of Artificial Sequence: Synthetic coding sequence
  source 1..669: mol_type = other DNA

SEQ ID NO: 142375 - DNA, 669 bp, synthetic construct; identical to SEQ ID NO: 142361
  misc_feature 1..669: note = Description of Artificial Sequence: Synthetic coding sequence
  source 1..669: mol_type = other DNA

SEQ ID NO: 142376 - DNA, 924 bp, synthetic construct
  misc_feature 1..924: note = Description of Artificial Sequence: Synthetic coding sequence
  source 1..924: mol_type = other DNA
atgggagatgaccggccctttgtgtgcaatgcccctggctgcggccagcgcttcaccaatgaagaccacctggccgtgcacaagcacaagcatgagatgaccctgaagtttggacctgccaggacagacagcgtcatcatcgctgaccagacccccacccccacccgcttcctgaagaactgtgaggaggtgggcctcttcaatgagctggccagcagctttgagcacgagttcaagaaggccgcagatgaagatgagaagaaggctgctgctggccccctggacatgagcctgcccagcaccccagacatcaagatcaaggaggaggagcctgtggaggtggacagcagccccccagacagccctgccagcagcccctgcagcccccccctgaaggagaagagccctgcccagcccacccccagcactggaggaagaagaagaagaacagtggatgaagatcctgatgagcggcggcagcgcttcctggagaggaacagagctgctgccagccgctgccggcagaagaggaagctgtgggtgagcagcctggagaagaaggccgaggagctgaccagccagaacatccagctgagcaatgaggtgaccctgctgagaaatgaggtggcccagctgaagcagctgctgctggcccacaaggactgccctgtgacagccctgcagaagaagacccagggctacctggagagccccaaggagagcagcgagcccaccggcagccctgcccctgtgatccagcacagcagcgccacagcccccagcaatggcctgtctgtgcgctctgctgctgaggccgtggccacctctgtgctgacccagatggccagccagaggacagagctgtccatgcccatccagagccacgtgatcatgaccccccagagccagagcgctggaagatag

SEQ ID NO: 142377 - DNA, 1485 bp, synthetic construct
  misc_feature 1..1485: note = Description of Artificial Sequence: Synthetic coding sequence
  source 1..1485: mol_type = other DNA
atgggagatgaccggccctttgtgtgcaatgcccctggctgcggccagcgcttcaccaatgaagaccacctggccgtgcacaagcacaagcatgagatgaccctgaagtttggacctgccaggacagacagcgtcatcatcgctgaccagacccccacccccacccgcttcctgaagaactgtgaggaggtgggcctcttcaatgagctggccagcagctttgagcacgagttcaagaaggccgcagatgaagatgagaagaaggcccggagcaggacagtggccaagaagctggtggccgccgccggccccctggacatgagcctgcccagcaccccagacatcaagatcaaggaggaggagcctgtggaggtggacagcagccccccagacagccctgccagcagcccctgcagcccccccctgaaggagaaggaggtgacccccaagcctgtgctgatcagcacccccacccccaccatcgtgcggcccggcagcctgcccctgcacctgggctatgaccccctgcaccccaccctgcccagccccaccagcgtcatcacccaggccccacccagcaaccggcagatgggcagccccaccggcagcctgcccctggtgatgcacctggccaacggccagaccatgcctgtgctgcccggcccccctgtgcagatgcccagcgtcatcagcctggcccggcctgtgtccatggtgcccaacatccctggcatccctggcccccctgtgaacagcagcggcagcatcagccccagcggccaccccatccccagcgaggccaagatgaggctgaaggccaccctgacccaccaggtgagcagcatcaatggaggctgcggcatggtggtgggcacagccagcaccatggtgacagcccggcctgagcagagccagatcctgatccagcacccagatgcccccagccctgcccagccccaggtgtccccagcccagcccacccccagcactggaggaagaagaagaagaacagtggatgaggaccctgatgaaagacggcagcgcttcctggagaggaacagagctgctgccagccgctgccggcagaagaggaagctgtgggtgagcagcctggagaagaaggccgaggagctgaccagccagaacatccagctgagcaatgaggtgaccctgctgagaaatgaggtggcccagctgaagcagctgctgctggcccacaaggactgccctgtgacagccctgcagaagaagacccagggctacctggagagccccaaggagagcagcgagcccaccggcagccctgcccctgtgatccagcacagcagcgccacagcccccagcaatggcctgtctgtgcgctctgctgctgaggccgtggccacctctgtgctgacccagatggccagccagaggacagagctgtccatgcccatccagagccacgtgatcatgaccccccagagccagagcgctggccgctag

SEQ ID NO: 142378 - DNA, 1389 bp, synthetic construct
  misc_feature 1..1389: note = Description of Artificial Sequence: Synthetic coding sequence
  source 1..1389: mol_type = other DNA
atgggagatgaccggccctttgtgtgcaatgcccctggctgcggccagcgcttcaccaatgaagaccacctggccgtgcacaagcacaagcatgagatgaccctgaagtttggacctgccaggacagacagcgtcatcatcgctgaccagacccccacccccacccgcttcctgaagaactgtgaggaggtgggcctcttcaatgagctggccagcagctttgagcacgagttcaagaaggccgcagatgaagatgagaagaaggctgctgctggccccctggacatgagcctgcccagcaccccagacatcaagatcaaggaggaggagcctgtggaggaggtgacccccaagcctgtgctgatcagcacccccacccccaccatcgtgcggcccggcagcctgcccctgcacctgggctatgaccccctgcaccccaccctgcccagccccaccagcgtcatcacccaggccccacccagcaaccggcagatgggcagccccaccggcagcctgcccctggtgatgcacctggccaacggccagaccatgcctgtgctgcccggcccccctgtgcagatgcccagcgtcatcagcctggcccggcctgtgtccatggtgcccaacatccctggcatccctggcccccctgtgaacagcagcggcagcatcagccccagcggccaccccatccccagcgaggccaagatgaggctgaaggccaccctgacccaccaggtgagcagcatcaatggaggctgcggcatggtggtgggcacagccagcaccatggtgacagcccggcctgagcagagccagatcctgatccagcacccagatgcccccagccctgcccagccccaggtgtccccagcccagcccacccccagcactggaggaagaagaagaagaacagtggatgaggaccctgatgaaagacggcagcgcttcctggagaggaacagagctgctgccagccgctgccggcagaagaggaagctgtgggtgagcagcctggagaagaaggccgaggagctgaccagccagaacatccagctgagcaatgaggtgaccctgctgagaaatgaggtggcccagctgaagcagctgctgctggcccacaaggactgccctgtgacagccctgcagaagaagacccagggctacctggagagccccaaggagagcagcgagcccaccggcagccctgcccctgtgatccagcacagcagcgccacagcccccagcaatggcctgtctgtgcgctctgctgctgaggccgtggccacctctgtgctgacccagatggccagccagaggacagagctgtccatgcccatccagagccacgtgatcatgaccccccagagccagagcgctggccgctag

SEQ ID NO: 142379 - DNA, 1452 bp, synthetic construct
  misc_feature 1..1452: note = Description of Artificial Sequence: Synthetic coding sequence
  source 1..1452: mol_type = other DNA
atgggagatgaccggccctttgtgtgcaatgcccctggctgcggccagcgcttcaccaatgaagaccacctggccgtgcacaagcacaagcatgagatgaccctgaagtttggacctgccaggacagacagcgtcatcatcgctgaccagacccccacccccacccgcttcctgaagaactgtgaggaggtgggcctcttcaatgagctggccagcagctttgagcacgagttcaagaaggccgcagatgaagatgagaagaaggctgctgctggccccctggacatgagcctgcccagcaccccagacatcaagatcaaggaggaggagcctgtggaggtggacagcagccccccagacagccctgccagcagcccctgcagcccccccctgaaggagaaggaggtgacccccaagcctgtgctgatcagcacccccacccccaccatcgtgcggcccggcagcctgcccctgcacctgggctatgaccccctgcaccccaccctgcccagccccaccagcgtcatcacccaggccccacccagcaaccggcagatgggcagccccaccggcagcctgcccctggtgatgcacctggccaacggccagaccatgcctgtgctgcccggcccccctgtgcagatgcccagcgtcatcagcctggcccggcctgtgtccatggtgcccaacatccctggcatccctggcccccctgtgaacagcagcggcagcatcagccccagcggccaccccatccccagcgaggccaagatgaggctgaaggccaccctgacccaccaggtgagcagcatcaatggaggctgcggcatggtggtgggcacagccagcaccatggtgacagcccggcctgagcagagccagatcctgatccagcacccagatgcccccagccctgcccagccccaggtgtccccagcccagcccacccccagcactggaggaagaagaagaagaacagtggatgaagatcctgatgagcggcggcagcgcttcctggagaggaacagagctgctgccagccgctgccggcagaagaggaagctgtgggtgagcagcctggagaagaaggccgaggagctgaccagccagaacatccagctgagcaatgaggtgaccctgctgagaaatgaggtggcccagctgaagcagctgctgctggcccacaaggactgccctgtgacagccctgcagaagaagacccagggctacctggagagccccaaggagagcagcgagcccaccggcagccctgcccctgtgatccagcacagcagcgccacagcccccagcaatggcctgtctgtgcgctctgctgctgaggccgtggccacctctgtgctgacccagatggccagccagaggacagagctgtccatgcccatccagagccacgtgatcatgaccccccagagccagagcgctggaagatag

SEQ ID NO: 142380 - DNA, 1452 bp, synthetic construct; identical to SEQ ID NO: 142379
  misc_feature 1..1452: note = Description of Artificial Sequence: Synthetic coding sequence
  source 1..1452: mol_type = other DNA

SEQ ID NO: 142381 - DNA, 1485 bp, synthetic construct; identical to SEQ ID NO: 142377
  misc_feature 1..1485: note = Description of Artificial Sequence: Synthetic coding sequence
  source 1..1485: mol_type = other DNA

SEQ ID NO: 142382 - DNA, 354 bp, synthetic construct
  misc_feature 1..354: note = Description of Artificial Sequence: Synthetic coding sequence
  source 1..354: mol_type = other DNA
atgggagatgaccggccctttgtgtgcaatgcccctggctgcggccagcgcttcaccaatgaagaccacctggccgtgcacaagcacaagcatgagatgaccctgaagtttggacctgccaggacagacagcgtcatcatcgctgaccagacccccacccccacccgcttcctgaagaactgtgaggaggtgggcctcttcaatgagctggccagcagctttgagcacgagttcaagaaggccgcagatgaagatgagaagaaggcccggagcaggacagtggccaagaagctggtggtgttccggcccaggctcttcctgctgtgcttcggcatcatcttcctgattggatag

SEQ ID NO: 142383 - DNA, 354 bp, synthetic construct; identical to SEQ ID NO: 142382
  misc_feature 1..354: note = Description of Artificial Sequence: Synthetic coding sequence
  source 1..354: mol_type = other DNA

SEQ ID NO: 142384 - DNA, 3813 bp, synthetic construct
  misc_feature 1..3813: note = Description of Artificial Sequence: Synthetic coding sequence
  source 1..3813: mol_type = other DNA
atggacagcctggaggagccccagaagaaggtgttcaaggccaggaagaccatgagggtgtctgaccggcagcagctggaggccgtgtacaaggtgaaggaggagctgctgaagacagatgtgaagctgctgaatggaaatcatgaaaatggagacctggaccccaccagccccctggagaacatggactacatcaaggacaaggaggaggtgaatggcatcgaggagatctgctttgatcctgagggcagcaaggccgagtggaaggagaccccctgcatcctgtctgtgaatgtgaagaacaagcaggatgatgacctgaactgtgagcccctgagcccccacaacatcaccccagagcctgtgtccaagctgcctgctgagcctgtgtctggggaccctgcccctggggacctggatgctggggaccctgccagcggcgtgctggccagcggggacagcaccagcggggaccccaccagcagcgagcccagcagcagtgatgctgccagcggagatgccaccagcggagatgcccccagcggagatgtgtccccaggagatgccaccagcggagatgccacagcagatgacctgagcagcggggaccccaccagcagtgaccccatccctggagagcctgtgcctgtggagcccatcagcggggactgtgccgcagatgacatcgccagcagcgagatcacctctgtggacctggccagcggggccccagccagcacagatcctgccagtgatgacctggccagcggggacctgagcagcagcgagctggccagtgatgacctggccactggagagctggccagtgatgagctgaccagcgagagcacctttgacaggacctttgagcccaagtctgtgcctgtgtgtgagcctgtgcctgagattgacaacatcgagcccagcagcaacaaggatgatgacttcctggagaagaatggagcagatgagaagctggagcagatccagagcaaggacagcctggatgagaagaacaaggctgacaacaacattgatgccaatgaggagaccctggagacagatgacaccaccatctgcagcgaccggcccccagaaaatgagaagaaggtggaggaggacatcatcacagagctggccctgggagaagatgccatcagcagctccatggagattgaccagggcgagaagaatgaagatgagaccagcgctgacctggtggagaccatcaatgaaaatgtgattgaggacaacaagtctgagaacatcctggagaacacagacagcatggagacagatgagatcatccccatcctggagaagctggcccccagtgaagatgagctgacctgcttcagcaagaccagcctgctgcccattgatgagaccaacccagacctggaggagaagatggagagcagctttggcagccccagcaagcaggagagcagcgagagcctgcccaaggaggccttcctggtgctgagtgatgaggaggacatcagcggggagaaggatgagagcgaggtgatcagccagaatgagacctgcagccctgctgaggtggagagcaatgagaaggacaacaagccagaggaggaggagcaggtgattcatgaagatgatgagcggcccagcgagaagaatgagttcagcaggaggaagaggagcaagtctgaggacatggacaacgtgcagagcaagagaagacgctacatggaggaggagtatgaagctgagttccaggtgaagatcacagccaagggggacatcaaccagaagctgcagaaggtgatccagtggctgctggaggagaagctgtgtgccctgcagtgtgctgtgtttgacaagaccctggccgagctgaagaccagggtggagaagattgagtgcaacaagaggcacaagacagtgctgacagagctgcaggccaagatcgcccggctgaccaagagatttgaagctgccaaggaggacctgaagaagagacatgagcacccccccaacccccctgtgtcccctgggaagacagtgaatgatgtgaacagcaacaacaacatgagctacagaaatgccggcaccgtgcggcagatgctggagagcaagagaaatgtgtctgagagcgccccacccagcttccagacccctgtgaacacagtgagcagcaccaacctggtgaccccacctgctgtggtgagcagccagcccaagctgcagacccctgtgaccagcggcagcctgacagccacctctgtgctgcctgcccccaacacagccaccgtggtggccaccacccaggtgcccagcggcaacccccagcccaccatcagcctgcagcccctgcccgtcatcctgcacgtgcctgtggccgtgagcagccagccccagctgctgcagagccaccctggcaccctggtgaccaaccagcccagcggaaatgtggagttcatctctgtgcagagcccccccaccgtgtctggcctgaccaagaaccctgtgtccctgcccagcctgcccaaccccaccaagcccaacaacgtgcccagcgtgcccagccccagcatccagaggaaccccacagccagcgctgcccccctgggcaccaccctggccgtgcaggccgtgcccacagcccacagcatcgtgcaggccaccaggaccagcctgcccaccgtgggccccagcggcctgtacagccccagcaccaacagaggccccatccagatgaagatccccatcagcgccttcagcaccagcagcgctgctgagcagaacagcaacaccaccccaagaattgagaaccagaccaacaagaccattgatgcctctgtgtccaagaaggctgctgacagcaccagccagtgtgggaaggccactggaagtgacagcagcggcgtgattgacctgaccatggatgatgaggagagcggggccagccaggaccccaagaagctgaaccacacccctgtgtccaccatgagcagcagccagcctgtgtcccggcccctgcagcccatccagcctgccccacccctgcagcccagcggcgtgcccaccagcggccccagccagaccaccatccacctgctgcccacagcccccaccaccgtgaatgtgacccacaggcctgtgacccaggtgaccacccggctgcctgtgccccgggccccagccaaccaccaggtggtgtacaccaccctgcctgcccccccagcccaggcccccctgcggggcaccgtgatgcaggccccagctgtgcggcaggtgaacccccagaacagcgtgacagtgcgggtgccccagaccaccacctacgtggtgaacaacggcctgaccctgggcagcacaggcccccagctgactgtgcaccaccggcccccccaggtgcacacagagccccccaggcctgtgcacccagcccccctgcctgaggccccccagccccagaggctgcccccagaggccgccagcaccagcctgccccagaagccccacctgaagctggcccgggtgcagagccagaatggaattgtgctgtcctggagcgtgctggaggtggacaggagctgtgccaccgtggacagctaccacctgtatgcctaccacgaggagcccagcgccaccgtgcccagccagtggaagaagatcggggaggtgaaggccctgcccctgcccatggcctgcaccctgacccagtttgtgtctggcagcaagtactactttgctgtgcgggccaaggacatctacggccgcttcggccccttctgtgacccccagagcacagatgtgatcagcagcacccagagcagctag

SEQ ID NO: 142385 - DNA, 1548 bp, synthetic construct
  misc_feature 1..1548: note = Description of Artificial Sequence: Synthetic coding sequence
  source 1..1548: mol_type = other DNA
atggacagcctggaggagccccagaagaaggtgttcaaggccaggaagaccatgagggtgtctgaccggcagcagctggaggccgtgtacaaggtgaaggaggagctgctgaagacagatgtgaagctgctgaatggaaatcatgaaaatggagacctggaccccaccagccccctggagaacatggactacatcaaggacaaggaggaggtgaatggcatcgaggagatctgctttgatcctgagggcagcaaggccgagtggaaggagaccccctgcatcctgtctgtgaatgtgaagaacaagcaggatgatgacctgaactgtgagcccctgagcccccacaacatcaccccagagcctgtgtccaagctgcctgctgagcctgtgtctggggaccctgcccctggggacctggatgctggggaccctgccagcggcgtgctggccagcggggacagcaccagcggggaccccaccagcagcgagcccagcagcagtgatgctgccagcggagatgccaccagcggagatgcccccagcggagatgtgtccccaggagatgccaccagcggagatgccacagcagatgacctgagcagcggggaccccaccagcagtgaccccatccctggagagcctgtgcctgtggagcccatcagcggggactgtgccgcagatgacatcgccagcagcgagatcacctctgtggacctggccagcggggccccagccagcacagatcctgccagtgatgacctggccagcggggacctgagcagcagcgagctggccagtgatgacctggccactggagagctggccagtgatgagctgaccagcgagagcacctttgacaggacctttgagcccaagtctgtgcctgtgtgtgagcctgtgcctgagattgacaacatcgagcccagcagcaacaaggatgatgacttcctggagaagaatggagcagatgagaagctggagcagatccagagcaaggacagcctggatgagaagaacaaggctgacaacaacattgatgccaatgaggagaccctggagacagatgacaccaccatctgcagcgaccggcccccagaaaatgagaagaaggtggaggaggacatcatcacagagctggccctgggagaagatgccatcagcagctccatggagattgaccagggcgagaagaatgaagatgagaccagcgctgacctggtggagaccatcaatgaaaatgtgattgaggacaacaagtctgagaacatcctggagaacacagacagcatggagacagatgagatcatccccatcctggagaagctggcccccagtgaagatgagctgacctgcttcagcaagaccagcctgctgcccattgatgagaccaacccagacctggaggagaagatggagagcagctttggcagccccagcaagcaggagagcagcgagagcctgcccaaggaggccttcctggtgctgagtgatgaggaggacatcagcggggagaaggatgagagcgaggtgatcagccagaatgaatag

SEQ ID NO: 142386 - DNA, 378 bp, synthetic construct
  misc_feature 1..378: note = Description of Artificial Sequence: Synthetic coding sequence
  source 1..378: mol_type = other DNA
atggacagcctggaggagccccagaagaaggtgttcaaggccaggaagaccatgagggtgtctgaccggcagcagctggaggccgtgtacaaggtgaaggaggagctgctgaagacagatgtgaagctgctgaatggaaatcatgaaaatggagacctggaccccaccagccccctggagaacatggactacatcaaggacaaggaggaggtgaatggcatcgaggagatctgctttgatcctgagggcagcaaggccgagtggaaggagaccccctgcatcctgtctgtgaatgtgaagaacaagcaggatgatgacctgaactgtgagcccctgagcccccacaacatcaccccagagcctgtgtccaagctgtag

SEQ ID NO: 142387 - DNA, 459 bp, synthetic construct
  misc_feature 1..459: note = Description of Artificial Sequence: Synthetic coding sequence
  source 1..459: mol_type = other DNA
atggacagcctggaggagccccagaagaaggtgttcaaggccaggaagaccatgagggtgtctgaccggcagcagctggaggccgtgtacaaggtgaaggaggagctgctgaagacagatgtgaagctgctgaatggaaatcatgaaaatggagacctggaccccaccagccccctggagaacatggactacatcaaggacaaggaggaggtgaatggcatcgaggagatctgctttgatcctgagggcagcaaggccgagtggaaggagaccccctgcatcctgtctgtgaatgtgaagaacaagcaggatgatgacctgaactgtgagcccctgagcccccacaacatcaccccagagcctgtgtccaagctgcctgctgagcctgtgtctggggaccctgcccctggggacctggatgctggggaccctgccagcggcgtgctggccagcggctag

SEQ ID NO: 142388 - DNA, 312 bp, synthetic construct
  misc_feature 1..312: note = Description of Artificial Sequence: Synthetic coding sequence
  source 1..312: mol_type = other DNA
atggacagcctggaggagccccagaagaaggtgttcaaggccaggaagaccatgagggtgtctgaccggcagcagctggaggccgtgtacaaggtgaaggaggagctgctgaagacagatgtgaagctgctgaatggaaatcatgaaaatggagacctggaccccaccagccccctggagaacatggactacatcaaggacaaggaggaggtgaatggcatcgaggagatctgctttgatcctgagggcagcaaggccgagtggaaggagaccccctgcatcctgtctgtgaatgtgaagaacaagcagtag

SEQ ID NO: 142389 - DNA, 270 bp, synthetic construct
  misc_feature 1..270: note = Description of Artificial Sequence: Synthetic coding sequence
  source 1..270: mol_type = other DNA
atggacagcctggaggagccccagaagaaggtgttcaaggccaggaagaccatgagggtgtctgaccggcagcagctggaggccgtgtacaaggtgaaggaggagctgctgaagacagatgtgaagctgctgaatggaaatcatgaaaatggagacctggaccccaccagccccctggagaacatggactacatcaaggacaaggaggaggtgaatggcatcgaggagatctgctttgatcctgagggcagcaaggccgagtggaagtag

SEQ ID NO: 142390 - DNA, 534 bp, synthetic construct
  misc_feature 1..534: note = Description of Artificial Sequence: Synthetic coding sequence
  source 1..534: mol_type = other DNA
atggacagcctggaggagccccagaagaaggtgttcaaggccaggaagaccatgagggtgtctgaccggcagcagctggaggccgtgtacaaggtgaaggaggagctgctgaagacagatgtgaagctgctgaatggaaatcatgaaaatggagacctggaccccaccagccccctggagaacatggactacatcaaggacaaggaggaggtgaatggcatcgaggagatctgctttgatcctgagggcagcaaggccgagtggaaggagaccccctgcatcctgtctgtgaatgtgaagaacaagcaggatgatgacctgaactgtgagcccctgagcccccacaacatcaccccagagcctgtgtccaagctgcctgctgagcctgtgtctggggaccctgcccctggggacctggatgctggggaccctgccagcggcgtgctggccagcggggacagcaccagcggggaccccaccagcagcgagcccagcagcagtgatgctgccagcggagatgccaccagcggctag

SEQ ID NO: 142391 - DNA, 3813 bp, synthetic construct; identical to SEQ ID NO: 142384
  misc_feature 1..3813: note = Description of Artificial Sequence: Synthetic coding sequence
  source 1..3813: mol_type = other DNA

SEQ ID NO: 142392 - DNA, 510 bp, synthetic construct
  misc_feature 1..510: note = Description of Artificial Sequence: Synthetic coding sequence
  source 1..510: mol_type = other DNA
atggacagcctggaggagccccagaagaaggtgttcaaggccaggaagaccatgagggtgtctgaccggcagcagctggaggccgtgtacaaggtgaaggaggagctgctgaagacagatgtgaagctgctgaatggaaatcatgaaaatggagacctggaccccaccagccccctggagaacatggactacatcaaggacaaggaggaggtgaatggcatcgaggagatctgctttgatcctgagggcagcaaggccgagtggaaggagaccccctgcatcctgtctgtgaatgtgaagaacaagcaggatgatgacctgaactgtgagcccctgagcccccacaacatcaccccagagcctgtgtccaagctgcctgctgagcctgtgtctggggaccctgcccctggggacctggatgctggggaccctgccagcggcgtgctggccagcggggacagcaccagcggggaccccaccagcagcgagcccagcagcagtgatgcctag

SEQ ID NO: 142393 - DNA, 99 bp, synthetic construct
  misc_feature 1..99: note = Description of Artificial Sequence: Synthetic coding sequence
  source 1..99: mol_type = other DNA
atggacagcctggaggagccccagaagaaggtgttcaaggccaggaagaccatgagggtgtctgaccggcagcagctggaggccgtgtacaaggtgtag

SEQ ID NO: 142394 - DNA, 399 bp, synthetic construct
  misc_feature 1..399: note = Description of Artificial Sequence: Synthetic coding sequence
  source 1..399: mol_type = other DNA
atggacagcctggaggagccccagaagaaggtgttcaaggccaggaagaccatgagggtgtctgaccggcagcagctggaggccgtgtacaaggtgaaggaggagctgctgaagacagatgtgaagctgctgaatggaaatcatgaaaatggagacctggaccccaccagccccctggagaacatggactacatcaaggacaaggaggaggtgaatggcatcgaggagatctgctttgatcctgagggcagcaaggccgagtggaaggagaccccctgcatcctgtctgtgaatgtgaagaacaagcaggatgatgacctgaactgtgagcccctgagcccccacaacatcaccccagagcctgtgtccaagctgcctgctgagcctgtgtctggatag

SEQ ID NO: 142395 - DNA, 531 bp, synthetic construct
  misc_feature 1..531: note = Description of Artificial Sequence: Synthetic coding sequence
  source 1..531: mol_type = other DNA
atggacagcctggaggagccccagaagaaggtgttcaaggccaggaagaccatgagggtgtctgaccggcagcagctggaggccgtgtacaaggtgaaggaggagctgctgaagacagatgtgaagctgctgaatggaaatcatgaaaatggagacctggaccccaccagccccctggagaacatggactacatcaaggacaaggaggaggtgaatggcatcgaggagatctgctttgatcctgagggcagcaaggccgagtggaaggagaccccctgcatcctgtctgtgaatgtgaagaacaagcaggatgatgacctgaactgtgagcccctgagcccccacaacatcaccccagagcctgtgtccaagctgcctgctgagcctgtgtctggggaccctgcccctggggacctggatgctggggaccctgccagcggcgtgctggccagcggggacagcaccagcggggaccccaccagcagcgagcccagcagcagtgatgctgccagcggagatgccaccagctag

SEQ ID NO: 142396 - DNA, 180 bp, synthetic construct
  misc_feature 1..180: note = Description of Artificial Sequence: Synthetic coding sequence
  source 1..180: mol_type = other DNA
atggacagcctggaggagccccagaagaaggtgttcaaggccaggaagaccatgagggtgtctgaccggcagcagctggaggccgtgtacaaggtgaaggaggagctgctgaagacagatgtgaagctgctgaatggaaatcatgaaaatggagacctggaccccaccagccccctgtag

SEQ ID NO: 142397 - DNA, 3318 bp, synthetic construct
  misc_feature 1..3318: note = Description of Artificial Sequence: Synthetic coding sequence
  source 1..3318: mol_type = other DNA
atggacagcctggaggagccccagaagaaggtgttcaaggccaggaagaccatgagggtgtctgaccggcagcagctggaggccgtgtacaaggtgaaggaggagctgctgaagacagatgtgaagctgctgaatggaaatcatgaaaatggagacctggaccccaccagccccctggagaacatggactacatcaaggacaaggaggaggtgaatggcatcgaggagatctgctttgatcctgagggcagcaaggccgagtggaaggagaccccctgcatcctgtctgtgaatgtgaagaacaagcaggatgatgacctgaactgtgagcccctgagcccccacaacatcaccccagagcctgtgtccaagctgcctgctgagcctgtgtctggggaccctgcccctggggacctggatgctggggaccctgccagcggcgtgctggccagcggggacagcaccagcggggaccccaccagcagcgagcccagcagcagtgatgctgccagcggagatgccaccagcggagatgcccccagcggagatgtgtccccaggagatgccaccagcggagatgccacagcagatgacctgagcagcggggaccccaccagcagtgaccccatccctggagagcctgtgcctgtggagcccatcagcggggactgtgccgcagatgacatcgccagcagcgagatcacctctgtggacctggccagcggggccccagccagcacagatcctgccagtgatgacctggccagcggggacctgagcagcagcgagctggccagtgatgacctggccactggagagctggccagtgatgagctgaccagcgagagcacctttgacaggacctttgagcccaagtctgtgcctgtgtgtgagcctgtgcctgagattgacaacatcgagcccagcagcaacaaggatgatgacttcctggagaagaatggagcagatgagaagctggagcagatccagagcaaggacagcctggatgagaagaacaaggctgacaacaacattgatgccaatgaggagaccctggagacagatgacaccaccatctgcagcgaccggcccccagaaaatgagaagaaggtggaggaggacatcatcacagagctggccctgggagaagatgccatcagcagctccatggagattgaccagggcgagaagaatgaagatgagaccagcgctgacctggtggagaccatcaatgaaaatgtgattgaggacaacaagtctgagaacatcctggagaacacagacagcatggagacagatgagatcatccccatcctggagaagctggcccccagtgaagatgagctgacctgcttcagcaagaccagcctgctgcccattgatgagaccaacccagacctggaggagaagatggagagcagctttggcagccccagcaagcaggagagcagcgagagcctgcccaaggaggccttcctggtgctgagtgatgaggaggacatcagcggggagaaggatgagagcgaggtgatcagccagaatgagacctgcagccctgaggtggagagcaatgagaaggacaacaagccagaggaggaggagcaggtgattcatgaagatgatgagcggcccagcgagaagaatgagttcagcaggaggaagaggagcaagtctgaggacatggacaacgtgcagagcaagagaagacgctacatggaggaggagtatgaggccgagttccaggtgaagatcacagccaagggggacatcaaccagaagctgcagaaggtgatccagtggctgctggaggagaagctgtgtgccctgcagtgtgctgtgtttgacaagaccctggccgagctgaagaccagggtggagaagattgagtgcaacaagaggcacaagacagtgctgacagagctgcaggccaagatcgcccggctgaccaagagatttgaggccgccaaggaggacctgaagaagagacatgagcacccccccaacccccctgtgtccccaggcaagacagtgaatgatgtgaacagcaacaacaacatgagctacagaaatgccggcaccgtgcggcagatgctggagagcaagagaaatgtgtctgagagcgcccctccttccttccagacccctgtgaacacagtgagcagcaccaacctggtgaccccacctgctgtggtgagcagccagcccaagctgcagacccctgtgaccagcggcagcctgacagccacctctgtgctgcctgcccccaacacagccaccgtggtggccaccacccaggtgcccagcggcaacccccagcccaccatcagcctgcagcccctgcctgtgatcctgcacgtgcctgtggccgtgagcagccagccccagctgctgcagagccaccctggcaccctggtgaccaaccagcccagcggaaatgtggagttcatctctgtgcagagccccccaacagtgtctggcctgaccaagaaccctgtgtccctgcccagcctgcccaaccccaccaagcccaacaacgtgcccagcgtgcccagccccagcatccagaggaaccccacagccagcgctgcccccctgggcaccaccctggccgtgcaggccgtgcccacagcccacagcatcgtgcaggccaccaggaccagcctgcccaccgtgggccccagcggcctgtacagccccagcaccaacagaggccccatccagatgaagatccccatcagcgccttcagcaccagcagcgctgctgagcagaacagcaacaccaccccaagaattgagaaccagaccaacaagaccattgatgcctctgtgtccaagaaggctgctgacagcaccagccagtgtgggaaggccaccggcagtgacagcagtggagtcatcgacctgaccatggatgatgaggagagcggggccagccaggaccccaagaagctgaaccacacccctgtgtccaccatgagcagcagccagcctgtgtcccggcccctgcagcccatccagcctgccccacccctgcagcccagcggcgtgcccaccagcggccccagccagaccaccatccacctgctgcccacagcccccaccaccgtgaatgtgacccacaggcctgtgacccaggtgaccacccggctgcctgtgccccgggccccagccaaccaccaggtggtgtacaccaccctgcctgcccccccagcccaggcccccctgcggggcaccgtgatgcaggccccagctgtgcggcaggtgaacccccagaacagcaagcgcttcttcctgtacatggccccccgctacatgtag

SEQ ID NO: 142398 - DNA, 3837 bp, synthetic construct
  misc_feature 1..3837: note = Description of Artificial Sequence: Synthetic coding sequence
  source 1..3837: mol_type = other DNA
atgcaccaggaccagcgcttcaggatggacagcctggaggagccccagaagaaggtgttcaaggccaggaagaccatgagggtgtctgaccggcagcagctggaggccgtgtacaaggtgaaggaggagctgctgaagacagatgtgaagctgctgaatggaaatcatgaaaatggagacctggaccccaccagccccctggagaacatggactacatcaaggacaaggaggaggtgaatggcatcgaggagatctgctttgatcctgagggcagcaaggccgagtggaaggagaccccctgcatcctgtctgtgaatgtgaagaacaagcaggatgatgacctgaactgtgagcccctgagcccccacaacatcaccccagagcctgtgtccaagctgcctgctgagcctgtgtctggggaccctgcccctggggacctggatgctggggaccctgccagcggcgtgctggccagcggggacagcaccagcggggaccccaccagcagcgagcccagcagcagtgatgctgccagcggagatgccaccagcggagatgcccccagcggagatgtgtccccaggagatgccaccagcggagatgccacagcagatgacctgagcagcggggaccccaccagcagtgaccccatccctggagagcctgtgcctgtggagcccatcagcggggactgtgccgcagatgacatcgccagcagcgagatcacctctgtggacctggccagcggggccccagccagcacagatcctgccagtgatgacctggccagcggggacctgagcagcagcgagctggccagtgatgacctggccactggagagctggccagtgatgagctgaccagcgagagcacctttgacaggacctttgagcccaagtctgtgcctgtgtgtgagcctgtgcctgagattgacaacatcgagcccagcagcaacaaggatgatgacttcctggagaagaatggagcagatgagaagctggagcagatccagagcaaggacagcctggatgagaagaacaaggctgacaacaacattgatgccaatgaggagaccctggagacagatgacaccaccatctgcagcgaccggcccccagaaaatgagaagaaggtggaggaggacatcatcacagagctggccctgggagaagatgccatcagcagctccatggagattgaccagggcgagaagaatgaagatgagaccagcgctgacctggtggagaccatcaatgaaaatgtgattgaggacaacaagtctgagaacatcctggagaacacagacagcatggagacagatgagatcatccccatcctggagaagctggcccccagtgaagatgagctgacctgcttcagcaagaccagcctgctgcccattgatgagaccaacccagacctggaggagaagatggagagcagctttggcagccccagcaagcaggagagcagcgagagcctgcccaaggaggccttcctggtgctgagtgatgaggaggacatcagcggggagaaggatgagagcgaggtgatcagccagaatgagacctgcagccctgctgaggtggagagcaatgagaaggacaacaagccagaggaggaggagcaggtgattcatgaagatgatgagcggcccagcgagaagaatgagttcagcaggaggaagaggagcaagtctgaggacatggacaacgtgcagagcaagagaagacgctacatggaggaggagtatgaagctgagttccaggtgaagatcacagccaagggggacatcaaccagaagctgcagaaggtgatccagtggctgctggaggagaagctgtgtgccctgcagtgtgctgtgtttgacaagaccctggccgagctgaagaccagggtggagaagattgagtgcaacaagaggcacaagacagtgctgacagagctgcaggccaagatcgcccggctgaccaagagatttgaagctgccaaggaggacctgaagaagagacatgagcacccccccaacccccctgtgtcccctgggaagacagtgaatgatgtgaacagcaacaacaacatgagctacagaaatgccggcaccgtgcggcagatgctggagagcaagagaaatgtgtctgagagcgccccacccagcttccagacccctgtgaacacagtgagcagcaccaacctggtgaccccacctgctgtggtgagcagccagcccaagctgcagacccctgtgaccagcggcagcctgacagccacctctgtgctgcctgcccccaacacagccaccgtggtggccaccacccaggtgcccagcggcaacccccagcccaccatcagcctgcagcccctgcccgtcatcctgcacgtgcctgtggccgtgagcagccagccccagctgctgcagagccaccctggcaccctggtgaccaaccagcccagcggaaatgtggagttcatctctgtgcagagcccccccaccgtgtctggcctgaccaagaaccctgtgtccctgcccagcctgcccaaccccaccaagcccaacaacgtgcccagcgtgcccagccccagcatccagaggaaccccacagccagcgctgcccccctgggcaccaccctggccgtgcaggccgtgcccacagcccacagcatcgtgcaggccaccaggaccagcctgcccaccgtgggccccagcggcctgtacagccccagcaccaacagaggccccatccagatgaagatccccatcagcgccttcagcaccagcagcgctgctgagcagaacagcaacaccaccccaagaattgagaaccagaccaacaagaccattgatgcctctgtgtccaagaaggctgctgacagcaccagccagtgtgggaaggccactggaagtgacagcagcggcgtgattgacctgaccatggatgatgaggagagcggggccagccaggaccccaagaagctgaaccacacccctgtgtccaccatgagcagcagccagcctgtgtcccggcccctgcagcccatccagcctgccccacccctgcagcccagcggcgtgcccaccagcggccccagccagaccaccatccacctgctgcccacagcccccaccaccgtgaatgtgacccacaggcctgtgacccaggtgaccacccggctgcctgtgccccgggccccagccaaccaccaggtggtgtacaccaccctgcctgcccccccagcccaggcccccctgcggggcaccgtgatgcaggccccagctgtgcggcaggtgaacccccagaacagcgtgacagtgcgggtgccccagaccaccacctacgtggtgaacaacggcctgaccctgggcagcacaggcccccagctgactgtgcaccaccggcccccccaggtgcacacagagccccccaggcctgtgcacccagcccccctgcctgaggccccccagccccagaggctgcccccagaggccgccagcaccagcctgccccagaagccccacctgaagctggcccgggtgcagagccagaatggaattgtgctgtcctggagcgtgctggaggtggacaggagctgtgccaccgtggacagctaccacctgtatgcctaccacgaggagcccagcgccaccgtgcccagccagtggaagaagatcggggaggtgaaggccctgcccctgcccatggcctgcaccctgacccagtttgtgtctggcagcaagtactactttgctgtgcgggccaaggacatctacggccgcttcggccccttctgtgacccccagagcacagatgtgatcagcagcacccagagcagctag

SEQ ID NO: 142399 - DNA, 510 bp, synthetic construct; identical to SEQ ID NO: 142392
  misc_feature 1..510: note = Description of Artificial Sequence: Synthetic coding sequence
  source 1..510: mol_type = other DNA

SEQ ID NO: 142400 - DNA, 1632 bp, synthetic construct
  misc_feature 1..1632: note = Description of Artificial Sequence: Synthetic coding sequence
  source 1..1632: mol_type = other DNA
atggccagcccagacaggagcaagaggaagatcctgaaggccaagaagaccatgcccctgagctgcaggaagcaggtggagatgctgaacaagagcagaaatgtggaggccctgaagacagccatcggcagcaatgtgcccagcggcaaccagagcttcagccccagcgtcatcaccaggaccacagagatcaccaagtgcagccccagtgaaaatggagccagcagcctggacagcaacaagaacagcatcagcgagaagagcaaggtgttcagccagaactgcatcaagcctgtggaggagatcgtgcacagcgagaccaagctggagcaggtggtgtgcagctaccagaagcccagcaggaccacagagagccccagcagggtcttcacagaggaggccaaggacagcctgaacaccagtgaaaatgattctgagcaccagaccaacgtgaccaggagcctgtttgagcacgagggcgcctgcagcctgaagagcagctgctgcccccccagcgtgctgtctggagtggtgcagatgcctgagagcacagtgaccagcacagtgggggacaagaagacagaccagatggtgttccacctggagaccaacagcaacagcgagagccatgacaagaggcagagcgacaacatcctgtgcagcgaggacagcggctttgtgcctgtggagaagacccccaacctggtgaacagcgtgaccagcaacaactgtgctgatgacatcctgaagacagatgaatgttccaggaccagcatcagcaactgtgagagcgctgacagcacctggcagagcagcctggacaccaacaacaacagccactaccagaagaagaggatgttttctgaaaatgaggagaatgtgaagaggatgaagaccagcgagcagatcaatgaaaacatctgtgtgtccctggagcggcagacagccttcctggagcaggtgcgccacctgatccagcaggagatctacagcatcaactatgagctgtttgacaagaagctgaaggagctgaaccagagaattggcaagacagagtgcaggaacaagcatgagggcattgctgacaagctgctggccaagatcgccaagctgcagaggcgcatcaagacagtgctgctcttccagaggaactgcctgaagcccaacatgctgagcagcaatggagccagcaaggtggccaacagcgaggccatgatcctggacaagaacctggagagcgtgaacagccccatcgagaagagctctgtgaactatgagcccagcaaccccagcgagaagggcagcaagaagatcaacctgagcagtgaccagaacaagtctgtgtctgagagcaacaatgatgatgtgatgctgatctctgtggagagccccaacctgaccacccccatcaccagcaaccccacagacaccaggaagatcaccagcggcaacagcagcaacagccccaatgctgaggtgatgaaggtgcagtacccaccctggagccacatcaggaagctgctgcagacccagaggaagcagccccactggcacaagatgcagagccgcttcctgagccccctgagcacctgccacctgagccagaaccaccagcaccactacctgaactag

SEQ ID NO: 142401 - DNA, 2049 bp, synthetic construct
  misc_feature 1..2049: note = Description of Artificial Sequence: Synthetic coding sequence
  source 1..2049: mol_type = other DNA
atggccagcccagacaggagcaagaggaagatcctgaaggccaagaagaccatgcccctgagctgcaggaagcaggtggagatgctgaacaagagcagaaatgtggaggccctgaagacagccatcggcagcaatgtgcccagcggcaaccagagcttcagccccagcgtcatcaccaggaccacagagatcaccaagtgcagccccagtgaaaatggagccagcagcctggacagcaacaagaacagcatcagcgagaagagcaaggtgttcagccagaactgcatcaagcctgtggaggagatcgtgcacagcgagaccaagctggagcaggtggtgtgcagctaccagaagcccagcaggaccacagagagccccagcagggtcttcacagaggaggccaaggacagcctgaacaccagtgaaaatgattctgagcaccagaccaacgtgaccaggagcctgtttgagcacgagggcgcctgcagcctgaagagcagctgctgcccccccagcgtgctgtctggagtggtgcagatgcctgagagcacagtgaccagcacagtgggggacaagaagacagaccagatggtgttccacctggagaccaacagcaacagcgagagccatgacaagaggcagagcgacaacatcctgtgcagcgaggacagcggctttgtgcctgtggagaagacccccaacctggtgaacagcgtgaccagcaacaactgtgctgatgacatcctgaagacagatgaatgttccaggaccagcatcagcaactgtgagagcgctgacagcacctggcagagcagcctggacaccaacaacaacagccactaccagaagaagaggatgttttctgaaaatgaggagaatgtgaagaggatgaagaccagcgagcagatcaatgaaaacatctgtgtgtccctggagcggcagacagccttcctggagcaggtgcgccacctgatccagcaggagatctacagcatcaactatgagctgtttgacaagaagctgaaggagctgaaccagagaattggcaagacagagtgcaggaacaagcatgagggcattgctgacaagctgctggccaagatcgccaagctgcagaggcgcatcaagacagtgctgctcttccagaggaactgcctgaagcccaacatgctgagcagcaatggagccagcaaggtggccaacagcgaggccatgatcctggacaagaacctggagagcgtgaacagccccatcgagaagagctctgtgaactatgagcccagcaaccccagcgagaagggcagcaagaagatcaacctgagcagtgaccagaacaagtctgtgtctgagagcaacaatgatgatgtgatgctgatctctgtggagagccccaacctgaccacccccatcaccagcaaccccacagacaccaggaagatcaccagcggcaacagcagcaacagccccaatgctgaggtgatggctgtgcagaagaagctggacagcatcatcgacctgaccaaggagggcctgagcaactgcaacacagagagccctgtgagccccctggagagccacagcaaggccgccagcaacagcaaggagaccacccccctggcccagaatgctgtgcaggtgcctgagagctttgagcacctgccccccctgcctgagcccccagcccccctgcctgagctggtggacaagacccgggacaccctgcccccccagaagccagagctgaaggtgaagagggtcttccggcccaacggcatcgccctgacctggaacatcaccaagatcaaccccaagtgtgcccctgtggagagctaccacctgttcctgtgccacgagaacagcaacaacaagctgatctggaagaagattggagagatcaaggccctgcccctgcccatggcctgcaccctgagccagttcctggccagcaaccgctactacttcaccgtgcagagcaaggacatcttcggccgctatggccccttctgtgacatcaagagcatccctggcttcagcgagaacctgacctag

SEQ ID NO: 142402 - DNA, 1632 bp, synthetic construct; identical to SEQ ID NO: 142400
  misc_feature 1..1632: note = Description of Artificial Sequence: Synthetic coding sequence
  source 1..1632: mol_type = other DNA

SEQ ID NO: 142403 - DNA, 2049 bp, synthetic construct; identical to SEQ ID NO: 142401
  misc_feature 1..2049: note = Description of Artificial Sequence: Synthetic coding sequence
  source 1..2049: mol_type = other DNA

SEQ ID NO: 142404 - DNA, 1278 bp, synthetic construct
  misc_feature 1..1278: note = Description of Artificial Sequence: Synthetic coding sequence
  source 1..1278: mol_type = other DNA
atggccagcccagacaggagcaagaggaagatcctgaaggccaagaagaccatgcccctgagctgcaggaagcaggtggagatgctgaacaagagcagaaatgtggaggccctgaagacagccatcggcagcaatgtgcccagcggcaaccagagcttcagccccagcgtcatcaccaggaccacagagatcaccaagtgcagccccagtgaaaatggagccagcagcctggacagcaacaagaacagcatcagcgagaagagcaaggtgttcagccagaactgcatcaagcctgtggaggagatcgtgcacagcgagaccaagctggagcaggtggtgtgcagctaccagaagcccagcaggaccacagagagccccagcagggtcttcacagaggaggccaaggacagcctgaacaccagtgaaaatgattctgagcaccagaccaacgtgaccaggagcctgtttgagcacgagggcgcctgcagcctgaagagcagctgctgcccccccagcgtgctgtctggagtggtgcagatgcctgagagcacagtgaccagcacagtgggggacaagaagacagaccagatggtgttccacctggagaccaacagcaacagcgagagccatgacaagaggcagagcgacaacatcctgtgcagcgaggacagcggctttgtgcctgtggagaagacccccaacctggtgaacagcgtgaccagcaacaactgtgctgatgacatcctgaagacagatgaatgttccaggaccagcatcagcaactgtgagagcgctgacagcacctggcagagcagcctggacaccaacaacaacagccactaccagaagaagaggatgttttctgaaaatgaggagaatgtgaagaggatgaagaccagcgagcagatcaatgaaaacatctgtgtgtccctggagcggcagacagccttcctggagcaggtgcgccacctgatccagcaggagatctacagcatcaactatgagctgtttgacaagaagctgaaggagctgaaccagagaattggcaagacagagtgcaggaacaagcatgagggcattgctgacaagctgctggccaagatcgccaagctgcagaggcgcatcaagacagtgctgctcttccagaggaactgcctgaagcccaacatgctgagcagcaatggagccagcaagatccctgagaagctgcaccaggagatcctggccatcctgcccatgctgaagctgtggctgtacagaagaaacctgatcctgtag

SEQ ID NO: 142405 - DNA, 681 bp, synthetic construct
  misc_feature 1..681: note = Description of Artificial Sequence: Synthetic coding sequence
  source 1..681: mol_type = other DNA
atgctgatctctgtggagagccccaacctgaccacccccatcaccagcaaccccacagacaccaggaagatcaccagcggcaacagcagcaacagccccaatgctgaggtgatggctgtgcagaagaagctggacagcatcatcgacctgaccaaggagggcctgagcaactgcaacacagagagccctgtgagccccctggagagccacagcaaggccgccagcaacagcaaggagaccacccccctggcccagaatgctgtgcaggtgcctgagagctttgagcacctgccccccctgcctgagcccccagcccccctgcctgagctggtggacaagacccgggacaccctgcccccccagaagccagagctgaaggtgaagagggtcttccggcccaacggcatcgccctgacctggaacatcaccaagatcaaccccaagtgtgcccctgtggagagctaccacctgttcctgtgccacgagaacagcaacaacaagctgatctggaagaagattggagagatcaaggccctgcccctgcccatggcctgcaccctgagccagttcctggccagcaaccgctactacttcaccgtgcagagcaaggacatcttcggccgctatggccccttctgtgacatcaagagcatccctggcttcagcgagaacctgacctag

SEQ ID NO: 142406 - DNA, 714 bp, synthetic construct
  misc_feature 1..714: note = Description of Artificial Sequence: Synthetic coding sequence
  source 1..714: mol_type = other DNA
atgaccagcgagatcacctacgccgaggtgcgcttcaagaatgagttcaagagcagcggcatcaacacagccagcagcgctgccagcaaggagaggacagccccccacaagagcaacacaggcttccccaagctgctgtgtgccagcctgctgatcttcttcctgctgctggccatctccttcttcatcgcctttgtgatcttcttccagaagtacagccagctgctggagaagaagaccaccaaggagctggtgcacaccaccctggagtgtgtgaagaagaacatgcctgtggaggagacagcctggagctgctgccccaagaactggaagagcttcagcagcaactgctacttcatcagcacagagagcgcctcctggcaggacagcgagaaggactgtgccaggatggaggcccacctgctggtgatcaacacccaggaggagcaggacttcatcttccagaacctgcaggaggagagcgcctactttgtgggcctgagtgaccctgagggccagaggcactggcagtgggtggaccagaccccctacaatgaaagcagcaccttctggcacccccgggagcccagcgaccccaatgaaagatgtgtggtgctgaacttcaggaagagccccaagcgctggggctggaatgatgtgaactgcctgggcccccagaggtctgtgtgtgagatgatgaagatccacctgtag

SEQ ID NO: 142407 - DNA, 2469 bp, synthetic construct
  misc_feature 1..2469: note = Description of Artificial Sequence: Synthetic coding sequence
  source 1..2469: mol_type = other DNA
atggaggaggaggaggaggccatcggcctgctggacaaggtgctggaggatgaagatgtgttcctgctggaggagtgtgagctgggcacccccaccagccctggcagcggcagccccttcctggtggccgtgaaggtggaggccggcaagggcctggagatgaggaagctggtgctgagcggcttcctggccagcgaggagatctacatcaaccagctggaggccctgctgctgcccatgaagcccctgaaggccacagccaccaccagccagcctgtgctgaccatccagcagatcgagaccatcttctacaagatccaggacatctatgagatccacaaggagttctatgacaacctgtgccccaaggtgcagcagtgggacagccaggtgaccatgggccacctgttccagaagctggccagccagctgggcgtgtacaaggcctttgtggacaactacaaggtggccctggagacagctgagaagtgcagccagagcaacaaccagttccagaagatcagcgaggagctgaaggtgaagggccccaaggacagcaaggacagccacacctctgtgaccatggaggccctgctgtacaagcccatcgacagagtgaccaggagcaccctggtgctgcatgacctgctgaagcacacccctgtggaccacccagactaccccctgctgcaggatgccctgcgcatcagccagaacttcctgagcagcatcaatgaagacatcgaccccaggagaacagctgtgaccacccccaagggggagacccggcagctggtgaaggatggcttcctggtggaggtgtctgagagcagcaggaagctgcggcacgtgttcctgttcacagatgtgctgctgtgtgccaagctgaagaagaccagcgctgggaagcaccagcagtatgactgcaagtggtacatccccctggccgacctggtgttccccagccctgaggagagcgaggccagcccccaggtgcaccccttcccagaccacgagctggaggacatgaagatgaagatcagcgccctgaagtctgagatccagaaggagaaggccaacaagggccagagccgggccatcgagcggctgaagaagaagatgtttgaaaatgagttcctgctgctgctgaacagccccaccatccccttccgcatccacaacagaaatggcaagagctacctgttcctgctgagcagtgactatgaaagaagtgagtggagggaggccatccagaagctgcagaagaaggacctgcaggcctttgtgctgagctctgtggagctgcaggtgctgaccggcagctgcttcaagctgaggacagtgcacaacatccctgtgaccagcaacaaggatgatgatgagagccctggcctgtatggcttcctgcacgtgattgtgcacagcgccaagggcttcaagcagagcgccaacctgtactgcaccctggaggtggacagctttggctactttgtgtccaaggccaagaccagggtcttccgggacacagctgagcccaagtgggatgaggagtttgaaattgagctggagggcagccagagcctgcgcatcctgtgctatgaaaaatgttatgacaagaccaaggtgaacaaggacaacaatgaaattgtggacaagatcatgggcaagggccagatccagctggacccccagacagtggagaccaagaactggcacacagatgtgattgagatgaatggcatcaaggtggagttctccatgaagttcaccagccgggacatgagcctgaagaggacccccagcaagaagcagacaggagtgtttggagtgaagatctctgtggtgaccaagcgggagaggagcaaggtgccctacatcgtgcggcagtgtgtggaggaggtggagaagaggggcatcgaggaggtgggcatctaccgcatcagcggcgtggccacagacatccaggccctgaaggctgtgtttgatgccaacaacaaggacatcctgctgatgctgagtgacatggacatcaatgccatcgccggcaccctgaagctgtacttccgggagctgcctgagcccctgctgacagaccggctgtacccagccttcatggagggcatcgccctgagtgaccctgctgccaaggagaactgcatgatgcacctgctgcggagcctgcctgaccccaacctgatcaccttcctgttcctgctggagcacctgaagagggtggccgagaaggagcccatcaacaagatgagcctgcacaacctggccaccgtgtttggccccaccctgctgcggcccagcgaggtggagagcaaggcccacctgaccagcgctgctgacatctggagccatgatgtgatggcccaggtgcaggtgctgctgtactacctgcagcacccccccatcagctttgctgagctgaagaggaacaccctgtacttcagcacagatgtgtag

SEQ ID NO: 142408 - DNA, 2580 bp, synthetic construct
  misc_feature 1..2580: note = Description of Artificial Sequence: Synthetic coding sequence
  source 1..2580: mol_type = other DNA
atggagcccctgagccaccggggcctgccccggctgtcctggattgacaccctgtacagcaacttctcctatggaacagatgaatatgatggagagggcaatgaggagcagaagggccccccagagggcagcgagaccatgccctacattgatgagagccccaccatgagcccccagctgagcgcccggagccagggcggcggagatggagtgagccccaccccacctgagggcctggcccctggggtggaggccggcaagggcctggagatgaggaagctggtgctgagcggcttcctggccagcgaggagatctacatcaaccagctggaggccctgctgctgcccatgaagcccctgaaggccacagccaccaccagccagcctgtgctgaccatccagcagatcgagaccatcttctacaagatccaggacatctatgagatccacaaggagttctatgacaacctgtgccccaaggtgcagcagtgggacagccaggtgaccatgggccacctgttccagaagctggccagccagctgggcgtgtacaaggcctttgtggacaactacaaggtggccctggagacagctgagaagtgcagccagagcaacaaccagttccagaagatcagcgaggagctgaaggtgaagggccccaaggacagcaaggacagccacacctctgtgaccatggaggccctgctgtacaagcccatcgacagagtgaccaggagcaccctggtgctgcatgacctgctgaagcacacccctgtggaccacccagactaccccctgctgcaggatgccctgcgcatcagccagaacttcctgagcagcatcaatgaagatattgaccccaggagaacagctgtgaccacccccaagggggagacccggcagctggtgaaggatggcttcctggtggaggtgtctgagagcagcaggaagctgcggcacgtgttcctgttcacagatgtgctgctgtgtgccaagctgaagaagaccagcgctgggaagcaccagcagtatgactgcaagtggtacatccccctggccgacctggtgttccccagccctgaggagagcgaggccagcccccaggtgcaccccttcccagaccacgagctggaggacatgaagatgaagatcagcgccctgaagtctgagatccagaaggagaaggccaacaagggccagagccgggccatcgagcggctgaagaagaagatgtttgaaaatgagttcctgctgctgctgaacagccccaccatccccttccgcatccacaacagaaatggcaagagctacctgttcctgctgagcagtgactatgaaagaagtgagtggagggaggccatccagaagctgcagaagaaggacctgcaggcctttgtgctgagctctgtggagctgcaggtgctgaccggcagctgcttcaagctgaggacagtgcacaacatccctgtgaccagcaacaaggatgatgatgagagccctggcctgtatggcttcctgcacgtgattgtgcacagcgccaagggcttcaagcagagcgccaacctgtactgcaccctggaggtggacagctttggctactttgtgtccaaggccaagaccagggtcttccgggacacagctgagcccaagtgggatgaggagtttgaaattgagctggagggcagccagagcctgcgcatcctgtgctatgagaagtgctatgacaagaccaaggtgaacaaggacaacaatgagatcgtggacaagatcatgggcaagggccagatccagctggacccccagacagtggagaccaagaactggcacacagatgtgattgagatgaatggcatcaaggtggagttctccatgaagttcaccagccgggacatgagcctgaagaggacccccagcaagaagcagacaggagtgtttggagtgaagatctctgtggtgaccaagcgggagaggagcaaggtgccctacatcgtgcggcagtgtgtggaggaggtggagaagaggggcatcgaggaggtgggcatctaccgcatctctggagtggccacagacatccaggccctgaaggctgtgtttgatgccaacaacaaggacatcctgctgatgctgagtgacatggacatcaatgccatcgccggcaccctgaagctgtacttccgggagctgcctgagcccctgctgacagaccggctgtacccagccttcatggagggcatcgccctgagtgaccctgctgccaaggagaactgcatgatgcacctgctgcggagcctgcctgaccccaacctgatcaccttcctgttcctgctggagcacctgaagagggtggccgagaaggagcccatcaacaagatgagcctgcacaacctggccaccgtgtttggccccaccctgctgcggcccagcgaggtggagagcaaggcccacctgaccagcgctgctgacatctggagccatgatgtgatggcccaggtgcaggtgctgctgtactacctgcagcacccccccatcagctttgctgagctgaagaggaacaccctgtacttcagcacagatgtgtag

SEQ ID NO: 142409 - DNA, 1092 bp, synthetic construct
  misc_feature 1..1092: note = Description of Artificial Sequence: Synthetic coding sequence
  source 1..1092: mol_type = other DNA
atgaagcccctgaaggccacagccaccaccagccagcctgtgctgaccatccagcagatcgagaccatcttctacaagatccaggacatctatgagatccacaaggagttctatgacaacctgtgccccaaggtgcagcagtgggacagccaggtgaccatgggccacctgttccagaagctggccagccagctgggcgtgtacaaggcctttgtggacaactacaaggtggccctggagacagctgagaagtgcagccagagcaacaaccagttccagaagatcagcgaggagctgaaggtgaagggccccaaggacagcaaggacagccacacctctgtgaccatggaggccctgctgtacaagcccatcgacagagtgaccaggagcaccctggtgctgcatgacctgctgaagcacacccctgtggaccacccagactaccccctgctgcaggatgccctgcgcatcagccagaacttcctgagcagcatcaatgaagatattgaccccaggagaacagctgtgaccacccccaagggggagacccggcagctggtgaaggatggcttcctggtggaggtgtctgagagcagcaggaagctgcggcacgtgttcctgttcacagatgtgctgctgtgtgccaagctgaagaagaccagcgctgggaagcaccagcagtatgactgcaagtggtacatccccctggccgacctggtgttccccagccctgaggagagcgaggccagcccccaggtgcaccccttcccagaccacgagctggaggacatgaagatgaagatcagcgccctgaagtctgagatccagaaggaggaggtggagaagaggggcatcgaggaggtgggcatctaccgcatcagcggcgtggccacagacatccaggccctgaaggctgtgtttgatgccaacaacaaggacatcctgctgatgctgagtgacatggacatcaatgccatcgccggcaccctgaagctgtacttccgggagctgcctgagcccctgctgacagaccggctgagcccctgccccacccccaccagcagccccagcagcagctgctggaacacctag

SEQ ID NO: 142410 - DNA, 1926 bp, synthetic construct
  misc_feature 1..1926: note = Description of Artificial Sequence: Synthetic coding sequence
  source 1..1926: mol_type = other DNA
atggagatcctgctgatcatccgcttctgctgcaactgcacctacgccctgctgtacaagcccatcgacagagtgaccaggagcaccctggtgctgcatgacctgctgaagcacacccctgtggaccacccagactaccccctgctgcaggatgccctgcgcatcagccagaacttcctgagcagcatcaatgaagatattgaccccaggagaacagctgtgaccacccccaagggggagacccggcagctggtgaaggatggcttcctggtggaggtgtctgagagcagcaggaagctgcggcacgtgttcctgttcacagatgtgctgctgtgtgccaagctgaagaagaccagcgctgggaagcaccagcagtatgactgcaagtggtacatccccctggccgacctggtgttccccagccctgaggagagcgaggccagcccccaggtgcaccccttcccagaccacgagctggaggacatgaagatgaagatcagcgccctgaagtctgagatccagaaggagaaggccaacaagggccagagccgggccatcgagcggctgaagaagaagatgtttgaaaatgagttcctgctgctgctgaacagccccaccatccccttccgcatccacaacagaaatggcaagagctacctgttcctgctgagcagtgactatgaaagaagtgagtggagggaggccatccagaagctgcagaagaaggacctgcaggcctttgtgctgagctctgtggagctgcaggtgctgaccggcagctgcttcaagctgaggacagtgcacaacatccctgtgaccagcaacaaggatgatgatgagagccctggcctgtatggcttcctgcacgtgattgtgcacagcgccaagggcttcaagcagagcgccaacctgtactgcaccctggaggtggacagctttggctactttgtgtccaaggccaagaccagggtcttccgggacacagctgagcccaagtgggatgaggagtttgaaattgagctggagggcagccagagcctgcgcatcctgtgctatgagaagtgctatgacaagaccaaggtgaacaaggacaacaatgagatcgtggacaagatcatgggcaagggccagatccagctggacccccagacagtggagaccaagaactggcacacagatgtgattgagatgaatggcatcaaggtggagttctccatgaagttcaccagccgggacatgagcctgaagaggacccccagcaagaagcagacaggagtgtttggagtgaagatctctgtggtgaccaagcgggagaggagcaaggtgccctacatcgtgcggcagtgtgtggaggaggtggagaagaggggcatcgaggaggtgggcatctaccgcatctctggagtggccacagacatccaggccctgaaggctgtgtttgatgccaacaacaaggacatcctgctgatgctgagtgacatggacatcaatgccatcgccggcaccctgaagctgtacttccgggagctgcctgagcccctgctgacagaccggctgtacccagccttcatggagggcatcgccctgagtgaccctgctgccaaggagaactgcatgatgcacctgctgcggagcctgcctgaccccaacctgatcaccttcctgttcctgctggagcacctgaagagggtggccgagaaggagcccatcaacaagatgagcctgcacaacctggccaccgtgtttggccccaccctgctgcggcccagcgaggtggagagcaaggcccacctgaccagcgctgctgacatctggagccatgatgtgatggcccaggtgcaggtgctgctgtactacctgcagcacccccccatcagctttgctgagctgaagaggaacaccctgtacttcagcacagatgtgtag

SEQ ID NO: 142411 - DNA, 933 bp, synthetic construct
  misc_feature 1..933: note = Description of Artificial Sequence: Synthetic coding sequence
  source 1..933: mol_type = other DNA
atgacagatgtgctgccccagcctgactgcagccccaaggccggccgggagcccctggccctggaggagagcggcagcaagaggcctcccaacacaggagcccggctgtggggccgggtgaggaacaagctgctgaggaacaagctggacccccagacagtggagaccaagaactggcacacagatgtgattgagatgaatggcatcaaggtggagttctccatgaagttcaccagccgggacatgagcctgaagaggacccccagcaagaagcagacaggagtgtttggagtgaagatctctgtggtgaccaagcgggagaggagcaaggtgccctacatcgtgcggcagtgtgtggaggaggtggagaagaggggcatcgaggaggtgggcatctaccgcatcagcggcgtggccacagacatccaggccctgaaggctgtgtttgatgccaacaacaaggacatcctgctgatgctgagtgacatggacatcaatgccatcgccggcaccctgaagctgtacttccgggagctgcctgagcccctgctgacagaccggctgtacccagccttcatggagggcatcgccctgagtgaccctgctgccaaggagaactgcatgatgcacctgctgcggagcctgcctgaccccaacctgatcaccttcctgttcctgctggagcacctgaagagggtggccgagaaggagcccatcaacaagatgagcctgcacaacctggccaccgtgtttggccccaccctgctgcggcccagcgaggtggagagcaaggcccacctgaccagcgctgctgacatctggagccatgatgtgatggcccaggtgcaggtgctgctgtactacctgcagcacccccccatcagctttgctgagctgaagaggaacaccctgtacttcagcacagatgtgtag

SEQ ID NO: 142412 - DNA, 2442 bp, synthetic construct
  misc_feature 1..2442: note = Description of Artificial Sequence: Synthetic coding sequence
  source 1..2442: mol_type = other DNA
atgccctacattgatgagagccccaccatgagcccccagctgagcgcccggagccagggcggcggagatggagtgagccccaccccacctgagggcctggcccctggggtggaggccggcaagggcctggagatgaggaagctggtgctgagcggcttcctggccagcgaggagatctacatcaaccagctggaggccctgctgctgcccatgaagcccctgaaggccacagccaccaccagccagcctgtgctgaccatccagcagatcgagaccatcttctacaagatccaggacatctatgagatccacaaggagttctatgacaacctgtgccccaaggtgcagcagtgggacagccaggtgaccatgggccacctgttccagaagctggccagccagctgggcgtgtacaaggcctttgtggacaactacaaggtggccctggagacagctgagaagtgcagccagagcaacaaccagttccagaagatcagcgaggagctgaaggtgaagggccccaaggacagcaaggacagccacacctctgtgaccatggaggccctgctgtacaagcccatcgacagagtgaccaggagcaccctggtgctgcatgacctgctgaagcacacccctgtggaccacccagactaccccctgctgcaggatgccctgcgcatcagccagaacttcctgagcagcatcaatgaagatattgaccccaggagaacagctgtgaccacccccaagggggagacccggcagctggtgaaggatggcttcctggtggaggtgtctgagagcagcaggaagctgcggcacgtgttcctgttcacagatgtgctgctgtgtgccaagctgaagaagaccagcgctgggaagcaccagcagtatgactgcaagtggtacatccccctggccgacctggtgttccccagccctgaggagagcgaggccagcccccaggtgcaccccttcccagaccacgagctggaggacatgaagatgaagatcagcgccctgaagtctgagatccagaaggagaaggccaacaagggccagagccgggccatcgagcggctgaagaagaagatgtttgaaaatgagttcctgctgctgctgaacagccccaccatccccttccgcatccacaacagaaatggcaagagctacctgttcctgctgagcagtgactatgaaagaagtgagtggagggaggccatccagaagctgcagaagaaggacctgcaggcctttgtgctgagctctgtggagctgcaggtgctgaccggcagctgcttcaagctgaggacagtgcacaacatccctgtgaccagcaacaaggatgatgatgagagccctggcctgtatggcttcctgcacgtgattgtgcacagcgccaagggcttcaagcagagcgccaacctgtactgcaccctggaggtggacagctttggctactttgtgtccaaggccaagaccagggtcttccgggacacagctgagcccaagtgggatgaggagtttgaaattgagctggagggcagccagagcctgcgcatcctgtgctatgagaagtgctatgacaagaccaaggtgaacaaggacaacaatgagatcgtggacaagatcatgggcaagggccagatccagctggacccccagacagtggagaccaagaactggcacacagatgtgattgagatgaatggcatcaaggtggagttctccatgaagttcaccagccgggacatgagcctgaagaggacccccagcaagaagcagacaggagtgtttggagtgaagatctctgtggtgaccaagcgggagaggagcaaggtgccctacatcgtgcggcagtgtgtggaggaggtggagaagaggggcatcgaggaggtgggcatctaccgcatctctggagtggccacagacatccaggccctgaaggctgtgtttgatgccaacaacaaggacatcctgctgatgctgagtgacatggacatcaatgccatcgccggcaccctgaagctgtacttccgggagctgcctgagcccctgctgacagaccggctgtacccagccttcatggagggcatcgccctgagtgaccctgctgccaaggagaactgcatgatgcacctgctgcggagcctgcctgaccccaacctgatcaccttcctgttcctgctggagcacctgaagagggtggccgagaaggagcccatcaacaagatgagcctgcacaacctggccaccgtgtttggccccaccctgctgcggcccagcgaggtggagagcaaggcccacctgaccagcgctgctgacatctggagccatgatgtgatggcccaggtgcaggtgctgctgtactacctgcagcacccccccatcagctttgctgagctgaagaggaacaccctgtacttcagcacagatgtgtag

SEQ ID NO: 142413 - DNA, 1332 bp, synthetic construct
  misc_feature 1..1332: note = Description of Artificial Sequence: Synthetic coding sequence
  source 1..1332: mol_type = other DNA
atgctgaccaacgggaaggagcaggtgatcaagagctgtgtgtccctgcctgagctgaatgcccaggtgttctgccacagcagcaacaacgtgaccaagacagagtgctgcttcacagacttctgcaacaacatcaccctgcacctgcccacagccagccccaatgcccccaagctgggccccatggagctggccatcatcatcaccgtgcctgtgtgcctgctgagcattgctgccatgctgactgtgtgggcctgccagggccggcagtgcagctacaggaagaagaagaggcccaacgtggaggagcccctgtctgagtgcaacctggtgaatgccggcaagaccctgaaggacctgatctatgatgtgacagccagcggcagcggcagcggcctgcccctgctggtgcagaggaccatcgcccggaccatcgtgctgcaggagatcgtgggcaagggccgctttggagaggtgtggcacggccgctggtgtggagaagatgtggccgtgaagatcttcagcagcagagatgagaggtcctggttccgggaggccgagatctaccagacagtgatgctgcggcatgagaacatcctgggcttcatcgctgctgacaacaaggacaatggcacctggacccagctgtggctggtgtctgagtaccacgagcagggcagcctgtatgactacctgaacagaaacatcgtgacagtggccggcatgatcaagctggccctgagcatcgccagcggcctggcccacctgcacatggagatcgtgggcacccagggcaagccagccatcgcccaccgggacatcaagagcaagaacatcctggtgaagaagtgtgagacctgtgccatcgctgacctgggcctggccgtgaagcatgacagcatcctgaacaccatcgacatcccccagaaccccaaggtgggcaccaagcgctacatggcccctgagatgctggatgacaccatgaatgtgaacatctttgagagcttcaagagagctgacatctacagcgtgggcctggtgtactgggagatcgcccggcgctgcagcgtgggcggcatcgtggaggagtaccagctgccctactatgacatggtgcccagcgaccccagcattgaggagatgaggaaggtggtgtgtgaccagaagttccggcccagcatccccaaccagtggcagagctgtgaggccctgcgggtgatgggccgcatcatgagggagtgctggtacgccaacggggccgcccggctgacagccctgcgcatcaagaagaccatcagccagctgtgtgtgaaggaggactgcaaggcctag

SEQ ID NO: 142414 - DNA, 1512 bp, synthetic construct
  misc_feature 1..1512: note = Description of Artificial Sequence: Synthetic coding sequence
  source 1..1512: mol_type = other DNA
atgaccctgggcagccccaggaagggcctgctgatgctgctgatggccctggtgacccagggcgaccctgtgaagcccagccggggccccctggtgacctgcacctgtgagagcccccactgcaagggccccacctgccgcggggcctggtgcaccgtggtgctggtgcgggaggagggccgccacccccaggagcaccggggctgcggcaacctgcaccgggagctgtgccggggccggcccacagaatttgtgaaccactactgctgtgacagccacctgtgcaaccacaacgtgtccctggtgctggaggccacccagccccccagcgagcagcctggaacagatggccagctggccctgatcctgggccctgtgctggccctgctggccctggtggccctgggcgtgctgggcctgtggcacgtgagaagacggcaggagaagcagaggggcctgcacagcgagctgggggagagcagcctcatcctgaaggccagcgagcagggcgacagcatgctgggggacctgctggacagcgactgcaccaccggcagcggcagcggcctgcccttcctggtgcagaggacagtggcccggcaggtggccctggtggagtgtgtgggcaagggccgctatggagaggtgtggaggggcctgtggcacggggagagcgtggccgtgaagatcttcagcagcagagatgagcagagctggttccgggagacagagatctacaacacagtgctgctgcggcatgacaacatcctgggcttcatcgccagtgacatgaccagcaggaacagcagcacccagctgtggctgatcacccactaccacgagcacggcagcctgtatgacttcctgcagaggcagaccctggagccccacctggccctgcggctggccgtgtctgctgcctgtggcctggcccacctgcacgtggagatcttcggcacccagggcaagccagccatcgcccaccgggacttcaagagcagaaatgtgctggtgaagagcaacctgcagtgctgcatcgctgacctgggcctggccgtgatgcacagccagggcagtgactacctggacatcggcaacaacccccgggtgggcaccaagcgctacatggcccctgaggtgctggatgagcagatcagaacagactgctttgagagctacaagtggacagacatctgggccttcggcctggtgctgtgggagatcgcccggaggaccatcgtgaatggaattgtggaggactacagaccacccttctatgatgtggtgcccaatgaccccagctttgaggacatgaagaaggtggtgtgtgtggaccagcagacccccaccatccccaaccggctggccgctgaccctgtgctgagcggcctggcccagatgatgagggagtgctggtaccccaaccccagcgcccggctgacagccctgcgcatcaagaagaccctgcagaagatcagcaacagccctgagaagcccaaggtgatccagtag

SEQ ID NO: 142415 - DNA, 1512 bp, synthetic construct; identical to SEQ ID NO: 142414
  misc_feature 1..1512: note = Description of Artificial Sequence: Synthetic coding sequence
  source 1..1512: mol_type = other DNA

SEQ ID NO: 142416 - DNA, 990 bp, synthetic construct
  misc_feature 1..990: note = Description of Artificial Sequence: Synthetic coding sequence
  source 1..990: mol_type = other DNA
atggccctgaccccacccctgctgctgctgtctgctggcaccatgaccctgggcagccccaggaagggcctgctgatgctgctgatggccctggtgacccagggcaagggccgctatggagaggtgtggaggggcctgtggcacggggagagcgtggccgtgaagatcttcagcagcagagatgagcagagctggttccgggagacagagatctacaacacagtgctgctgcggcatgacaacatcctgggcttcatcgccagtgacatgaccagcaggaacagcagcacccagctgtggctgatcacccactaccacgagcacggcagcctgtatgacttcctgcagaggcagaccctggagccccacctggccctgcggctggccgtgtctgctgcctgtggcctggcccacctgcacgtggagatcttcggcacccagggcaagccagccatcgcccaccgggacttcaagagcagaaatgtgctggtgaagagcaacctgcagtgctgcatcgctgacctgggcctggccgtgatgcacagccagggcagtgactacctggacatcggcaacaacccccgggtgggcaccaagcgctacatggcccctgaggtgctggatgagcagatcagaacagactgctttgagagctacaagtggacagacatctgggccttcggcctggtgctgtgggagatcgcccggaggaccatcgtgaatggaattgtggaggactacagaccacccttctatgatgtggtgcccaatgaccccagctttgaggacatgaagaaggtggtgtgtgtggaccagcagacccccaccatccccaaccggctggccgctgaccctgtgctgagcggcctggcccagatgatgagggagtgctggtaccccaaccccagcgcccggctgacagccctgcgcatcaagaagaccctgcagaagatcagcaacagccctgagaagcccaaggtgatccagtag

SEQ ID NO: 142417 - DNA, 480 bp, synthetic construct
  misc_feature 1..480: note = Description of Artificial Sequence: Synthetic coding sequence
  source 1..480: mol_type = other DNA
atggccctgaccccacccctgctgctgctgtctgctggcaccatgaccctgggcagccccaggaagggcctgctgatgctgctgatggccctggtgacccagggcgaccctgtgaagcccagccggggccccctggtgacctgcacctgtgagagcccccactgcaagggccccacctgccgcggggcctggtgcaccgtggtgctggtgcgggaggagggccgccacccccaggagcaccggggctgcggcaacctgcaccgggagctgtgccggggccggcccacagaatttgtgaaccactactgctgtgacagccacctgtgcaaccacaacgtgtccctggtgctggagggcaagggccgctatggagaggtgtggaggggcctgtggcacggggagagcgtggccgtgaagatcttcagcagcagagatgagcagagctggttccgggagacagagatctacaacacagtgtag

SEQ ID NO: 142418 - DNA, 1554 bp, synthetic construct
  misc_feature 1..1554: note = Description of Artificial Sequence: Synthetic coding sequence
  source 1..1554: mol_type = other DNA
atggccctgaccccacccctgctgctgctgtctgctggcaccatgaccctgggcagccccaggaagggcctgctgatgctgctgatggccctggtgacccagggcgaccctgtgaagcccagccggggccccctggtgacctgcacctgtgagagcccccactgcaagggccccacctgccgcggggcctggtgcaccgtggtgctggtgcgggaggagggccgccacccccaggagcaccggggctgcggcaacctgcaccgggagctgtgccggggccggcccacagaatttgtgaaccactactgctgtgacagccacctgtgcaaccacaacgtgtccctggtgctggaggccacccagccccccagcgagcagcctggaacagatggccagctggccctgatcctgggccctgtgctggccctgctggccctggtggccctgggcgtgctgggcctgtggcacgtgagaagacggcaggagaagcagaggggcctgcacagcgagctgggggagagcagcctcatcctgaaggccagcgagcagggcgacagcatgctgggggacctgctggacagcgactgcaccaccggcagcggcagcggcctgcccttcctggtgcagaggacagtggcccggcaggtggccctggtggagtgtgtgggcaagggccgctatggagaggtgtggaggggcctgtggcacggggagagcgtggccgtgaagatcttcagcagcagagatgagcagagctggttccgggagacagagatctacaacacagtgctgctgcggcatgacaacatcctgggcttcatcgccagtgacatgaccagcaggaacagcagcacccagctgtggctgatcacccactaccacgagcacggcagcctgtatgacttcctgcagaggcagaccctggagccccacctggccctgcggctggccgtgtctgctgcctgtggcctggcccacctgcacgtggagatcttcggcacccagggcaagccagccatcgcccaccgggacttcaagagcagaaatgtgctggtgaagagcaacctgcagtgctgcatcgctgacctgggcctggccgtgatgcacagccagggcagtgactacctggacatcggcaacaacccccgggtgggcaccaagcgctacatggcccctgaggtgctggatgagcagatcagaacagactgctttgagagctacaagtggacagacatctgggccttcggcctggtgctgtgggagatcgcccggaggaccatcgtgaatggaattgtggaggactacagaccacccttctatgatgtggtgcccaatgaccccagctttgaggacatgaagaaggtggtgtgtgtggaccagcagacccccaccatccccaaccggctggccgctgaccctgtgctgagcggcctggcccagatgatgagggagtgctggtaccccaaccccagcgcccggctgacagccctgcgcatcaagaagaccctgcagaagatcagcaacagccctgagaagcccaaggtgatccagtag

SEQ ID NO: 142419 - DNA, 1530 bp, synthetic construct
  misc_feature 1..1530: note = Description of Artificial Sequence: Synthetic coding sequence
  source 1..1530: mol_type = other DNA
atggtggatggagtgatgatcctgcctgtgctgatcatgattgccctgcccagccccagcatggaggatgagaagcccaaggtgaaccccaagctgtacatgtgtgtgtgtgagggcctgagctgtggaaatgaagaccactgtgagggccagcagtgcttcagcagcctgagcatcaatgatggcttccacgtgtaccagaagggctgcttccaggtgtatgagcagggcaagatgacctgcaagaccccacccagccctggccaggccgtggagtgctgccagggcgactggtgcaacagaaacatcacagcccagctgcccaccaagggcaagagcttccctggcacccagaacttccacctggaggtgggcctcatcatcctgtctgtggtgtttgctgtgtgcctgctggcctgcctgctgggcgtggccctgaggaagttcaagagaagaaaccaggagcggctgaaccccagagatgtggagtatggcaccatcgagggcctcatcaccaccaacgtgggggacagcaccctggccgacctgctggaccacagctgcaccagcggcagcggcagcggcctgcccttcctggtgcagaggacagtggcccggcagatcaccctgctggagtgtgtgggcaagggccgctatggagaggtgtggaggggctcctggcagggagaaaatgtggccgtgaagatcttcagcagcagagatgagaagtcctggttccgggagacagagctgtacaacacagtgatgctgcggcatgagaacatcctgggcttcatcgccagtgacatgaccagccgccacagcagcacccagctgtggctgatcacccactaccacgagatgggcagcctgtatgactacctgcagctgaccaccctggacacagtgtcctgcctgcgcatcgtgctgagcatcgccagcggcctggcccacctgcacatcgagatcttcggcacccagggcaagccagccatcgcccaccgggacctgaagagcaagaacatcctggtgaagaagaatggccagtgctgcatcgctgacctgggcctggccgtgatgcacagccagagcaccaaccagctggatgtgggcaacaacccccgggtgggcaccaagcgctacatggcccctgaggtgctggatgagaccatccaggtggactgctttgacagctacaagagggtggacatctgggccttcggcctggtgctgtgggaggtggcccggaggatggtgtccaatggaattgtggaggactacaagccacccttctatgatgtggtgcccaatgaccccagctttgaggacatgaggaaggtggtgtgtgtggaccagcagaggcccaacatccccaaccgctggttcagtgaccccaccctgaccagcctggccaagctgatgaaggagtgctggtaccagaaccccagcgcccggctgacagccctgcgcatcaagaagaccctgaccaagattgacaacagcctggacaagctgaagacagactgctag

SEQ ID NO: 142420 - DNA, 1530 bp, synthetic construct; identical to SEQ ID NO: 142419
  misc_feature 1..1530: note = Description of Artificial Sequence: Synthetic coding sequence
  source 1..1530: mol_type = other DNA

SEQ ID NO: 142421 - DNA, 1530 bp, synthetic construct; identical to SEQ ID NO: 142419
  misc_feature 1..1530: note = Description of Artificial Sequence: Synthetic coding sequence
  source 1..1530: mol_type = other DNA

SEQ ID NO: 142422 - DNA, 264 bp, synthetic construct
  misc_feature 1..264: note = Description of Artificial Sequence: Synthetic coding sequence
  source 1..264: mol_type = other DNA
atggtggatggagtgatgatcctgcctgtgctgatcatgattgccctgcccagccccagcatggaggatgagaagcccaaggtgaaccccaagctgtacatgtgtgtgtgtgagggcctgagctgtggaaatgaagaccactgtgagggccagcagtgcttcagcagcctgagcatcaatgatggcttccacgtgtaccagaagggctgcttccaggtgtatgagcagggcaagatgacctgcaagaccccacccagcccctag

SEQ ID NO: 142423 - DNA, 66 bp, synthetic construct
  misc_feature 1..66: note = Description of Artificial Sequence: Synthetic coding sequence
  source 1..66: mol_type = other DNA
atggtggatggagtgatgatcctgcctgtgctgatcatgattgccctgcccagccccagcatgtag

SEQ ID NO: 142424 - DNA, 216 bp, synthetic construct
  misc_feature 1..216: note = Description of Artificial Sequence: Synthetic coding sequence
  source 1..216: mol_type = other DNA
atggtggatggagtgatgatcctgcctgtgctgatcatgattgccctgcccagccccagcatggaggatgagaagcccaaggtgaaccccaagctgtacatgtgtgtgtgtgagggcctgagctgtggaaatgaagaccactgtgagggccagcagtgcttcagcagcctgagcatcaatgatggcttccacgtgtaccagaagggctgcttctag

SEQ ID NO: 142425 - DNA, 1530 bp, synthetic construct; identical to SEQ ID NO: 142419
  misc_feature 1..1530: note = Description of Artificial Sequence: Synthetic coding sequence
  source 1..1530: mol_type = other DNA

SEQ ID NO: 142426 - DNA, 264 bp, synthetic construct; identical to SEQ ID NO: 142422
  misc_feature 1..264: note = Description of Artificial Sequence: Synthetic coding sequence
  source 1..264: mol_type = other DNA

SEQ ID NO: 142427 - DNA, 222 bp, synthetic construct
  misc_feature 1..222: note = Description of Artificial Sequence: Synthetic coding sequence
  source 1..222: mol_type = other DNA
atggtggatggagtgatgatcctgcctgtgctgatcatgattgccctgcccagccccagcatggaggatgagaagcccaaggtgaaccccaagctgtacatgtgtgtgtgtgagggcctgagctgtggaaatgaagaccactgtgagggccagcagtgcttcagcagcctgagcatcaatgatggcttccacgtgtaccagaagggctgcttccaggtgtag

SEQ ID NO: 142428 - DNA, 1518 bp, synthetic construct
  misc_feature 1..1518: note = Description of Artificial Sequence: Synthetic coding sequence
  source 1..1518: mol_type = other DNA
atggccgagagcgctggggccagcagcttcttccccctggtggtgctgctgctggccggcagcggcggcagcggcccccggggcgtgcaggccctgctgtgtgcctgcaccagctgcctgcaggccaactacacctgtgaaacagatggagcctgcatggtgtccatcttcaacctggatggcatggagcaccacgtgaggacctgcatccccaaggtggagctggtgcctgctgggaagcccttctactgcctgagcagcgaggacctgaggaacacccactgctgctacacagactactgcaacagaattgacctgcgggtgcccagcggccacctgaaggagcctgagcaccccagcatgtggggccctgtggagctggtgggcatcatcgccggccctgtgttcctgctcttcctgatcatcatcatcgtgttcctggtgatcaactaccaccagagggtgtaccacaaccggcagaggctggacatggaggaccccagctgtgagatgtgcctgagcaaggacaagaccctgcaggacctggtgtatgacctgagcaccagcggcagcggcagcggcctgcccctgtttgtgcagaggacagtggcccggaccatcgtgctgcaggagatcatcggcaagggccgctttggagaggtgtggaggggccgctggagaggaggagatgtggccgtgaagatcttcagcagccgggaggagaggtcctggttccgggaggccgagatctaccagacagtgatgctgcggcatgagaacatcctgggcttcatcgctgctgacaacaaggacaatggcacctggacccagctgtggctggtgtctgactaccatgaacatggcagcctgtttgactacctgaaccgctacacagtgaccatcgagggcatgatcaagctggccctgtctgctgccagcggcctggcccacctgcacatggagatcgtgggcacccagggcaagccaggcatcgcccaccgggacctgaagagcaagaacatcctggtgaagaagaatggcatgtgtgccatcgctgacctgggcctggccgtgagacatgatgctgtgacagacaccattgatattgcccccaaccagagggtgggcaccaagcgctacatggcccctgaggtgctggatgagaccatcaacatgaagcactttgacagcttcaagtgtgccgacatctatgccctgggcctggtgtactgggagatcgcccggcgctgcaacagcggaggagtgcatgaggagtaccagctgccctactatgacctggtgcccagcgaccccagcattgaggagatgaggaaggtggtgtgtgaccagaagctgcggcccaacatccccaactggtggcagagctatgaggccctgcgggtgatgggcaagatgatgagggagtgctggtacgccaacggggccgcccggctgacagccctgcgcatcaagaagaccctgagccagctgtctgtgcaggaggatgtgaagatctag

SEQ ID NO: 142429 - DNA, 1464 bp, synthetic construct
  misc_feature 1..1464: note = Description of Artificial Sequence: Synthetic coding sequence
  source 1..1464: mol_type = other DNA
atggccgagagcgctggggccagcagcttcttccccctggtggtgctgctgctggccggcagcggcggcagcggcccccggggcgtgcaggccctgctgtgtgcctgcaccagctgcctgcaggccaactacacctgtgaaacagatggagcctgcatggtgtccatcttcaacctggatggcatggagcaccacgtgaggacctgcatccccaaggtggagctggtgcctgctgggaagcccttctactgcctgagcagcgaggacctgaggaacacccactgctgctacacagactactgcaacagaattgacctgcgggtgcccagcggccacctgaaggagcctgagcaccccagcatgtggggccctgtggagctggtgggcatcatcgccggccctgtgttcctgctcttcctgatcatcatcatcgtgttcctggtgatcaactaccaccagagggtgtaccacaaccggcagaggctggacatggaggaccccagctgtgagatgtgcctgagcaaggacaagaccctgcaggacctggtgtatgacctgagcaccagcggcagcggcagcggcctgcccctgtttgtgcagaggacagtggcccggaccatcgtgctgcaggagatcatcggcaagggccgctttggagaggtgtggaggggccgctggagaggaggagatgtggccgtgaagatcttcagcagccgggaggagaggtcctggttccgggaggccgagatctaccagacagtgatgctgcggcatgagaacatcctgggcttcatcgctgctgacaacaaggacaatggcacctggacccagctgtggctggtgtctgactaccatgaacatggcagcctgtttgactacctgaaccgctacacagtgaccatcgagggcatgatcaagctggccctgtctgctgccagcggcctggcccacctgcacatggagatcgtgggcacccagggcaagccaggcatcgcccaccgggacctgaagagcaagaacatcctggtgaagaagaatggcatgtgtgccatcgctgacctgggcctggccgtgagacatgatgctgtgacagacaccattgatattgcccccaaccagagggtgggcaccaagcgctacatggcccctgaggtgctggatgagaccatcaacatgaagcactttgacagcttcaagtgtgccgacatctatgccctgggcctggtgtactgggagatcgcccggcgctgcaacagcggcggcaccttcctgttctgcctgtgcagctacctgcccttccaggatgctggcagccccaaggctgtgctgctgccccccttcttcctgcagcctgtgggctgcctgctgcctgagcctgagagcagcttcaaggtggccatcaagggcgtggaggtggccgtgctgcgggtgcggctcttcttccgggaccagtttgtggagtag

SEQ ID NO: 142430 - DNA, 1431 bp, synthetic construct
  misc_feature 1..1431: note = Description of Artificial Sequence: Synthetic coding sequence
  source 1..1431: mol_type = other DNA
atggccgagagcgctggggccagcagcttcttccccctggtggtgctgctgctggccggcagcggcggcagcggcccccggggcgtgcaggccctgctgtgtgcctgcaccagctgcctgcaggccaactacacctgtgaaacagatggagcctgcatggtgtccatcttcaacctggatggcatggagcaccacgtgaggacctgcatccccaaggtggagctggtgcctgctgggaagcccttctactgcctgagcagcgaggacctgaggaacacccactgctgctacacagactactgcaacagaattgacctgcgggtgcccagcggccacctgaaggagcctgagcaccccagcatgtggggccctgtggagctggtgggcatcatcgccggccctgtgttcctgctcttcctgatcatcatcatcgtgttcctggtgatcaactaccaccagagggtgtaccacaaccggcagaggctggacatggaggaccccagctgtgagatgtgcctgagcaaggacaagaccctgcaggacctggtgtatgacctgagcaccagcggcagcggcagcggcctgcccctgtttgtgcagaggacagtggcccggaccatcgtgctgcaggagatcatcggcaagggccgctttggagaggtgtggaggggccgctggagaggaggagatgtggccgtgaagatcttcagcagccgggaggagaggtcctggttccgggaggccgagatctaccagacagtgatgctgcggcatgagaacatcctgggcttcatcgctgctgacaacaaggacaatggcacctggacccagctgtggctggtgtctgactaccatgaacatggcagcctgtttgactacctgaaccgctacacagtgaccatcgagggcatgatcaagctggccctgtctgctgccagcggcctggcccacctgcacatggagatcgtgggcacccagggcaagccaggcatcgcccaccgggacctgaagagcaagaacatcctggtgaagaagaatggcatgtgtgccatcgctgacctgggcctggccgtgagacatgatgctgtgacagacaccattgatattgcccccaaccagagggtgggcaccaagcgctacatggcccctgaggtgctggatgagaccatcaacatgaagcactttgacagcttcaagtgtgccgacatctatgccctgggcctggtgtactgggagatcgcccggcgctgcaacagcggaggagtgcatgaggagtaccagctgccctactatgacctggtgcccagcgaccccagcattgaggagatgaggaaggtggtgtgtgaccagaagctgcggcccaacatccccaactggtggcagagctatgaggtgcgctcctggcccccagctgccttccccagcgcctag

SEQ ID NO: 142431 - DNA, 1641 bp, synthetic construct
  misc_feature 1..1641: note = Description of Artificial Sequence: Synthetic coding sequence
  source 1..1641: mol_type = other DNA
atggccgagagcgctggggccagcagcttcttccccctggtggtgctgctgctggccggcagcggcggcagcggcccccggggcgtgcaggccctgctgtgtgcctgcaccagctgcctgcaggccaactacacctgtgaaacagatggagcctgcatggtgtccatcttcaacctggatggcatggagcaccacgtgaggacctgcatccccaaggtggagctggtgcctgctgggaagcccttctactgcctgagcagcgaggacctgaggaacacccactgctgctacacagactactgcaacagaattgacctgcgggtgcccagcggccacctgaaggagcctgagcaccccagcatgtggggccctgtggagctggtgggcatcatcgccggccctgtgttcctgctcttcctgatcatcatcatcgtgttcctggtgatcaactaccaccagagggtgtaccacaaccggcagaggctggacatggaggaccccagctgtgagatgtgcctgagcaaggacaagaccctgcaggacctggtgtatgacctgagcaccagcggcagcggcagcggcctgcccctgtttgtgcagaggacagtggcccggaccatcgtgctgcaggagatcatcggcaagggccgctttggagaggtgtggaggggccgctggagaggaggagatgtggccgtgaagatcttcagcagccgggaggagaggtcctggttccgggaggccgagatctaccagacagtgatgctgcggcatgagaacatcctgggcttcatcgctgctgacaacaaggctgactgcagcttcctgaccctgccctgggaggtggtgatggtgtctgctgcccccaagctgcggagcctgcggctgcagtacaagggcggccggggccgggcccgcttcctgttccccctgaacaacggcacctggacccagctgtggctggtgtctgactaccacgagcacggcagcctgtttgactacctgaaccgctacacagtgaccatcgagggcatgatcaagctggccctgtctgctgccagcggcctggcccacctgcacatggagatcgtgggcacccagggcaagccaggcatcgcccaccgggacctgaagagcaagaacatcctggtgaagaagaatggcatgtgtgccatcgctgacctgggcctggccgtgagacatgatgctgtgacagacaccatcgacatcgcccccaaccagagggtgggcaccaagcgctacatggcccctgaggtgctggatgagaccatcaacatgaagcactttgacagcttcaagtgtgccgacatctatgccctgggcctggtgtactgggagatcgcccggcgctgcaacagcggcggcgtgcatgaggagtaccagctgccctactatgacctggtgcccagcgaccccagcattgaggagatgaggaaggtggtgtgtgaccagaagctgcggcccaacatccccaactggtggcagagctatgaggccctgcgggtgatgggcaagatgatgagggagtgctggtacgccaatggagctgcccggctgacagccctgcgcatcaagaagaccctgagccagctgtctgtgcaggaggatgtgaagatctag

SEQ ID NO: 142432 - DNA, 1362 bp, synthetic construct
  misc_feature 1..1362: note = Description of Artificial Sequence: Synthetic coding sequence
  source 1..1362: mol_type = other DNA
atggtgtccatcttcaacctggatggcatggagcaccacgtgaggacctgcatccccaaggtggagctggtgcctgctgggaagcccttctactgcctgagcagcgaggacctgaggaacacccactgctgctacacagactactgcaacagaattgacctgcgggtgcccagcggccacctgaaggagcctgagcaccccagcatgtggggccctgtggagctggtgggcatcatcgccggccctgtgttcctgctcttcctgatcatcatcatcgtgttcctggtgatcaactaccaccagagggtgtaccacaaccggcagaggctggacatggaggaccccagctgtgagatgtgcctgagcaaggacaagaccctgcaggacctggtgtatgacctgagcaccagcggcagcggcagcggcctgcccctgtttgtgcagaggacagtggcccggaccatcgtgctgcaggagatcatcggcaagggccgctttggagaggtgtggaggggccgctggagaggaggagatgtggccgtgaagatcttcagcagccgggaggagaggtcctggttccgggaggccgagatctaccagacagtgatgctgcggcatgagaacatcctgggcttcatcgctgctgacaacaaggacaatggcacctggacccagctgtggctggtgtctgactaccatgaacatggcagcctgtttgactacctgaaccgctacacagtgaccatcgagggcatgatcaagctggccctgtctgctgccagcggcctggcccacctgcacatggagatcgtgggcacccagggcaagccaggcatcgcccaccgggacctgaagagcaagaacatcctggtgaagaagaatggcatgtgtgccatcgctgacctgggcctggccgtgagacatgatgctgtgacagacaccattgatattgcccccaaccagagggtgggcaccaagcgctacatggcccctgaggtgctggatgagaccatcaacatgaagcactttgacagcttcaagtgtgccgacatctatgccctgggcctggtgtactgggagatcgcccggcgctgcaacagcggaggagtgcatgaggagtaccagctgccctactatgacctggtgcccagcgaccccagcattgaggagatgaggaaggtggtgtgtgaccagaagctgcggcccaacatccccaactggtggcagagctatgaggccctgcgggtgatgggcaagatgatgagggagtgctggtacgccaacggggccgcccggctgacagccctgcgcatcaagaagaccctgagccagctgtctgtgcaggaggatgtgaagatctag

SEQ ID NO: 142433 - DNA, 1482 bp, synthetic construct
  misc_feature 1..1482: note = Description of Artificial Sequence: Synthetic coding sequence
  source 1..1482: mol_type = other DNA
atgacccgggccctgtgcagcgccctgcggcaggccctgctgctgctggccgctgctgctgagctgagccctggcctgaagtgtgtgtgcctgctgtgtgacagcagcaacttcacctgccagacagagggcgcctgctgggcctctgtgatgctgaccaacgggaaggagcaggtgatcaagagctgtgtgtccctgcctgagctgaatgcccaggtgttctgccacagcagcaacaacgtgaccaagacagagtgctgcttcacagacttctgcaacaacatcaccctgcacctgcccacagccagccccaatgcccccaagctgggccccatggagctggccatcatcatcaccgtgcctgtgtgcctgctgagcattgctgccatgctgactgtgtgggcctgccagggccggcagtgcagctacaggaagaagaagaggcccaacgtggaggagcccctgtctgagtgcaacctggtgaatgccggcaagaccctgaaggacctgatctatgatgtgacagccagcggcagcggcagcggcctgcccctgctggtgcagaggaccatcgcccggaccatcgtgctgcaggagatcgtgggcaagggccgctttggagaggtgtggcacggccgctggtgtggagaagatgtggccgtgaagatcttcagcagcagagatgagaggtcctggttccgggaggccgagatctaccagacagtgatgctgcggcatgagaacatcctgggcttcatcgctgctgacaacaaggacaatggcacctggacccagctgtggctggtgtctgagtaccacgagcagggcagcctgtatgactacctgaacagaaacatcgtgacagtggccggcatgatcaagctggccctgagcatcgccagcggcctggcccacctgcacatggagatcgtgggcacccagggcaagccagccatcgcccaccgggacatcaagagcaagaacatcctggtgaagaagtgtgagacctgtgccatcgctgacctgggcctggccgtgaagcatgacagcatcctgaacaccatcgacatcccccagaaccccaaggtgggcaccaagcgctacatggcccctgagatgctggatgacaccatgaatgtgaacatctttgagagcttcaagagagctgacatctacagcgtgggcctggtgtactgggagatcgcccggcgctgcagcgtgggcggcatcgtggaggagtaccagctgccctactatgacatggtgcccagcgaccccagcattgaggagatgaggaaggtggtgtgtgaccagaagttccggcccagcatccccaaccagtggcagagctgtgaggccctgcgggtgatgggccgcatcatgagggagtgctggtacgccaacggggccgcccggctgacagccctgcgcatcaagaagaccatcagccagctgtgtgtgaaggaggactgcaaggcctag

SEQ ID NO: 142434 - DNA, 1242 bp, synthetic construct
  misc_feature 1..1242: note = Description of Artificial Sequence: Synthetic coding sequence
  source 1..1242: mol_type = other DNA
atgacccgggccctgtgcagcgccctgcggcaggccctgctgctgctggccgctgctgctgagctgagccctggcctgaagtgtgtgtgcctgctgtgtgacagcagcaacttcacctgccagacagagggcgcctgctgggcctctgtgatgctgaccaacgggaaggagcaggtgatcaagagctgtgtgtccctgcctgagctgaatgcccaggtgttctgccacagcagcaacaacgtgaccaagacagagtgctgcttcacagacttctgcaacaacatcaccctgcacctgcccaccggcctgcccctgctggtgcagaggaccatcgcccggaccatcgtgctgcaggagatcgtgggcaagggccgctttggagaggtgtggcacggccgctggtgtggagaagatgtggccgtgaagatcttcagcagcagagatgagaggtcctggttccgggaggccgagatctaccagacagtgatgctgcggcatgagaacatcctgggcttcatcgctgctgacaacaaggacaatggcacctggacccagctgtggctggtgtctgagtaccacgagcagggcagcctgtatgactacctgaacagaaacatcgtgacagtggccggcatgatcaagctggccctgagcatcgccagcggcctggcccacctgcacatggagatcgtgggcacccagggcaagccagccatcgcccaccgggacatcaagagcaagaacatcctggtgaagaagtgtgagacctgtgccatcgctgacctgggcctggccgtgaagcatgacagcatcctgaacaccatcgacatcccccagaaccccaaggtgggcaccaagcgctacatggcccctgagatgctggatgacaccatgaatgtgaacatctttgagagcttcaagagagctgacatctacagcgtgggcctggtgtactgggagatcgcccggcgctgcagcgtgggcggcatcgtggaggagtaccagctgccctactatgacatggtgcccagcgaccccagcattgaggagatgaggaaggtggtgtgtgaccagaagttccggcccagcatccccaaccagtggcagagctgtgaggccctgcgggtgatgggccgcatcatgagggagtgctggtacgccaacggggccgcccggctgacagccctgcgcatcaagaagaccatcagccagctgtgtgtgaaggaggactgcaaggcctag

SEQ ID NO: 142435 - DNA, 1011 bp, synthetic construct
  misc_feature 1..1011: note = Description of Artificial Sequence: Synthetic coding sequence
  source 1..1011: mol_type = other DNA
atgacccgggccctgtgcagcgccctgcggcaggccctgctgctgctggccgctgctgctgagctgagccctggcctgaagtgtgtgtgcctgctgtgtgacagcagcaacttcacctgccagacagagggcgcctgctgggcctctgtgatgctgaccaacgggaaggagcaggtgatcaagagctgtgtgtccctgcctgagctgaatgcccaggtgttctgccacagcagcaacaacgtgaccaagacagagtgctgcttcacagacttctgcaacaacatcaccctgcacctgcccacagacaatggcacctggacccagctgtggctggtgtctgagtaccacgagcagggcagcctgtatgactacctgaacagaaatattgtgacagtggccggcatgatcaagctggccctgagcatcgccagcggcctggcccacctgcacatggagatcgtgggcacccagggcaagccagccatcgcccaccgggacatcaagagcaagaacatcctggtgaagaagtgtgagacctgtgccatcgctgacctgggcctggccgtgaagcatgacagcatcctgaacaccatcgacatcccccagaaccccaaggtgggcaccaagcgctacatggcccctgagatgctggatgacaccatgaatgtgaacatctttgagagcttcaagagagctgacatctacagcgtgggcctggtgtactgggagatcgcccggcgctgcagcgtgggcggcatcgtggaggagtaccagctgccctactatgacatggtgcccagcgaccccagcattgaggagatgaggaaggtggtgtgtgaccagaagttccggcccagcatccccaaccagtggcagagctgtgaggccctgcgggtgatgggccgcatcatgagggagtgctggtacgccaatggagctgcccggctgacagccctgcgcatcaagaagaccatcagccagctgtgtgtgaaggaggactgcaaggcctag

SEQ ID NO: 142436 - DNA, 1542 bp, synthetic construct
  misc_feature 1..1542: note = Description of Artificial Sequence: Synthetic coding sequence
  source 1..1542: mol_type = other DNA
atgggcgccgccgccaagctggcctttgctgtgttcctgatcagctgcagcagcggggccatcctgggccgctctgagacccaggagtgcctcttcttcaatgccaactgggagaaggacaggaccaaccagacaggagtggagccctgctatggagacaaggacaagagaagacactgctttgccacctggaagaacatcagcggcagcattgaaattgtgaagcagggctgctggctggatgacatcaactgctatgacagaacagactgtgtggagaagaaggacagccctgaggtgtacttctgctgctgtgagggcaacatgtgcaatgagaagttctcctacttccctgagatggaggtgacccagcccaccagcaaccctgtgacccccaagccaccctactacaacatcctgctgtacagcctggtgcccctgatgctgattgctggcatcgtcatctgtgccttctgggtgtaccgccaccacaagatggcctacccacctgtgctggtgcccacccaggaccccggccccccaccacccagccccctgctgggcctgaagcccctgcagctgctggaggtgaaggcccggggccgcttcggctgtgtgtggaaggcccagctgctgaatgaatatgtggccgtgaagatcttccccatccaggacaagcagagctggcagaatgaatatgaggtgtacagcctgcccggcatgaagcatgagaacatcctgcagttcatcggggctgagaagaggggcacctctgtggatgtggacctgtggctgatcacagccttccacgagaagggcagcctgagtgacttcctgaaggccaacgtggtgtcctggaatgagctgtgccacatcgccgagaccatggcccggggcctggcctacctgcacgaggacatccctggcctgaaggatggccacaagccagccatcagccaccgggacatcaagagcaagaatgtgctgctgaagaacaacctgacagcctgcatcgctgactttggcctggccctgaagtttgaagctgggaagtctgctggggacacccacggccaggtgggcacccggcgctacatggcccctgaggtgctggagggcgccatcaacttccagagagatgccttcctgagaattgacatgtatgccatgggcctggtgctgtgggagctggccagccgctgcacagctgctgatggccctgtggatgagtacatgctgccctttgaggaggagatcggccagcaccccagcctggaggacatgcaggaggtggtggtgcacaagaagaagaggcctgtgctgcgggactactggcagaagcatgctggcatggccatgctgtgtgagaccatcgaggagtgctgggaccatgatgctgaggcccggctgtctgctggctgtgtgggggagcgcatcacccagatgcagaggctgaccaacatcatcaccacagaggacatcgtgacagtggtgaccatggtgaccaacgtggacttcccccccaaggagagcagcctgtag

SEQ ID NO: 142437 - DNA, 1542 bp, synthetic construct; identical to SEQ ID NO: 142436
  misc_feature 1..1542: note = Description of Artificial Sequence: Synthetic coding sequence
  source 1..1542: mol_type = other DNA

SEQ ID NO: 142438 - DNA, 1218 bp, synthetic construct
  misc_feature 1..1218: note = Description of Artificial Sequence: Synthetic coding sequence
  source 1..1218: mol_type = other DNA
atgtgcaatgagaagttctcctacttccctgagatggaggtgacccagcccaccagcaaccctgtgacccccaagccaccctactacaacatcctgctgtacagcctggtgcccctgatgctgattgctggcatcgtcatctgtgccttctgggtgtaccgccaccacaagatggcctacccacctgtgctggtgcccacccaggaccccggccccccaccacccagccccctgctgggcctgaagcccctgcagctgctggaggtgaaggcccggggccgcttcggctgtgtgtggaaggcccagctgctgaatgaatatgtggccgtgaagatcttccccatccaggacaagcagagctggcagaatgaatatgaggtgtacagcctgcccggcatgaagcatgagaacatcctgcagttcatcggggctgagaagaggggcacctctgtggatgtggacctgtggctgatcacagccttccacgagaagggcagcctgagtgacttcctgaaggccaacgtggtgtcctggaatgagctgtgccacatcgccgagaccatggcccggggcctggcctacctgcacgaggacatccctggcctgaaggatggccacaagccagccatcagccaccgggacatcaagagcaagaatgtgctgctgaagaacaacctgacagcctgcatcgctgactttggcctggccctgaagtttgaagctgggaagtctgctggggacacccacggccaggtgggcacccggcgctacatggcccctgaggtgctggagggcgccatcaacttccagagagatgccttcctgagaattgacatgtatgccatgggcctggtgctgtgggagctggccagccgctgcacagctgctgatggccctgtggatgagtacatgctgccctttgaggaggagatcggccagcaccccagcctggaggacatgcaggaggtggtggtgcacaagaagaagaggcctgtgctgcgggactactggcagaagcatgctggcatggccatgctgtgtgagaccatcgaggagtgctgggaccatgatgctgaggcccggctgtctgctggctgtgtgggggagcgcatcacccagatgcagaggctgaccaacatcatcaccacagaggacatcgtgacagtggtgaccatggtgaccaacgtggacttcccccccaaggagagcagcctgtag

SEQ ID NO: 142439 - DNA, 1539 bp, synthetic construct
  misc_feature 1..1539: note = Description of Artificial Sequence: Synthetic coding sequence
  source 1..1539: mol_type = other DNA
atgacagccccctgggtggccctggccctgctgtggggcagcctgtgtgccggcagcggccgcggggaggccgagacccgggagtgcatctactacaatgccaactgggagctggagaggaccaaccagagcggcctggagcgctgtgagggggagcaggacaagaggctgcactgctacgcctcctggaggaacagcagcggcaccatcgagctggtgaagaagggctgctggctggatgacttcaactgctatgaccggcaggagtgtgtggccacagaggagaacccccaggtgtacttctgctgctgtgagggcaacttctgcaatgaacgcttcacccacctgcctgaggccggcggccctgaggtgacctatgagcccccacccacagcccccaccctgctgactgtgctggcctacagcctgctgcccatcggcggcctgagcctcatcgtgctgctggccttctggatgtaccgccacaggaagccaccctacggccacgtggacatccacgaggaccccggccccccaccacccagccccctggtgggcctgaagcccctgcagctgctggagatcaaggcccggggccgcttcggctgtgtgtggaaggcccagctgatgaatgactttgtggccgtgaagatcttccccctgcaggacaagcagagctggcagagcgagcgggagatcttcagcaccccaggcatgaagcatgagaacctgctgcagttcatcgctgctgagaagaggggcagcaacctggaggtggagctgtggctgatcacagccttccatgacaagggcagcctgacagactacctgaagggcaacatcatcacctggaatgagctgtgccacgtggccgagaccatgagccggggcctgagctacctgcatgaagatgtgccctggtgccgcggggagggccacaagcccagcatcgcccaccgggacttcaagagcaagaatgtgctgctgaagagtgacctgacagctgtgctggccgactttggcctggccgtgcgctttgagcccgggaagcccccaggggacacccacggccaggtgggcacccggcgctacatggcccctgaggtgctggagggcgccatcaacttccagagagatgccttcctgagaattgacatgtatgccatgggcctggtgctgtgggagctggtgagccgctgcaaggctgctgatggccctgtggatgagtacatgctgccctttgaggaggagatcggccagcaccccagcctggaggagctgcaggaggtggtggtgcacaagaagatgaggcccaccatcaaggaccactggctgaagcaccctggcctggcccagctgtgtgtgaccatcgaggagtgctgggaccatgatgctgaggcccggctgtctgctggctgtgtggaggagcgggtgtccctcatccgccgctctgtgaatggcaccaccagtgactgcctggtgtccctggtgacctctgtgaccaacgtggacctgccccccaaggagagcagcatctag

SEQ ID NO: 142440 - DNA, 1191 bp, synthetic construct
  misc_feature 1..1191: note = Description of Artificial Sequence: Synthetic coding sequence
  source 1..1191: mol_type = other DNA
atggagctggaccacaggaccagcggcggcctgcacgcctacccaggcccccggggcggccaggtggccaagcccaacgtcatcctgcagattggaaaatgtagagctgagatgctggagcacgtgcggaggacccaccgccacctgctggccgaggtgtccaagcaggtggagcgggagctgaagggcctgcacaggtctgtgggcaagctggagagcaacctggatggctacgtgcccaccagtgacagccagcgctggaagaagagcatcaaggcctgcctgtgccgctgccaggagaccatcgccaacctggagcgctgggtgaagcgggagatgcacgtgtggagggaggtgttctaccgcctggagcgctgggccgaccggctggagagcactggaggcaagtaccctgtgggcagcgagagcgcccggcacacagtgtctgtgggcgtgggcggccctgagagctactgccacgaggctgatggctatgactacacagtgagcccctatgccatcaccccacctcctgctgctggggagctgcccggccaggagcctgctgaggcccagcagtaccagccctgggtgcctggagaagatggccagcccagccctggggtggacacccagatctttgaggacccccgggagttcctgagccacctggaggagtacctgcggcaggtgggcggcagcgaggagtactggctgagccagatccagaaccacatgaatggacctgccaagaagtggtgggagttcaagcagggctctgtgaagaactgggtggagttcaagaaggagttcctgcagtacagcgagggcaccctgagccgggaggccatccagcgggagctggacctgccccagaagcagggcgagcccctggaccagttcctgtggaggaagagggacctgtaccagaccctgtatgtggatgctgatgaggaggagatcatccagtatgtggtgggcaccctgcagcccaagctgaagcgcttcctgcggcaccccctgcccaagaccctggagcagctgatccagaggggcatggaggtgcaggatgacctggagcaggccgctgagcccgccggcccccacctgcctgtggaggatgaggccgagaccctgaccccagcccccaacagcgagagcgtggccagtgacaggacccagcctgagtag

SEQ ID NO: 142441 - DNA, 1587 bp, synthetic construct
  misc_feature 1..1587: note = Description of Artificial Sequence: Synthetic coding sequence
  source 1..1587: mol_type = other DNA
atggctgctgtgctgaatgctgagcggctggaggtgtctgtggatggcctgaccctgagcccagaccctgaggagaggcctggagctgagggcgcccccctgctgcccccacccctgcccccacccagccccccaggcagcggccggggccctggggccagcggggagcagcctgagcccggggaggccgctgctggaggagctgctgaggaggcccggcggctggagcagcgctggggcttcggcctggaggagctgtatggcctggccctgcgcttcttcaaggagaaggatggcaaggccttccaccccacctatgaggagaagctgaagctggtggccctgcacaagcaggtgctgatgggcccctacaacccagacacctgcccagaggtgggcttctttgatgtgctgggcaatgacagaagaagagagtgggccgccctgggcaacatgagcaaagaagatgccatggtggagtttgtgaagctgctgaaccgctgctgccacctgttcagcacctacgtggccagccacaagattgagaaggaggagcaggagaagaagaggaaggaggaggaggagaggagaagaagagaggaggaggagcgggagcggctgcagaaggaggaggagaagagaagaagagaggaggaggagcggctgcggcgggaggaggaggagcggcggcgcatcgaggaggagcggctgcggctggagcagcagaagcagcagatcatggccgccctgaacagccagacagctgtgcagttccagcagtatgctgcccagcagtacccaggcaactatgagcagcagcagatcctgatccggcagctgcaggagcagcactaccagcagtacatgcagcagctgtaccaggtgcagctggcccagcagcaggccgccctgcagaagcagcaggaggtggtggtggccggcagcagcctgcccaccagcagcaaggtgaatgccaccgtgcccagcaacatgatgtctgtgaatggccaggccaagacccacacagacagcagcgagaaggagctggagcctgaggccgctgaggaggccctggagaatggccccaaggagagcctgcctgtgattgctgcccccagcatgtggacccggccccagatcaaggacttcaaggagaagatccagcaggatgctgacagcgtcatcaccgtgggccgcggggaggtggtgacagtgcgggtgcccacccatgaggagggcagctacctgttctgggagtttgccacagacaactatgacattggatttggagtgtactttgagtggacagacagccccaacacagctgtgtctgtgcacgtgtctgagagcagtgatgatgatgaggaggaggaggagaacatcggctgtgaggagaaggccaagaagaatgccaacaagcccctgctggatgaaattgtgcctgtgtaccgccgggactgccacgaggaggtgtatgccggcagccaccagtacccaggccggggcgtgtacctgctgaagtttgacaacagctacagcctgtggaggagcaagtctgtgtactacagagtgtactacaccaggtag

SEQ ID NO: 142442 - DNA, 2343 bp, synthetic construct
  misc_feature 1..2343: note = Description of Artificial Sequence: Synthetic coding sequence
  source 1..2343: mol_type = other DNA
atgaagccaggggccaccggggagagtgacctggccgaggtgctgccccagcacaagtttgacagcaagagcctggaggcctacctgaaccagcacctgagcggctttggagctgagcgggaggccaccctgaccatcgcccagtacagagctgggaagagcaaccccaccttctacctgcagaagggcttccagacctacgtgctgaggaagaagcccccaggcagcctgctgcccaaggcccaccagattgaccgggagttcaaggtgcagaaggccctcttcagcatcggcttccctgtgcccaagcccatcctgtactgcagcgacaccagcgtcatcggcacagagttctacgtgatggagcacgtgcagggccgcatcttccgggacctgaccatccctggcctgagccctgctgagaggtctgccatctacgtggccaccgtggagaccctggcccagctgcggagcctgaacatccagagcctgcagctggagggctatggaattggagctggctactgcaagaggcaggtgtccacctggaccaagcagtaccaggccgccgcccaccaggacatcccagccatgcagcagctgtctgagtggctgatgaagaacctgcctgacaatgacaatgaggagaacctgatccacggggacttccggctggacaacatcgtgttccaccccaaggagtgccgggtgattgctgtgctggactgggagctgagcaccatcggccaccccctgagtgacctggcccacttcagcctcttctacttctggcccaggacagtgcccatgatcaaccagggcagctacagcgagaacagcggcatccccagcatggaggagctgatcagcatctactgccgctgccggggcatcaacagcatcctgcccaactggaacttcttcctggccctgagctacttcaagatggccggcatcgcccagggcgtgtacagccgctacctgctgggcaacaacagcagtgaagattccttcctgtttgccaacatcgtgcagcccctggccgagaccggcctgcagctgagcaagaggaccttcagcacagtgctgccccagattgacaccaccggccagctgtttgtgcagaccaggaagggccaggaggtgctgatcaaggtgaagcacttcatgaagcagcacatcctgcctgctgagaaggaggtgacagagttctacgtgcagaatgaaaattctgtggacaagtggggcaagcccctggtgattgacaagctgaaggagatggccaaggtggagggcctgtggaacctcttcctgcctgctgtgtctggcctgagccacgtggactatgccctgattgctgaggagaccgggaagtgcttctttgccccagatgtgttcaactgccaggccccagacaccggcaacatggaggtgctgcacctgtatggcagcgaggagcagaagaagcagtggctggagcccctgctgcagggcaacatcaccagctgcttctgcatgacagagccagatgtggccagcagtgatgccaccaacatcgagtgcagcatccagagagatgaagattcctatgtgatcaatggcaagaagtggtggagcagcggggccggcaaccccaagtgcaagatcgccatcgtgctgggccgcacccagaacaccagcctgagccgccacaagcagcacagcatgatcctggtgcccatgaacaccccaggagtgaagatcatccggcccctgtctgtgtttggctacacagacaacttccatggaggccactttgagatccacttcaaccaggtgcgggtgcctgccaccaacctgatcctgggggagggccggggctttgagatcagccagggccgcctgggccctggccgcatccaccactgcatgaggacagtgggcctggccgagcgggccctgcagatcatgtgtgagcgggccacccagagaattgccttcaagaagaagctgtatgcccacgaggtggtggcccactggattgctgagagcagaattgccatcgagaagatccggctgctgaccctgaaggccgcccacagcatggacaccctgggcagcgctggggccaagaaggagatcgccatgatcaaggtggccgcccccagggctgtgtccaagatcgtggactgggccatccaggtgtgtggcggggccggcgtgtcccaggactaccccctggccaacatgtatgccatcaccagggtgctgcggctggctgatggcccagatgaggtgcacctgagcgccatcgccaccatggagctgcgggaccaggccaagaggctgacagccaagatctag

SEQ ID NO: 142443 - DNA, 2031 bp, synthetic construct
  misc_feature 1..2031: note = Description of Artificial Sequence: Synthetic coding sequence
  source 1..2031: mol_type = other DNA
atgaagccaggggccaccggggagagtgacctggccgaggtgctgccccagcacaagtttgacagcaagagcctggaggcctacctgaaccagcacctgagcggctttggagctgagcgggaggccaccctgaccatcgcccagtacagagctgggaagagcaaccccaccttctacctgcagaagggcttccagacctacgtgctgaggaagaagcccccaggcagcctgctgcccaaggcccaccagattgaccgggagttcaaggtgcagaaggccctcttcagcatcggcttccctgtgcccaagcccatcctgtactgcagcgacaccagcgtcatcggcacagagttctacgtgatggagcacgtgcagggccgcatcttccgggacctgaccatccctggcctgagccctgctgagaggtctgccatctacgtggccaccgtggagaccctggcccagctgcggagcctgaacatccagagcctgcagctggagggctatggaattggagctggctactgcaagaggcaggtgtccacctggaccaagcagtaccaggccgccgcccaccaggacatcccagccatgcagcagctgtctgagtggctgatgaagaacctgcctgacaatgacaatgaggagaacctgatccacggggacttccggctggacaacatcgtgttccaccccaaggagtgccgggtgattgctgtgctggactgggagctgagcaccatcggccaccccctgagtgacctggcccacttcagcctcttctacttctggcccaggacagtgcccatgatcaaccagggcagctacagcgagaacagcggcatccccagcatggaggagctgatcagcatctactgccgctgccggggcatcaacagcatcctgcccaactggaacttcttcctggccctgagctacttcaagatggccggcatcgcccagggcgtgtacagccgctacctgctgggcaacaacagcagtgaagattccttcctgtttgccaacatcgtgcagcccctggccgagaccggcctgcagctgagcaagaggaccttcagcacagtgctgccccagattgacaccaccggccagctgtttgtgcagaccaggaagggccaggaggtgctgatcaaggtgaagcacttcatgaagcagcacatcctgcctgctgagaaggaggtgacagagttctacgtgcagaatgaaaattctgtggacaagtggggcaagcccctggtgattgacaagctgaaggagatggccaaggtggagggcctgtggaacctcttcctgcctgctgtgtctggcctgagccacgtggactatgccctgattgctgaggagaccgggaagtgcttctttgccccagatgtgttcaactgccaggccccagacaccggcaacatggaggtgctgcacctgtatggcagcgaggagcagaagaagcagtggctggagcccctgctgcagggcaacatcaccagctgcttctgcatgacagagccagatgtggccagcagtgatgccaccaacatcgagtgcagcatccagagagatgaagattcctatgtgatcaatggcaagaagtggtggagcagcggggccggcaaccccaagtgcaagatcgccatcgtgctgggccgcacccagaacaccagcctgagccgggaggtggtggcccactggattgctgagagcagaattgccatcgagaagatccggctgctgaccctgaaggccgcccacagcatggacaccctgggcagcgctggggccaagaaggagatcgccatgatcaaggtggccgcccccagggctgtgtccaagatcgtggactgggccatccaggtgtgtggcggggccggcgtgtcccaggactaccccctggccaacatgtatgccatcaccagggtgctgcggctggctgatggcccagatgaggtgcacctgagcgccatcgccaccatggagctgcgggaccaggccaagaggctgacagccaagatctag

SEQ ID NO: 142444 - DNA, 918 bp, synthetic construct
  misc_feature 1..918: note = Description of Artificial Sequence: Synthetic coding sequence
  source 1..918: mol_type = other DNA
atggaggtgctgcacctgtatggcagcgaggagcagaagaagcagtggctggagcccctgctgcagggcaacatcaccagctgcttctgcatgacagagccagatgtggccagcagtgatgccaccaacattgaatgttccatccagagagatgaggacagctatgtgatcaacgggaagaagtggtggagcagtggagctggcaaccccaagtgcaagatcgccatcgtgctgggccgcacccagaacaccagcctgagccgccacaagcagcacagcatgatcctggtgcccatgaacaccccaggagtgaagatcatccggcccctgtctgtgtttggctacacagacaacttccacggcggccactttgagatccacttcaaccaggtgcgggtgcctgccaccaacctgatcctgggggagggccggggctttgagatcagccagggccgcctgggccctggccgcatccaccactgcatgaggacagtgggcctggccgagcgggccctgcagatcatgtgtgagcgggccacccagagaattgccttcaagaagaagctgtatgcccacgaggtggtggcccactggattgctgagagccgcatcgccatcgagaagatccggctgctgaccctgaaggccgcccacagcatggacaccctgggcagcgctggggccaagaaggagatcgccatgatcaaggtggccgcccccagggctgtgtccaagatcgtggactgggccatccaggtgtgtggcggggccggcgtgtcccaggactaccccctggccaacatgtatgccatcaccagggtgctgcggctggctgatggcccagatgaggtgcacctgagcgccatcgccaccatggagctgcgggaccaggccaagaggctgacagccaagatctag

SEQ ID NO: 142445 - DNA, 1248 bp, synthetic construct
  misc_feature 1..1248: note = Description of Artificial Sequence: Synthetic coding sequence
  source 1..1248: mol_type = other DNA
atgctgtggagcggctgcagaagatttggagcccggctgggctgcctgcccggcggcctgcgggtgctggtgcagacaggccacaggagcctgaccagctgcatcgaccccagcatgggcctgaatgaggagcagaaggagttccagaaggtggcctttgattttgctgcccgggagatggcccccaacatggccgagtgggaccagaaggagctgtttcctgtggatgtgatgaggaaggccgcccagctgggctttggaggagtgtacatccagacagatgtgggcggcagcggcctgagccggctggacaccagcgtcatctttgaggccctggccaccggctgcaccagcaccacagcctacatcagcatccacaacatgtgtgcctggatgattgacagctttggaaatgaggagcagaggcacaagttctgcccccccctgtgcaccatggagaagtttgccagctactgcctgacagagcccggcagcggcagtgatgctgccagcctgctgaccagcgccaagaagcagggcgaccactacatcctgaatggcagcaaggccttcatctctggagctggggagagtgacatctacgtggtgatgtgcaggactggaggccctggccccaagggcatcagctgcatcgtggtggagaagggcaccccaggcctgagctttgggaagaaggagaagaaggtgggctggaacagccagcccaccagggctgtgatctttgaggactgtgctgtgcctgtggccaacagaattggcagcgagggccagggcttcctgattgctgtgcggggcctgaatggaggccgcatcaacatcgccagctgcagcctgggcgccgcccacgccagcgtcatcctgacccgggaccacctgaatgtgaggaagcagtttggagagcccctggccagcaaccagtacctgcagttcaccctggccgacatggccacccggctggtggccgcccggctgatggtgagaaatgctgctgtggccctgcaggaggagaggaaggatgctgtggccctgtgcagcatggccaagctgtttgccacagatgaatgttttgccatctgcaaccaggccctgcagatgcatggaggctacggctacctgaaggactatgctgtgcagcagtatgtgcgggacagccgggtgcaccagatcctggagggcagcaatgaggtgatgaggatcctgatcagccgcagcctgctgcaggagtag

SEQ ID NO: 142446 - DNA, 1074 bp, synthetic construct
  misc_feature 1..1074: note = Description of Artificial Sequence: Synthetic coding sequence
  source 1..1074: mol_type = other DNA
atgaggaaggccgcccagctgggctttggaggagtgtacatccagacagatgtgggcggcagcggcctgagccggctggacaccagcgtcatctttgaggccctggccaccggctgcaccagcaccacagcctacatcagcatccacaacatgtgtgcctggatgattgacagctttggaaatgaggagcagaggcacaagttctgcccccccctgtgcaccatggagaagtttgccagctactgcctgacagagcccggcagcggcagtgatgctgccagcctgctgaccagcgccaagaagcagggcgaccactacatcctgaatggcagcaaggccttcatcagcggggccggggagagtgacatctacgtggtgatgtgcaggactggaggccctggccccaagggcatcagctgcatcgtggtggagaagggcaccccaggcctgagctttgggaagaaggagaagaaggtgggctggaacagccagcccacccgggccgtcatctttgaggactgtgctgtgcctgtggccaaccgcatcggcagcgagggccagggcttcctgattgctgtgcggggcctgaatggaggccgcatcaacatcgccagctgcagcctgggcgccgcccacgccagcgtcatcctgacccgggaccacctgaatgtgaggaagcagtttggagagcccctggccagcaaccagtacctgcagttcaccctggccgacatggccacccggctggtggccgcccggctgatggtgagaaatgctgctgtggccctgcaggaggagaggaaggatgctgtggccctgtgcagcatggccaagctgtttgccacagatgagtgctttgccatctgcaaccaggccctgcagatgcacggcggctacggctacctgaaggactatgctgtgcagcagtatgtgcgggacagccgggtgcaccagatcctggaggagctgttctggcagggccctggggtgcagagccgcagctttgtgccctttggaggcccccagatcgccctgctgctgcccttcagcagcggggacctgcgggagggctag

SEQ ID NO: 142447 - DNA, 819 bp, synthetic construct
  misc_feature 1..819: note = Description of Artificial Sequence: Synthetic coding sequence
  source 1..819: mol_type = other DNA
atgggcctgaatgaggagcagaaggagttccagaaggtggcctttgattttgctgcccgggagatggcccccaacatggccgagtgggaccagaaggagctgtttcctgtggatgtgatgaggaaggccgcccagctgggctttggaggagtgtacatccagacagatgtgggcggcagcggcctgagccggctggacaccagcgtcatctttgaggccctggccaccggctgcaccagcaccacagcctacatcagcatccacaacatgtgtgcctggatgattgacagctttggaaatgaggagcagaggcacaagttctgcccccccctgtgcaccatggagaagtttgccagctactgcctgacagagcccggcagcggcagtgatgctgccagcctgctgaccagcgccaagaagcagggcgaccactacatcctgaatggcagcaaggccttcatctctggagctggggagagtgacatctacgtggtgatgtgcaggactggaggccctggccccaagggcatcagctgcatcgtggtggagaagggcaccccaggcctgagctttgggaagaaggagaagaaggtgggctggaacagccagcccaccagggctgtgatctttgaggactgtgctgtgcctgtggccaacagaattggcagcgagggccagggcttcctgattgctgtgcggggcctgaatggaggccgcatcaacatcgccagctgcagcctgggctgcccccggctgtgccacccccaccccaggcctccccagtgcccagaggccgtgtggagggccagcggccagtag

SEQ ID NO: 142448 - DNA, 681 bp, synthetic construct
  misc_feature 1..681: note = Description of Artificial Sequence: Synthetic coding sequence
  source 1..681: mol_type = other DNA
atgaagagcaggaagaacttcaagaagtggcccctgaccctgctgcctgagcgctggctgcagatctggcagagcggcaccaggtccatgtgtgcctggatgattgacagctttggaaatgaggagcagaggcacaagttctgcccccccctgtgcaccatggagaagtttgccagctactgcctgacagagcccggcagcggcagtgatgctgccagcctgctgaccagcgccaagaagcagggcgaccactacatcctgaatggcagcaaggccttcatctctggagctggggagagtgacatctacgtggtgatgtgcaggactggaggccctggccccaagggcatcagctgcatcgtggtggagaagggcaccccaggcctgagctttgggaagaaggagaagaaggtgggctggaacagccagcccaccagggctgtgatctttgaggactgtgctgtgcctgtggccaacagaattggcagcgagggccagggcttcctgattgctgtgcggggcctgaatggaggccgcatcaacatcgccagctgcagcctgggcgccgcccacgccagcgtcatcctgacccgggaccacctgaatgtgaggaagcagtttggagagcccctggccagcaaccagaagaagcaggagaccctgaagctgtggatcacctag

SEQ ID NO: 142449 - DNA, 1866 bp, synthetic construct
  misc_feature 1..1866: note = Description of Artificial Sequence: Synthetic coding sequence
  source 1..1866: mol_type = other DNA
atgagcggctgcggcctcttcctgcggaccacagctgctgcccgggcctgccggggcctggtggtgtccacagccaacagaaggctgctgcggaccagcccccctgtgcgggcctttgccaaggagctgttcctgggcaagatcaagaagaaggaggtgttccccttccctgaggtgtcccaggatgagctgaatgagatcaaccagttcctgggccctgtggagaagttcttcacagaggaggtggacagcaggaagattgaccaggagggcaagatcccagatgagaccctggagaagctgaagagcctgggcctgtttggcctgcaggtgcctgaggagtatggaggcctgggcttcagcaacaccatgtacagccggctgggggagatcatctccatggatggcagcatcaccgtgaccctggccgcccaccaggccatcggcctgaagggcatcatcctggccggcacagaggagcagaaggccaagtacctgcccaagctggccagcggggagcacatcgccgccttctgcctgacagagcccgccagcggcagtgatgctgccagcatccgcagccgggccaccctgtctgaggacaagaagcactacatcctgaatggcagcaaggtgtggatcaccaacggcggcctggccaacatcttcaccgtgtttgccaagacagaggtggtggacagtgatggctctgtgaaggacaagatcacagccttcatcgtggagcgggactttggaggagtgaccaacgggaagccagaggacaagctgggcatccggggcagcaacacctgtgaggtgcactttgagaacaccaagatccctgtggagaacatcctgggggaggtgggagatggcttcaaggtggccatgaacatcctgaacagcggccgcttctccatgggctctgtggtggccggcctgctgaagaggctgattgagatgacagcagaatatgcctgcaccaggaagcagttcaacaagaggctgtctgaatttggcctcatccaggagaagtttgccctgatggcccagaaggcctacgtgatggagagcatgacctacctgacagctggcatgctggaccagcccggcttcccagactgcagcattgaagctgccatggtgaaggtgttcagcagcgaggccgcctggcagtgtgtgtctgaggccctgcagatcctgggcggcctgggctacacccgggactacccctatgaaagaatcctgcgggacacccgcatcctgctgatctttgagggcaccaatgagatcctgaggatgtacatcgccctgaccggcctgcagcacgccggccgcatcctgaccacccgcatccacgagctgaagcaggccaaggtgtccacagtgatggacacagtgggccgccgcctgcgggacagcctgggccgcacagtggacctgggcctgaccggcaaccacggcgtggtgcaccccagcctggccgacagcgccaacaagtttgaggagaacacctactgcttcggccgcacagtggagaccctgctgctgcgctttgggaagaccatcatggaggagcagctggtgctgaagagggtggccaacatcctgatcaacctgtatggcatgacagctgtgctgagccgggccagccgcagcatccgcatcggcctgagaaatcatgaccacgaggtgctgctggccaacaccttctgtgtggaggcctacctgcagaacctcttcagcctgagccagctggacaagtatgcccctgagaacctggatgagcagatcaagaaggtgtcccagcagatcctggagaagagggcctacatctgtgcccaccccctggacaggacctgctag

SEQ ID NO: 142450 - DNA, 1467 bp, synthetic construct
  misc_feature 1..1467: note = Description of Artificial Sequence: Synthetic coding sequence
  source 1..1467: mol_type = other DNA
atggatggcagcatcaccgtgaccctggccgcccaccaggccatcggcctgaagggcatcatcctggccggcacagaggagcagaaggccaagtacctgcccaagctggccagcggggagcacatcgccgccttctgcctgacagagcccgccagcggcagtgatgctgccagcatccgcagccgggccaccctgtctgaggacaagaagcactacatcctgaatggcagcaaggtgtggatcaccaatggaggcctggccaacatcttcaccgtgtttgccaagacagaggtggtggacagtgatggctctgtgaaggacaagatcacagccttcatcgtggagcgggactttggaggagtgaccaacgggaagccagaggacaagctgggcatccggggcagcaacacctgtgaggtgcactttgagaacaccaagatccctgtggagaacatcctgggggaggtgggagatggcttcaaggtggccatgaacatcctgaacagcggccgcttctccatgggctctgtggtggccggcctgctgaagaggctcatcgagatgacagcagaatatgcctgcaccaggaagcagttcaacaagaggctgtctgaatttggcctcatccaggagaagtttgccctgatggcccagaaggcctacgtgatggagagcatgacctacctgacagctggcatgctggaccagcccggcttcccagactgcagcattgaggccgccatggtgaaggtgttcagcagcgaggccgcctggcagtgtgtgtctgaggccctgcagatcctgggcggcctgggctacacccgggactacccctatgagcgcatcctgcgggacacccgcatcctgctgatctttgagggcaccaatgagatcctgaggatgtacatcgccctgaccggcctgcagcacgccggccgcatcctgaccacccgcatccacgagctgaagcaggccaaggtgtccacagtgatggacacagtgggccggcggctgcgggacagcctgggccgcacagtggacctgggcctgactggaaaccacggcgtggtgcaccccagcctggccgacagcgccaacaagtttgaggagaacacctactgctttggaagaacagtggagaccctgctgctgcgctttgggaagaccatcatggaggagcagctggtgctgaagagggtggccaacatcctgatcaacctgtatggcatgacagctgtgctgagccgggccagccgcagcatcagaattggcctgaggaaccacgaccacgaggtgctgctggccaacaccttctgtgtggaggcctacctgcagaacctcttcagcctgagccagctggacaagtatgcccctgagaacctggatgagcagatcaagaaggtgtcccagcagatcctggagaagagggcctacatctgtgcccaccccctggacaggacctgctag

SEQ ID NO: 142451 - DNA, 507 bp, synthetic construct
  misc_feature 1..507: note = Description of Artificial Sequence: Synthetic coding sequence
  source 1..507: mol_type = other DNA
atggaggagcagctggtgctgaagggcggccagcacccccaccagcctgtgtggcatgatggccgggctgtggccggccagcccctgcacccccactgggccccccagccccggccccggggcagcctgggccagcacctgctgcggggcagcctgctggccgagagcctgcagcccctgtctgctggccaggtgtgcagcaggaagcccaggagccggctgaggaagtgccccagccgcagcctgcggtctgagcccatctctgtgcccaccctgtggacaggccatgctgagcggggccagtgccccctgctgcccccagcccccacccacggccccctgctggatgactgctacagcttcttccggcggctgggcctgagccaggtgaagccctttgtgccccggctgcacctgaagggctgccgcctggcctgggagagcctcttccaggtgctgacctgccggcagtgcagcctgaccggccccagccagctgctgaactag

SEQ ID NO: 142452 - DNA, 1239 bp, synthetic construct
  misc_feature 1..1239: note = Description of Artificial Sequence: Synthetic coding sequence
  source 1..1239: mol_type = other DNA
atggctgctgccctgctggcccgggccagcggccctgcccggcgggccctgtgcccccgggcctggaggcagctgcacaccatctaccagagcgtggagctgcctgagacccaccagatgctgctgcagacctgccgggactttgctgagaaggagctgttccccatcgccgcccaggtggacaaggagcacctgtttcctgctgcccaggtgaagaagatgggcggcctgggcctgctggccatggatgtgcctgaggagctgggcggggccggcctggactacctggcctatgccatcgccatggaggagatcagccggggctgtgccagcactggagtcatcatgtctgtgaacaacagcctgtacctgggccccatcctgaagtttggcagcaaggagcagaagcaggcctgggtgacccccttcaccagcggggacaagattggctgctttgccctgtctgagcctggaaatggaagtgatgctggagctgccagcaccacagcccgggcagagggggacagctgggtgctgaatggcaccaaggcctggatcaccaatgcctgggaggccagcgctgctgtggtgtttgccagcacagaccgggccctgcagaacaagggcatcagcgccttcctggtgcccatgcccaccccaggcctgaccctgggcaagaaggaggacaagctgggcatccggggcagcagcacagccaacctgatctttgaggactgccgcatccccaaggacagcatcctgggggagcccggcatgggcttcaagatcgccatgcagaccctggacatgggcagaattggaattgccagccaggccctgggcatcgcccagacagccctggactgtgctgtgaactatgcagaaaataggatggccttcggggcccccctgaccaagctgcaggtgatccagttcaagctggccgacatggccctggccctggagagcgcccggctgctgacctggagggctgccatgctgaaggacaacaagaagcccttcatcaaggaggccgccatggccaagctggccgccagcgaggccgccacagccatcagccaccaggccatccagatcctgggcggcatgggctacgtgacagagatgcctgctgagcggcactacagagatgcccgcatcacagagatctatgagggcaccagcgagatccagaggctggtgattgctggccacctgctgcggagctaccgctcctag

SEQ ID NO: 142453 - DNA, 1365 bp, synthetic construct
  misc_feature 1..1365: note = Description of Artificial Sequence: Synthetic coding sequence
  source 1..1365: mol_type = other DNA
atggctgctggcttcggccgctgctgccgggtgctgcggagcatcagccgcttccactggaggagccagcacaccaaggccaaccggcagcgggagcccggcctgggcttctcctttgagttcacagagcagcagaaggagttccaggccacagccaggaagtttgcccgggaggagatcatccctgtggccgcagaatatgacaagacaggagagtaccctgtgcccctcatcagaagagcctgggagctgggcctgatgaacacccacatccctgagaactgtgactacagcgtgtgccccctgctggaggcctgcaccctgtacctggatgccttcttcctgctgctgaccggcagcaacctgaacctgcacctgaacctgggcggcctgggcctgggcacctttgatgcctgcctgatcagcgaggagctggcctacggctgcaccggggtgcagacagccatcgagggcaacagcctgggccagatgcccatcatcatcgctggaaatgaccagcagaagaagaagtacctgggccgcatgacagaggagcccctgatgtgtgcctactgtgtgacagagcccggggccggcagtgatgtggccggcatcaagaccaaggccgagaagaagggagatgagtacatcatcaatggccagaagatgtggatcaccaatggaggcaaggccaactggtacttcctgctggcccggagtgaccctgaccccaaggccccagccaacaaggccttcaccggcttcatcgtggaggccgacaccccaggcatccagatcggcaggaaggagctgaacatgggccagcgctgcagcgacacccggggcatcgtgtttgaagatgtgaaggtgcccaaggaaaatgtgctgattggagatggagctggcttcaaggtggccatgggcgcctttgacaagaccaggcctgtggtggccgccggggctgtgggcctggcccagagggccctggatgaggccaccaagtatgccctggagaggaagaccttcggcaagctgctggtggagcaccaggccatctccttcatgctggccgagatggccatgaaggtggagctggccaggatgagctaccagagagctgcctgggaggtggacagcggcagaagaaacacctactatgccagcatcgccaaggcctttgctggggacatcgccaaccagctggccacagatgctgtgcagatcctgggcggcaatggcttcaacacagagtaccctgtggagaagctgatgagagatgccaagatctaccagatctatgagggcaccagccagatccagaggctgattgtggcccgggagcacatcgacaagtacaagaactag

SEQ ID NO: 142454 - DNA, 1266 bp, synthetic construct
  misc_feature 1..1266: note = Description of Artificial Sequence: Synthetic coding sequence
  source 1..1266: mol_type = other DNA
atggctgctggcttcggccgctgctgccgggtgctgcggagcatcagccgcttccactggaggagccagcacaccaaggccaaccggcagcgggagcccggcctgggcttctcctttgagttcacagagcagcagaaggagttccaggccacagccaggaagtttgcccgggaggagatcatccctgtggccgcagaatatgacaagacaggagagtaccctgtgcccctcatcagaagagcctgggagctgggcctgatgaacacccacatccctgagaactgtggcggcctgggcctgggcacctttgatgcctgcctgatcagcgaggagctggcctacggctgcacaggagtgcagacagccatcgagggcaacagcctgggccagatgcccatcatcatcgctggaaatgaccagcagaagaagaagtacctgggccgcatgacagaggagcccctgatgtgtgcctactgtgtgacagagcctggagctggcagtgatgtggccggcatcaagaccaaggccgagaagaagggagatgagtacatcatcaatggccagaagatgtggatcaccaacggcggcaaggccaactggtacttcctgctggcccggagtgaccctgaccccaaggccccagccaacaaggccttcaccggcttcatcgtggaggccgacaccccaggcatccagattggaaggaaggagctgaacatgggccagcgctgcagcgacacccggggcatcgtgtttgaagatgtgaaggtgcccaaggaaaatgtgctgattggagatggagctggcttcaaggtggccatgggcgcctttgacaagaccaggcctgtggtggccgccggggctgtgggcctggcccagagggccctggatgaggccaccaagtatgccctggagaggaagaccttcggcaagctgctggtggagcaccaggccatctccttcatgctggccgagatggccatgaaggtggagctggccaggatgagctaccagagagctgcctgggaggtggacagcggcagaagaaacacctactatgccagcatcgccaaggcctttgctggggacatcgccaaccagctggccacagatgctgtgcagatcctgggcggcaatggcttcaacacagagtaccctgtggagaagctgatgagagatgccaagatctaccagatctatgagggcaccagccagatccagaggctcatcgtggcccgggagcacatcgacaagtacaagaactag

SEQ ID NO: 142455 - DNA, 1278 bp, synthetic construct
  misc_feature 1..1278: note = Description of Artificial Sequence: Synthetic coding sequence
  source 1..1278: mol_type = other DNA
atggctgctggcttcggccgctgctgccgctgcagcctgcaggtgctgcggagcatcagccgcttccactggaggagccagcacaccaaggccaaccggcagcgggagcccggcctgggcttctcctttgagttcacagagcagcagaaggagttccaggccacagccaggaagtttgcccgggaggagatcatccctgtggccgcagaatatgacaagacaggagagtaccctgtgcccctcatcagaagagcctgggagctgggcctgatgaacacccacatccctgagaactgtggcggcctgggcctgggcacctttgatgcctgcctgatcagcgaggagctggcctacggctgcacaggagtgcagacagccatcgagggcaacagcctgggccagatgcccatcatcatcgctggaaatgaccagcagaagaagaagtacctgggccgcatgacagaggagcccctgatgtgtgcctactgtgtgacagagcctggagctggcagtgatgtggccggcatcaagaccaaggccgagaagaagggagatgagtacatcatcaatggccagaagatgtggatcaccaacggcggcaaggccaactggtacttcctgctggcccggagtgaccctgaccccaaggccccagccaacaaggccttcaccggcttcatcgtggaggccgacaccccaggcatccagattggaaggaaggagctgaacatgggccagcgctgcagcgacacccggggcatcgtgtttgaagatgtgaaggtgcccaaggaaaatgtgctgattggagatggagctggcttcaaggtggccatgggcgcctttgacaagaccaggcctgtggtggccgccggggctgtgggcctggcccagagggccctggatgaggccaccaagtatgccctggagaggaagaccttcggcaagctgctggtggagcaccaggccatctccttcatgctggccgagatggccatgaaggtggagctggccaggatgagctaccagagagctgcctgggaggtggacagcggcagaagaaacacctactatgccagcatcgccaaggcctttgctggggacatcgccaaccagctggccacagatgctgtgcagatcctgggcggcaatggcttcaacacagagtaccctgtggagaagctgatgagagatgccaagatctaccagatctatgagggcaccagccagatccagaggctcatcgtggcccgggagcacatcgacaagtacaagaactag

SEQ ID NO: 142456 - DNA, 1158 bp, synthetic construct
  misc_feature 1..1158: note = Description of Artificial Sequence: Synthetic coding sequence
  source 1..1158: mol_type = other DNA
atgctgcaggagttcacagagcagcagaaggagttccaggccacagccaggaagtttgcccgggaggagatcatccctgtggccgcagaatatgacaagacaggagagtaccctgtgcccctcatcagaagagcctgggagctgggcctgatgaacacccacatccctgagaactgtggcggcctgggcctgggcacctttgatgcctgcctgatcagcgaggagctggcctacggctgcacaggagtgcagacagccatcgagggcaacagcctgggccagatgcccatcatcatcgctggaaatgaccagcagaagaagaagtacctgggccgcatgacagaggagcccctgatgtgtgcctactgtgtgacagagcctggagctggcagtgatgtggccggcatcaagaccaaggccgagaagaagggagatgagtacatcatcaatggccagaagatgtggatcaccaacggcggcaaggccaactggtacttcctgctggcccggagtgaccctgaccccaaggccccagccaacaaggccttcaccggcttcatcgtggaggccgacaccccaggcatccagattggaaggaaggagctgaacatgggccagcgctgcagcgacacccggggcatcgtgtttgaagatgtgaaggtgcccaaggaaaatgtgctgattggagatggagctggcttcaaggtggccatgggcgcctttgacaagaccaggcctgtggtggccgccggggctgtgggcctggcccagagggccctggatgaggccaccaagtatgccctggagaggaagaccttcggcaagctgctggtggagcaccaggccatctccttcatgctggccgagatggccatgaaggtggagctggccaggatgagctaccagagagctgcctgggaggtggacagcggcagaagaaacacctactatgccagcatcgccaaggcctttgctggggacatcgccaaccagctggccacagatgctgtgcagatcctgggcggcaatggcttcaacacagagtaccctgtggagaagctgatgagagatgccaagatctaccagatctatgagggcaccagccagatccagaggctcatcgtggcccgggagcacatcgacaagtacaagaactag

SEQ ID NO: 142457 - DNA, 699 bp, synthetic construct
  misc_feature 1..699: note = Description of Artificial Sequence: Synthetic coding sequence
  source 1..699: mol_type = other DNA
atgtggatcaccaatggaggcaaggccaactggtacttcctgctggcccggagtgaccctgaccccaaggccccagccaacaaggccttcaccggcttcatcgtggaggccgacaccccaggcatccagatcggcaggaaggagctgaacatgggccagcgctgcagcgacacccggggcatcgtgtttgaagatgtgaaggtgcccaaggaaaatgtgctgattggagatggagctggcttcaaggtggccatgggcgcctttgacaagaccaggcctgtggtggccgccggggctgtgggcctggcccagagggccctggatgaggccaccaagtatgccctggagaggaagaccttcggcaagctgctggtggagcaccaggccatctccttcatgctggccgagatggccatgaaggtggagctggccaggatgagctaccagagagctgcctgggaggtggacagcggcagaagaaacacctactatgccagcatcgccaaggcctttgctggggacatcgccaaccagctggccacagatgctgtgcagatcctgggcggcaatggcttcaacacagagtaccctgtggagaagctgatgagagatgccaagatctaccagatctatgagggcaccagccagatccagaggctgattgtggcccgggagcacatcgacaagtacaagaactag

SEQ ID NO: 142458 - DNA, 1446 bp, synthetic construct
  misc_feature 1..1446: note = Description of Artificial Sequence: Synthetic coding sequence
  source 1..1446: mol_type = other DNA
atggatggagctgtgatggagggccccctcttcctgcagagccagagatttggcaccaagcgctggaggaagacctgggccgtgctgtacccagccagcccccatggagtggcccggctggagttctttgaccacaagggcagcagcagcggcggcggccggggcagcagccggcggctggactgcaaggtgatccggctggctgaatgtgtgtctgtggcccctgtgacagtggagaccccacctgagcccggggccacagccttccggctggacacagcccagaggagccacctgctggccgcagatgcccccagcagcgctgcctgggtgcagaccctgtgcagaaatgccttccccaagggctcctggaccctggcccccacagacaacccccccaagctgagcgccctggagatgctggagaacagcctgtacagccccacctgggagggcagccagttctgggtgacagtgcagaggacagaggccgctgagcgctgtggcctgcacggcagctatgtgctgcgggtggaggccgagcggctgaccctgctgactgtgggcgcccagagccagatcctggagcccctgctgtcctggccctacaccctgctgcggcgctatggccgggacaaggtgatgttctcctttgaggccggccgccgctgccccagcggccctggcaccttcaccttccagacagcccagggcaatgacatcttccaggccgtggagacagccatccaccggcagaaggcccagggcaaggccggccagggccatgatgtgctgcgggctgacagccatgaaggagaggtggccgagggcaagctgcccagccccccaggcccccaggagctgctggacagccccccagccctgtatgcagagcccctggacagcctgagaattgccccctgccccagccaggacagcctgtacagcgaccccctggacagcaccagcgcccaggccggggagggcgtgcagaggaagaagcccctgtactgggacctgtatgaacatgcccagcagcagctgctgaaggccaagctgacagaccccaaggaggaccccatctatgatgagcctgagggcctggcccctgtgcccccccagggcctgtatgacctgccccgggagcccaaggatgcctggtggtgccaggcccgggtgaaggaggagggctatgagctgccctacaacccagccacagatgattatgctgtgcccccacccaggagcaccaagcccctgctggcccccaagccccagggccctgccttccctgagcctggaacagccactggaagtggcatcaagagccacaacagcgccctgtacagccaggtgcagaagagcggggccagcggctcctgggactgtggcctgagccgggtgggcacagacaagacaggagtgaagtctgagggcagcacctag

SEQ ID NO: 142459 - DNA, 1299 bp, synthetic construct
  misc_feature 1..1299: note = Description of Artificial Sequence: Synthetic coding sequence
  source 1..1299: mol_type = other DNA
atggagggcctggccgtgcggctgctgcggggcagccggctgctgcggaggaacttcctgacctgcctgagctcctggaagatcccccctcatgtgtccaagagcagccagagcgaggccctgctgaacatcaccaacaacggcatccactttgcccccctgcagaccttcacagatgaggagatgatgatcaagagctctgtgaagaagtttgcccaggagcagatcgcccccctggtgtccaccatggatgagaacagcaagatggagaagagcgtcatccagggcctcttccagcagggcctgatgggcatcgaggtggaccctgaatatggaggcaccggggccagcttcctgagcacagtgctggtgattgaggagctggccaaggtggatgcctctgtggccgtgttctgtgagatccagaacaccctcatcaacaccctcatcaggaagcatggaacagaggagcagaaggccacctacctgccccagctgaccacagagaaggtgggcagcttctgcctgtctgaggccggggccggcagtgacagctttgccctgaagaccagggctgacaaggagggggactactacgtgctgaatggcagcaagatgtggatcagcagcgctgagcacgccggcctcttcctggtgatggccaacgtggaccccaccatcggctacaagggcatcaccagcttcctggtggaccgggacaccccaggcctgcacatcggcaagccagagaacaagctgggcctgcgggccagcagcacctgccccctgacctttgaaaatgtgaaggtgcctgaggccaacatcctgggccagattggacatggctacaagtatgccatcggcagcctgaatgaaggaagaattggaattgctgcccagatgctgggcctggcccagggctgctttgactacaccatcccctacatcaaggagcgcatccagtttgggaagaggctgtttgacttccagggcctgcagcaccaggtggcccacgtggccacccagctggaggccgcccggctgctgacctacaatgctgcccggctgctggaggccggcaagcccttcatcaaggaggcctccatggccaagtactatgccagcgagattgctggccagaccaccagcaagtgcatcgagtggatgggcggcgtgggctacaccaaggactaccctgtggagaagtacttcagagatgccaagattggcaccatctatgaaggagccagcaacatccagctgaacaccatcgccaagcacattgatgctgagtactag

SEQ ID NO: 142460 - DNA, 993 bp, synthetic construct
  misc_feature 1..993: note = Description of Artificial Sequence: Synthetic coding sequence
  source 1..993: mol_type = other DNA
atgggcatcgaggtggaccctgaatatggaggcaccggggccagcttcctgagcacagtgctggtgattgaggagctggccaaggtggatgcctctgtggccgtgttctgtgagatccagaacaccctcatcaacaccctcatcaggaagcatggaacagaggagcagaaggccacctacctgccccagctgaccacagagaaggtgggcagcttctgcctgtctgaggccggggccggcagtgacagctttgccctgaagaccagggctgacaaggagggggactactacgtgctgaatggcagcaagatgtggatcagcagcgctgagcacgccggcctcttcctggtgatggccaacgtggaccccaccatcggctacaagggcatcaccagcttcctggtggaccgggacaccccaggcctgcacatcggcaagccagagaacaagctgggcctgcgggccagcagcacctgccccctgacctttgaaaatgtgaaggtgcctgaggccaacatcctgggccagattggacatggctacaagtatgccatcggcagcctgaatgaaggaagaattggaattgctgcccagatgctgggcctggcccagggctgctttgactacaccatcccctacatcaaggagcgcatccagtttgggaagaggctgtttgacttccagggcctgcagcaccaggtggcccacgtggccacccagctggaggccgcccggctgctgacctacaatgctgcccggctgctggaggccggcaagcccttcatcaaggaggcctccatggccaagtactatgccagcgagattgctggccagaccaccagcaagtgcatcgagtggatgggcggcgtgggctacaccaaggactaccctgtggagaagtacttcagagatgccaagattggcaccatctatgaaggagccagcaacatccagctgaacaccatcgccaagcacattgatgctgagtactag

SEQ ID NO: 142461 - DNA, 1968 bp, synthetic construct
  misc_feature 1..1968: note = Description of Artificial Sequence: Synthetic coding sequence
  source 1..1968: mol_type = other DNA
atgcaggccgccaggatggccgccagcctgggccggcagctgctgcggctgggcggcggcagcagccggctgacagccctgctgggccagcccaggcctggccctgcccggcggccctatgccggcggggccgcccagctggccctggacaagagtgacagccaccccagtgatgccctgaccaggaagaagccagccaaggccgagagcaagagctttgctgtgggcatgttcaagggccagctgaccacagaccaggtgttcccctaccccagcgtgctgaatgaggagcagacccagttcctgaaggagctggtggagcctgtgagccgcttctttgaggaggtgaatgaccctgccaagaatgatgccctggagatggtggaggagaccacctggcagggcctgaaggagctgggcgccttcggcctgcaggtgcccagcgagctgggcggcgtgggcctgtgcaacacccagtatgcccggctggtggagatcgtgggcatgcatgacctgggcgtgggcatcaccctgggcgcccaccagagcatcggcttcaagggcatcctgctgtttggcaccaaggcccagaaggagaagtacctgcccaagctggccagcggggagaccgtggccgccttctgcctgacagagcccagcagcggcagtgatgctgccagcatccgcaccagcgctgtgcccagcccctgtgggaagtactacaccctgaatggcagcaagctgtggatcagcaatggaggcctggccgacatcttcaccgtgtttgccaagacccctgtgacagatcctgccaccggggctgtgaaggagaagatcacagcctttgtggtggagcggggctttggaggcatcacccacggccccccagagaagaagatgggcatcaaggccagcaacacagctgaggtgttctttgatggagtgcgggtgcccagtgaaaatgtgctgggggaggtgggcagcggcttcaaggtggccatgcacatcctgaacaacggccgcttcggcatggccgccgccctggccggcaccatgaggggcatcatcgccaaggctgtggaccacgccaccaacagaacccagtttggagagaagatccacaactttggcctcatccaggagaagctggccaggatggtgatgctgcagtatgtgacagagagcatggcctacatggtgtctgccaacatggaccagggcgccacagacttccagattgaagctgccatcagcaagatctttggaagtgaagctgcctggaaggtgacagatgagtgcatccagatcatgggcggcatgggcttcatgaaggagcccggggtggagcgggtgctgcgggacctgcgcatcttccgcatctttgagggcaccaatgacatcctgcggctgtttgtggccctgcagggctgcatggacaagggcaaggagctgagcggcctgggcagcgccctgaagaacccctttggaaatgccggcctgctgctgggggaggccggcaagcagctgcggaggagagctggcctgggcagcggcctgagcctgagcggcctggtgcaccctgagctgagccgcagcggggagctggccgtgcgggccctggagcagtttgccaccgtggtggaggccaagctgatcaagcacaagaagggcatcgtgaatgagcagttcctgctgcagaggctggctgatggagccatcgacctgtatgccatggtggtggtgctgagccgggccagccgcagcctgtctgagggccaccccacagcccagcacgagaagatgctgtgtgacacctggtgcatcgaggccgccgcccgcatccgggagggcatggccgccctgcagagcgacccctggcagcaggagctgtacagaaacttcaagagcatcagcaaggccctggtggagcggggcggcgtggtgaccagcaaccccctgggcttctag

SEQ ID NO: 142462 - DNA, 1902 bp, synthetic construct
  misc_feature 1..1902: note = Description of Artificial Sequence: Synthetic coding sequence
  source 1..1902: mol_type = other DNA
atgcaggccgccaggatggccgccagcctgggccggcagctgctgcggctgggcggcggcagcagccggctgacagccctgctgggccagcccaggcctggccctgcccggcggccctatgccggcggggccgcccaggagagcaagagctttgctgtgggcatgttcaagggccagctgaccacagaccaggtgttcccctaccccagcgtgctgaatgaggagcagacccagttcctgaaggagctggtggagcctgtgagccgcttctttgaggaggtgaatgaccctgccaagaatgatgccctggagatggtggaggagaccacctggcagggcctgaaggagctgggcgccttcggcctgcaggtgcccagcgagctgggcggcgtgggcctgtgcaacacccagtatgcccggctggtggagatcgtgggcatgcatgacctgggcgtgggcatcaccctgggcgcccaccagagcatcggcttcaagggcatcctgctgtttggcaccaaggcccagaaggagaagtacctgcccaagctggccagcggggagaccgtggccgccttctgcctgacagagcccagcagcggcagtgatgctgccagcatccgcaccagcgctgtgcccagcccctgtgggaagtactacaccctgaatggcagcaagctgtggatcagcaatggaggcctggccgacatcttcaccgtgtttgccaagacccctgtgacagatcctgccaccggggctgtgaaggagaagatcacagcctttgtggtggagcggggctttggaggcatcacccacggccccccagagaagaagatgggcatcaaggccagcaacacagctgaggtgttctttgatggagtgcgggtgcccagtgaaaatgtgctgggggaggtgggcagcggcttcaaggtggccatgcacatcctgaacaacggccgcttcggcatggccgccgccctggccggcaccatgaggggcatcatcgccaaggctgtggaccacgccaccaacagaacccagtttggagagaagatccacaactttggcctcatccaggagaagctggccaggatggtgatgctgcagtatgtgacagagagcatggcctacatggtgtctgccaacatggaccagggcgccacagacttccagattgaagctgccatcagcaagatctttggaagtgaagctgcctggaaggtgacagatgagtgcatccagatcatgggcggcatgggcttcatgaaggagcccggggtggagcgggtgctgcgggacctgcgcatcttccgcatctttgagggcaccaatgacatcctgcggctgtttgtggccctgcagggctgcatggacaagggcaaggagctgagcggcctgggcagcgccctgaagaacccctttggaaatgccggcctgctgctgggggaggccggcaagcagctgcggaggagagctggcctgggcagcggcctgagcctgagcggcctggtgcaccctgagctgagccgcagcggggagctggccgtgcgggccctggagcagtttgccaccgtggtggaggccaagctgatcaagcacaagaagggcatcgtgaatgagcagttcctgctgcagaggctggctgatggagccatcgacctgtatgccatggtggtggtgctgagccgggccagccgcagcctgtctgagggccaccccacagcccagcacgagaagatgctgtgtgacacctggtgcatcgaggccgccgcccgcatccgggagggcatggccgccctgcagagcgacccctggcagcaggagctgtacagaaacttcaagagcatcagcaaggccctggtggagcggggcggcgtggtgaccagcaaccccctgggcttctag

SEQ ID NO: 142463 - DNA, 2106 bp, synthetic construct
  misc_feature 1..2106: note = Description of Artificial Sequence: Synthetic coding sequence
  source 1..2106: mol_type = other DNA
atgccccggggcccccagcccagcgctgcccgctgcaccgtggatgatgagagcggcctgggcgcccctggccggggccgggccggccggcagagctgggtgcgggcccgggccagcggggcccggcgggacagcgagatgcaggccgccaggatggccgccagcctgggccggcagctgctgcggctgggcggcggcagcagccggctgacagccctgctgggccagcccaggcctggccctgcccggcggccctatgccggcggggccgcccagctggccctggacaagagtgacagccaccccagtgatgccctgaccaggaagaagccagccaaggccgagagcaagagctttgctgtgggcatgttcaagggccagctgaccacagaccaggtgttcccctaccccagcgtgctgaatgaggagcagacccagttcctgaaggagctggtggagcctgtgagccgcttctttgaggaggtgaatgaccctgccaagaatgatgccctggagatggtggaggagaccacctggcagggcctgaaggagctgggcgccttcggcctgcaggtgcccagcgagctgggcggcgtgggcctgtgcaacacccagtatgcccggctggtggagatcgtgggcatgcatgacctgggcgtgggcatcaccctgggcgcccaccagagcatcggcttcaagggcatcctgctgtttggcaccaaggcccagaaggagaagtacctgcccaagctggccagcggggagaccgtggccgccttctgcctgacagagcccagcagcggcagtgatgctgccagcatccgcaccagcgctgtgcccagcccctgtgggaagtactacaccctgaatggcagcaagctgtggatcagcaatggaggcctggccgacatcttcaccgtgtttgccaagacccctgtgacagatcctgccaccggggctgtgaaggagaagatcacagcctttgtggtggagcggggctttggaggcatcacccacggccccccagagaagaagatgggcatcaaggccagcaacacagctgaggtgttctttgatggagtgcgggtgcccagtgaaaatgtgctgggggaggtgggcagcggcttcaaggtggccatgcacatcctgaacaacggccgcttcggcatggccgccgccctggccggcaccatgaggggcatcatcgccaaggctgtggaccacgccaccaacagaacccagtttggagagaagatccacaactttggcctcatccaggagaagctggccaggatggtgatgctgcagtatgtgacagagagcatggcctacatggtgtctgccaacatggaccagggcgccacagacttccagattgaagctgccatcagcaagatctttggaagtgaagctgcctggaaggtgacagatgagtgcatccagatcatgggcggcatgggcttcatgaaggagcccggggtggagcgggtgctgcgggacctgcgcatcttccgcatctttgagggcaccaatgacatcctgcggctgtttgtggccctgcagggctgcatggacaagggcaaggagctgagcggcctgggcagcgccctgaagaacccctttggaaatgccggcctgctgctgggggaggccggcaagcagctgcggaggagagctggcctgggcagcggcctgagcctgagcggcctggtgcaccctgagctgagccgcagcggggagctggccgtgcgggccctggagcagtttgccaccgtggtggaggccaagctgatcaagcacaagaagggcatcgtgaatgagcagttcctgctgcagaggctggctgatggagccatcgacctgtatgccatggtggtggtgctgagccgggccagccgcagcctgtctgagggccaccccacagcccagcacgagaagatgctgtgtgacacctggtgcatcgaggccgccgcccgcatccgggagggcatggccgccctgcagagcgacccctggcagcaggagctgtacagaaacttcaagagcatcagcaaggccctggtggagcggggcggcgtggtgaccagcaaccccctgggcttctag

SEQ ID NO: 142464 - DNA, 2106 bp, synthetic construct; identical to SEQ ID NO: 142463
  misc_feature 1..2106: note = Description of Artificial Sequence: Synthetic coding sequence
  source 1..2106: mol_type = other DNA

SEQ ID NO: 142465 - DNA, 2037 bp, synthetic construct
  misc_feature 1..2037: note = Description of Artificial Sequence: Synthetic coding sequence
  source 1..2037: mol_type = other DNA
atgctgggcggcctggccgctgctgctggcacccgcatcatgggcaaggagattgaggccgaggcccagaggcccctgcggcagacctggaggcctggccagcccccagccatgacagccaagaccatgagcagccggctgacagccctgctgggccagccccggcccggccctgcccggcggccctatgctgggggcgccgcccagctggccctggacaagagtgacagccaccccagtgatgccctgaccaggaagaagccagccaaggccgagagcaagagctttgctgtgggcatgttcaagggccagctgaccacagaccaggtgttcccctaccccagcgtgctgaatgaggagcagacccagttcctgaaggagctggtggagcctgtgagccgcttctttgaggaggtgaatgaccctgccaagaatgatgccctggagatggtggaggagaccacctggcagggcctgaaggagctgggcgccttcggcctgcaggtgcccagcgagctgggcggcgtgggcctgtgcaacacccagtatgcccggctggtggagatcgtgggcatgcatgacctgggcgtgggcatcaccctgggcgcccaccagagcatcggcttcaagggcatcctgctgtttggcaccaaggcccagaaggagaagtacctgcccaagctggccagcggggagaccgtggccgccttctgcctgacagagcccagcagcggcagtgatgctgccagcatccgcaccagcgctgtgcccagcccctgtgggaagtactacaccctgaatggcagcaagctgtggatcagcaatggaggcctggccgacatcttcaccgtgtttgccaagacccctgtgacagatcctgccactggagctgtgaaggagaagatcacagcctttgtggtggagcggggctttggaggcatcacccacggccccccagagaagaagatgggcatcaaggccagcaacacagctgaggtgttctttgatggagtgcgggtgcccagtgaaaatgtgctgggggaggtgggcagcggcttcaaggtggccatgcacatcctgaacaacggccgcttcggcatggctgctgccctggccggcaccatgaggggcatcatcgccaaggctgtggaccacgccaccaacagaacccagtttggagagaagatccacaactttggcctcatccaggagaagctggccaggatggtgatgctgcagtatgtgacagagagcatggcctacatggtgtctgccaacatggaccagggcgccacagacttccagatcgaggccgccatcagcaagatcttcggcagcgaggccgcctggaaggtgacagatgagtgcatccagatcatgggcggcatgggcttcatgaaggagcccggggtggagcgggtgctgcgggacctgcgcatcttccgcatctttgagggcaccaatgacatcctgcggctgtttgtggccctgcagggctgcatggacaagggcaaggagctgagcggcctgggcagcgccctgaagaacccctttggaaatgccggcctgctgctgggggaggccggcaagcagctgcggcggcgggccggcctgggcagcggcctgagcctgagcggcctggtgcaccctgagctgagccgctctggagagctggccgtgcgggccctggagcagtttgccaccgtggtggaggccaagctgatcaagcacaagaagggcatcgtgaatgagcagttcctgctgcagaggctggctgatggagccatcgacctgtatgccatggtggtggtgctgagccgggccagccgcagcctgtctgagggccaccccacagcccagcacgagaagatgctgtgtgacacctggtgcattgaagctgctgcccgcatccgggagggcatggccgccctgcagagcgacccctggcagcaggagctgtacagaaacttcaagagcatcagcaaggccctggtggagcggggcggcgtggtgaccagcaaccccctgggcttctag

SEQ ID NO: 142466 - DNA, 1983 bp, synthetic construct
  misc_feature 1..1983: note = Description of Artificial Sequence: Synthetic coding sequence
  source 1..1983: mol_type = other DNA
atgaacccagacctgcggcgggagcgggacagcgccagcttcaaccctgagctgctgacccacatcctggatggcagccctgagaagaccaggagaagaagagaaattgagaacatgatcctgaatgaccctgacttccagcacgaggacctgaacttcctgaccaggagccagagatatgaggtggccgtgaggaagagcgccatcatggtgaagaagatgagggagtttggaattgctgaccctgatgagatcatgtggttcaagaactttgtgcaccggggccggcctgagcccctggacctgcacctgggcatgttcctgcccaccctgctgcaccaggccacagctgagcagcaggagcgcttcttcatgcctgcctggaacctggagatcatcggcacctacgcccagacagagatgggccacggcacccacctgcggggcctggagaccacagccacctatgaccctgagacccaggagttcatcctgaacagccccaccgtgaccagcatcaagtggtggccaggcggcctgggcaagaccagcaaccacgccatcgtgctggcccagctgatcaccaagggcaagtgctacggcctgcacgccttcatcgtgcccatccgggagatcggcacccacaagcccctgcccggcatcaccgtgggggacatcggccccaagtttggctatgatgaaattgacaatggctacctgaagatggacaaccaccgcatcccccgggagaacatgctgatgaagtatgcccaggtgaagccagatggcacctacgtgaagcccctgagcaacaagctgacctacggcaccatggtgtttgtgcgctccttcctggtgggggaggccgcccgggccctgagcaaggcctgcaccatcgccatccgctacagcgctgtgcgccaccagagcgagatcaagccaggagagcctgagccccagatcctggacttccagacccagcagtacaagctgttccccctgctggccacagcctatgccttccagtttgtgggcgcctacatgaaggagacctaccaccgcatcaatgaaggaattggccagggcgacctgtctgagctgcctgagctgcacgccctgacagctggcctgaaggccttcacctcctggacagccaacacaggaattgaggcctgcaggatggcctgtggcggccacggctacagccactgcagcggcctgcccaacatctacgtgaacttcacccccagctgcacctttgaaggagaaaatacagtgatgatgctgcagacagcccgcttcctgatgaagagctatgaccaggtgcacagcggcaagctggtgtgtggcatggtgtcctacctgaatgacctgcccagccagaggatccagccccagcaggtggccgtgtggcccaccatggtggacatcaacagccctgagagcctgacagaggcctacaagctgcgggccgcccggctggtggagattgctgccaagaacctgcagaaggaggtgatccacaggaagagcaaggaggtggcctggaacctgacctctgtggacctggtgcgggccagcgaggcccactgccactacgtggtggtgaagctgttcagcgagaagctgctgaagatccaggacaaggccatccaggccgtgctgcggagcctgtgcctgctgtacagcctgtatggcatcagccagaatgctggggacttcctgcagggcagcatcatgacagagccccagatcacccaggtgaaccagagggtgaaggagctgctgaccctcatccgcagtgatgctgtggccctggtggatgcctttgacttccaggatgtgaccctgggctctgtgctgggccgctatgatggaaatgtgtatgagaacctgtttgagtgggccaagaacagccccctgaacaaggccgaggtgcatgagagctacaagcacctgaagagcctgcagagcaagctgtag

SEQ ID NO: 142467 - DNA, 1983 bp, synthetic construct
  misc_feature 1..1983: note = Description of Artificial Sequence: Synthetic coding sequence
  source 1..1983: mol_type = other DNA
atgaacccagacctgcggcgggagcgggacagcgccagcttcaaccctgagctgctgacccacatcctggatggcagccctgagaagaccaggagaagaagagaaattgagaacatgatcctgaatgaccctgacttccagcacgaggacctgaacttcctgaccaggagccagagatatgaggtggccgtgaggaagagcgccatcatggtgaagaagatgagggagtttggaattgctgaccctgatgagatcatgtggttcaagaagctgcacctggtgaactttgtggagcctgtgggcctgaactacagcatgttcatccccaccctgctgaaccagggcaccacagcccagaaggagaagtggctgctgagcagcaagggcctgcagatcatcggcacctacgcccagacagagatgggccacggcacccacctgcggggcctggagaccacagccacctatgaccctgagacccaggagttcatcctgaacagccccaccgtgaccagcatcaagtggtggccaggcggcctgggcaagaccagcaaccacgccatcgtgctggcccagctgatcaccaagggcaagtgctacggcctgcacgccttcatcgtgcccatccgggagatcggcacccacaagcccctgcccggcatcaccgtgggggacatcggccccaagtttggctatgatgaaattgacaatggctacctgaagatggacaaccaccgcatcccccgggagaacatgctgatgaagtatgcccaggtgaagccagatggcacctacgtgaagcccctgagcaacaagctgacctacggcaccatggtgtttgtgcgctccttcctggtgggggaggccgcccgggccctgagcaaggcctgcaccatcgccatccgctacagcgctgtgcgccaccagagcgagatcaagccaggagagcctgagccccagatcctggacttccagacccagcagtacaagctgttccccctgctggccacagcctatgccttccagtttgtgggcgcctacatgaaggagacctaccaccgcatcaatgaaggaattggccagggcgacctgtctgagctgcctgagctgcacgccctgacagctggcctgaaggccttcacctcctggacagccaacacaggaattgaggcctgcaggatggcctgtggcggccacggctacagccactgcagcggcctgcccaacatctacgtgaacttcacccccagctgcacctttgaaggagaaaatacagtgatgatgctgcagacagcccgcttcctgatgaagagctatgaccaggtgcacagcggcaagctggtgtgtggcatggtgtcctacctgaatgacctgcccagccagaggatccagccccagcaggtggccgtgtggcccaccatggtggacatcaacagccctgagagcctgacagaggcctacaagctgcgggccgcccggctggtggagattgctgccaagaacctgcagaaggaggtgatccacaggaagagcaaggaggtggcctggaacctgacctctgtggacctggtgcgggccagcgaggcccactgccactacgtggtggtgaagctgttcagcgagaagctgctgaagatccaggacaaggccatccaggccgtgctgcggagcctgtgcctgctgtacagcctgtatggcatcagccagaatgctggggacttcctgcagggcagcatcatgacagagccccagatcacccaggtgaaccagagggtgaaggagctgctgaccctcatccgcagtgatgctgtggccctggtggatgcctttgacttccaggatgtgaccctgggctctgtgctgggccgctatgatggaaatgtgtatgagaacctgtttgagtgggccaagaacagccccctgaacaaggccgaggtgcatgagagctacaagcacctgaagagcctgcagagcaagctgtag

SEQ ID NO: 142468 - DNA, 1869 bp, synthetic construct
  misc_feature 1..1869: note = Description of Artificial Sequence: Synthetic coding sequence
  source 1..1869: mol_type = other DNA
atgatcctgaatgaccctgacttccagcacgaggacctgaacttcctgaccaggagccagagatatgaggtggccgtgaggaagagcgccatcatggtgaagaagatgagggagtttggaattgctgaccctgatgagatcatgtggttcaagaactttgtgcaccggggccggcctgagcccctggacctgcacctgggcatgttcctgcccaccctgctgcaccaggccacagctgagcagcaggagcgcttcttcatgcctgcctggaacctggagatcatcggcacctacgcccagacagagatgggccacggcacccacctgcggggcctggagaccacagccacctatgaccctgagacccaggagttcatcctgaacagccccaccgtgaccagcatcaagtggtggccaggcggcctgggcaagaccagcaaccacgccatcgtgctggcccagctgatcaccaagggcaagtgctacggcctgcacgccttcatcgtgcccatccgggagatcggcacccacaagcccctgcccggcatcaccgtgggggacatcggccccaagtttggctatgatgaaattgacaatggctacctgaagatggacaaccaccgcatcccccgggagaacatgctgatgaagtatgcccaggtgaagccagatggcacctacgtgaagcccctgagcaacaagctgacctacggcaccatggtgtttgtgcgctccttcctggtgggggaggccgcccgggccctgagcaaggcctgcaccatcgccatccgctacagcgctgtgcgccaccagagcgagatcaagccaggagagcctgagccccagatcctggacttccagacccagcagtacaagctgttccccctgctggccacagcctatgccttccagtttgtgggcgcctacatgaaggagacctaccaccgcatcaatgaaggaattggccagggcgacctgtctgagctgcctgagctgcacgccctgacagctggcctgaaggccttcacctcctggacagccaacacaggaattgaggcctgcaggatggcctgtggcggccacggctacagccactgcagcggcctgcccaacatctacgtgaacttcacccccagctgcacctttgaaggagaaaatacagtgatgatgctgcagacagcccgcttcctgatgaagagctatgaccaggtgcacagcggcaagctggtgtgtggcatggtgtcctacctgaatgacctgcccagccagaggatccagccccagcaggtggccgtgtggcccaccatggtggacatcaacagccctgagagcctgacagaggcctacaagctgcgggccgcccggctggtggagattgctgccaagaacctgcagaaggaggtgatccacaggaagagcaaggaggtggcctggaacctgacctctgtggacctggtgcgggccagcgaggcccactgccactacgtggtggtgaagctgttcagcgagaagctgctgaagatccaggacaaggccatccaggccgtgctgcggagcctgtgcctgctgtacagcctgtatggcatcagccagaatgctggggacttcctgcagggcagcatcatgacagagccccagatcacccaggtgaaccagagggtgaaggagctgctgaccctcatccgcagtgatgctgtggccctggtggatgcctttgacttccaggatgtgaccctgggctctgtgctgggccgctatgatggaaatgtgtatgagaacctgtttgagtgggccaagaacagccccctgaacaaggccgaggtgcatgagagctacaagcacctgaagagcctgcagagcaagctgtag

SEQ ID NO: 142469 - DNA, 1779 bp, synthetic construct
  misc_feature 1..1779: note = Description of Artificial Sequence: Synthetic coding sequence
  source 1..1779: mol_type = other DNA
atggccgccttcatccagaggaccccagacaactggcacctgcggccagatggaaatggccccaggtttgtgcaccggggccggcctgagcccctggacctgcacctgggcatgttcctgcccaccctgctgcaccaggccacagctgagcagcaggagcgcttcttcatgcctgcctggaacctggagatcatcggcacctacgcccagacagagatgggccacggcacccacctgcggggcctggagaccacagccacctatgaccctgagacccaggagttcatcctgaacagccccaccgtgaccagcatcaagtggtggccaggcggcctgggcaagaccagcaaccacgccatcgtgctggcccagctgatcaccaagggcaagtgctacggcctgcacgccttcatcgtgcccatccgggagatcggcacccacaagcccctgcccggcatcaccgtgggggacatcggccccaagtttggctatgatgaaattgacaatggctacctgaagatggacaaccaccgcatcccccgggagaacatgctgatgaagtatgcccaggtgaagccagatggcacctacgtgaagcccctgagcaacaagctgacctacggcaccatggtgtttgtgcgctccttcctggtgggggaggccgcccgggccctgagcaaggcctgcaccatcgccatccgctacagcgctgtgcgccaccagagcgagatcaagccaggagagcctgagccccagatcctggacttccagacccagcagtacaagctgttccccctgctggccacagcctatgccttccagtttgtgggcgcctacatgaaggagacctaccaccgcatcaatgaaggaattggccagggcgacctgtctgagctgcctgagctgcacgccctgacagctggcctgaaggccttcacctcctggacagccaacacaggaattgaggcctgcaggatggcctgtggcggccacggctacagccactgcagcggcctgcccaacatctacgtgaacttcacccccagctgcacctttgaaggagaaaatacagtgatgatgctgcagacagcccgcttcctgatgaagagctatgaccaggtgcacagcggcaagctggtgtgtggcatggtgtcctacctgaatgacctgcccagccagaggatccagccccagcaggtggccgtgtggcccaccatggtggacatcaacagccctgagagcctgacagaggcctacaagctgcgggccgcccggctggtggagattgctgccaagaacctgcagaaggaggtgatccacaggaagagcaaggaggtggcctggaacctgacctctgtggacctggtgcgggccagcgaggcccactgccactacgtggtggtgaagctgttcagcgagaagctgctgaagatccaggacaaggccatccaggccgtgctgcggagcctgtgcctgctgtacagcctgtatggcatcagccagaatgctggggacttcctgcagggcagcatcatgacagagccccagatcacccaggtgaaccagagggtgaaggagctgctgaccctcatccgcagtgatgctgtggccctggtggatgcctttgacttccaggatgtgaccctgggctctgtgctgggccgctatgatggaaatgtgtatgagaacctgtttgagtgggccaagaacagccccctgaacaaggccgaggtgcatgagagctacaagcacctgaagagcctgcagagcaagctgtag

SEQ ID NO: 142470 - DNA, 1983 bp, synthetic construct; identical to SEQ ID NO: 142466
  misc_feature 1..1983: note = Description of Artificial Sequence: Synthetic coding sequence
  source 1..1983: mol_type = other DNA

SEQ ID NO: 142471 - DNA, 2046 bp, synthetic construct
  misc_feature 1..2046: note = Description of Artificial Sequence: Synthetic coding sequence
  source 1..2046: mol_type = other DNA
atgggcagccctgtgcaccgggtgtccctgggggacacctggagccggcagatgcacccagacatcgagagcgagcgctacatgcagagctttgatgtggagcggctgaccaacatcctggatggaggagcccagaacacagccctgcggaggaaggtggagagcatcatccacagctacccagagttcagctgcaaggacaactacttcatgacccagaatgaaagatacaaggccgccatgaggcgggccttccacatccgcctcatcgcccggcggctgggctggctggaggatggccgggagctgggctacgcctaccgggccctgtctggagatgtggccctgaacatccaccgggtgtttgtgcgggccctgcggagcctgggcagcgaggagcagatcgccaagtgggaccccctgtgcaagaacatccagatcatcgccacctacgcccagacagagctgggccacggcacctacctgcagggcctggagacagaggccacctatgatgctgccacccaggagtttgtgatccacagccccaccctgacagccaccaagtggtggccaggggacctgggccgcagcgccacccacgccctggtgcaggcccagctgatctgcagcggggcccggcggggcatgcacgccttcatcgtgcccatccgcagcctgcaggaccacacccccctgcccggcatcatcatcggggacatcggccccaagatggactttgaccagacagacaatggcttcctgcagctgaaccacgtgcgggtgccccgggagaacatgctgagcagatttgcccaggtgctgcctgatggcacctacgtgaagctgggcacagcccagagcaactacctgcccatggtggtggtgcgggtggagctgctgagcggggagatcctgcccatcctgcagaaggcctgtgtgattgccatgagatacagcgtcatccggcggcagagccggctgcggcccagcgaccctgaggccaaggtgctggactaccagacccagcagcagaagctgttcccccagctggccatctcctatgccttccacttcctggccgtgtccctgctggagttcttccagcacagctacacagccatcctgaaccaggacttctccttcctgcctgagctgcacgccctgagcacaggcatgaaggccatgatgtctgagttctgcacccagggcgctgagatgtgcagaagagcctgtggcggccacggctacagcaagctgagcggcctgcccagcctggtgaccaagctgagcgccagctgcacctatgaaggagaaaatacagtgctgtacctgcaggtggcccgcttcctggtgaagagctacctgcagacccagatgagccctggcagcaccccccagaggagcctgagccccagcgtggcctacctgacagccccagacctggcccgctgcccagcccagagagctgctgacttcctgtgcccagagctgtacaccacagcctgggcccacgtggccgtgcggctcatcaaggacagcgtgcagcacctgcagaccctgacccagagcggggctgaccagcacgaggcctggaaccagaccaccgtcatccacctgcaggccgccaaggtgcactgctactacgtgacagtgaagggcttcacagaggccctggagaagctggagaatgagcccgccatccagcaggtgctgaagaggctgtgtgacctgcacgccatccacggcatcctgaccaacagcggggacttcctgcatgatgccttcctgagcggggcccaggtggacatggccaggacagcctacctggacctgctgcggctcatcaggaaggatgccatcctgctgacagatgcctttgacttcacagaccagtgcctgaacagcgccctgggctgctatgatggaaatgtgtatgaaagactcttccagtgggcccagaagagccccaccaacacccaggagaacccagcctatgaggagtacatccggcccctgctgcagagctggaggagcaagctgtag

SEQ ID NO: 142472 - DNA, 516 bp, synthetic construct
  misc_feature 1..516: note = Description of Artificial Sequence: Synthetic coding sequence
  source 1..516: mol_type = other DNA
atgggcagccctgtgcaccgggtgtccctgggggacacctggagccggcagatgcacccagacatcgagagcgagcgctacatgcagagctttgatgtggagcggctgaccaacatcctggatggaggagcccagaacacagccctgcggaggaaggtggagagcatcatccacagctacccagagttcagctgcaaggacaactacttcatgacccagaatgaaagatacaaggccgccatgaggcgggccttccacatccgcctcatcgcccggcggctgggctggctggaggatggccgggagctgggctacgcctaccgggccctgtctggagatgtggccctgaacatccaccgggtgtttgtgcgggccctgcggagcctgggcagcgaggagcagatcgccaagtgggaccccctgtgcaagaacatccagatcatcgccacctacgcccagacagagctgggccacggcacctacctgcagggcctggagacagaggccacctactag

SEQ ID NO: 142473 - DNA, 2103 bp, synthetic construct
  misc_feature 1..2103: note = Description of Artificial Sequence: Synthetic coding sequence
  source 1..2103: mol_type = other DNA
atggccagcacagtggagggcggggacacagccctgctgcctgagttcccccggggccccctggatgcctaccgggcccgggccagcttctcctggaaggagctggccctcttcacagaaggagagggcatgctgcgcttcaagaagaccatcttcagcgccctggagaatgaccccctgtttgcccggagccctggagctgacctgagcctggagaagtaccgggagctgaacttcctgcgctgcaagaggatctttgaatatgacttcctgtctgtggaggacatgttcaagagccccctgaaggtgcctgccctgatccagtgcctgggcatgtatgacagcagcctggccgccaagtacctgctgcacagcctggtgtttggcagcgctgtgtacagcagcggcagcgagcggcacctgacctacatccagaagatcttcaggatggagatcttcggctgctttgccctgacagagctgagccacggcagcaacaccaaggccatccgcaccacagcccactatgaccctgccacagaggagttcatcatccacagcccagactttgaggccgccaagttctgggtgggcaacatgggcaagacagccacccatgctgtggtgtttgccaagctgtgtgtgcctggggaccagtgccacggcctgcaccccttcatcgtgcagatccgggaccccaagaccctgctgcccatgcctggggtgatggtgggggacatcggcaagaagctgggccagaatggcctggacaatggatttgccatgttccacaaggtgcgggtgccccggcagagcctgctgaacaggatgggagatgtgaccccagagggcacctacgtgagccccttcaaggatgtgcggcagagatttggagccagcctgggcagcctgagcagcggccgggtgtccatcgtgtccctggccatcctgaacctgaagctggccgtggccatcgccctgcgcttcagcgccacccggcggcagtttggccccacagaggaggaggagatccctgtgctggagtaccccatgcagcagtggaggctgctgccctacctggccgctgtgtatgccctggaccacttcagcaagagcctcttcctggacctggtggagctgcagaggggcctggccagcggggacagaagtgcccggcaggccgagctgggccgggagatccacgccctggccagcgccagcaagcccctggcctcctggaccacccagcagggcatccaggagtgccgggaggcctgtggcggccacggctacctggccatgaaccggctgggcgtgctgagagatgacaatgaccccaactgcacctatgaaggagacaacaacatcctgctgcagcagaccagcaactacctgctgggcctgctggcccaccaggtgcatgatggagcctgcttccgcagccccctgaagtctgtggacttcctggatgcctacccaggcatcctggaccagaagtttgaggtgtcctctgtggccgactgcctggacagcgctgtggccctggccgcctacaagtggctggtgtgctacctgctgcgggagacctaccagaagctgaaccaggagaagaggagcggcagcagtgactttgaggccaggaacaagtgccaggtgagccacggccggcccctggccctggcctttgtggagctgactgtggtgcagcgcttccacgagcacgtgcaccagcccagcgtgccccccagcctgcgggctgtgctgggccgcctgagcgccctgtatgccctgtggagcctgagcagacatgctgccctgctgtaccggggcggctacttcagcggggagcaggccggggaggtgctggagagcgctgtgctggccctgtgcagccagctgaaggatgatgctgtggccctggtggatgtgattgcccccccagactttgtgctggacagccccatcggccgggcagatggagagctgtacaagaacctgtggggcgctgtgctgcaggagagcaaggtgctggagcgggcctcctggtggccagagttctctgtgaacaagcctgtgattggcagcctgaagagcaagctgtag

SEQ ID NO: 142474 - DNA, 1875 bp, synthetic construct
  misc_feature 1..1875: note = Description of Artificial Sequence: Synthetic coding sequence
  source 1..1875: mol_type = other DNA
atggccagcacagtggagggcggggacacagccctgctgcctgagttcccccggggccccctggatgcctaccgggcccgggccagcttctcctggaaggagctggccctcttcacagaaggagagggcatgctgcgcttcaagaagaccatcttcagcgccctggagaatgaccccctgtttgcccggagccctggagctgacctgagcctggagaagtaccgggagctgaacttcctgcgctgcaagaggatctttgaatatgacttcctgtctgtggaggacatgttcaagagccccctgaaggtgcctgccctgatccagtgcctgggcatgtatgacagcagcctggccgccaagtacctgctgcacagcctggtgtttggcagcgctgtgtacagcagcggcagcgagcggcacctgacctacatccagaagatcttcaggatggagatcttcggctgctttgccctgacagagctgagccacggcagcaacaccaaggccatccgcaccacagcccactatgaccctgccacagaggagttcatcatccacagcccagactttgaggccgccaagttctgggtgggcaacatgggcaagacagccacccatgctgtggtgtttgccaagctgtgtgtgcctggggaccagtgccacggcctgcaccccttcatcgtgcagatccgggaccccaagaccctgctgcccatgcctggggtgatggtgggggacatcggcaagaagctgggccagaatggcctggacaatggatttgccatgttccacaaggtgcgggtgccccggcagagcctgctgaacaggatgggagatgtgaccccagagggcacctacgtgagccccttcaaggatgtgcggcagagatttggagccagcctgggcagcctgagcagcggccgggtgtccatcgtgtccctggccatcctgaacctgaagctggccgtggccatcgccctgcgcttcagcgccacccggcggcagtttggccccacagaggaggaggagatccctgtgctggagtaccccatgcagcagtggaggctgctgccctacctggccgctgtgtatgccctggaccacttcagcaagagcctcttcctggacctggtggagctgcagaggggcctggccagcggggacagaagtgcccggcaggccgagctgggccgggagatccacgccctggccagcgccagcaagcccctggcctcctggaccacccagcagggcatccaggagtgccgggaggcctgtggcggccacggctacctggccatgaaccggctgggcgtgctgagagatgacaatgaccccaactgcacctatgaaggagacaacaacatcctgctgcagcagaccagcaactacctgctgggcctgctggcccaccaggtgcatgatggagcctgcttccgcagccccctgaagtctgtggacttcctggatgcctacccaggcatcctggaccagaagtttgaggtgtcctctgtggccgactgcctggacagcgctgtggccctggccgcctacaagtggctggtgtgctacctgctgcgggagacctaccagaagctgaaccaggagaagaggagcggcagcagtgactttgaggccaggaacaagtgccaggtgagccacggccggcccctggccctggcctttgtggagctgactgtggtgcagcgcttccacgagcacgtgcaccagcccagcgtgccccccagcctgcgggctgtgctgggccgcctgagcgccctgtatgccctgtggagcctgagcagacatgctgccctgctgtacagagctgagcggcgctgcagctgccctggaagaagagacaggagcagctag

SEQ ID NO: 142475 - DNA, 2103 bp, synthetic construct; identical to SEQ ID NO: 142473
  misc_feature 1..2103: note = Description of Artificial Sequence: Synthetic coding sequence
  source 1..2103: mol_type = other DNA

SEQ ID NO: 142476 - DNA, 2175 bp, synthetic construct
  misc_feature 1..2175: note = Description of Artificial Sequence: Synthetic coding sequence
  source 1..2175: mol_type = other DNA
atgcccagaaattctggagctggctacggctgcccccatggagaccccagcatgctggacagccgggagaccccccaggagagccggcaggacatgattgtgaggaccacccaggagaagctgaagaccagcagcctgacagaccggcagcccctgagcaaggagagcctgaaccacgccctggagctgtctgtgcctgagaaggtgaacaatgcccagtgggatgcccctgaggaggccctgtggaccaccagggcagatggccgggtgcggctgagaattgaccccagctgcccccagctgccctacacagtgcacaggatgttttatgaggccctggacaagtacggggacctgattgccctgggcttcaagaggcaggacaagtgggagcacatctcctacagccagtactacctgctggccaggagagctgccaagggcttcctgaagctgggcctgaagcaggcccacagcgtggccatcctgggcttcaacagccctgagtggttcttctctgctgtgggcaccgtgtttgctgggggcatcgtgacaggcatctacaccaccagcagccctgaggcctgccagtacatcgcctatgactgctgtgccaacgtcatcatggtggacacccagaagcagctggagaagatcctgaagatctggaagcagctgccccacctgaaggctgtggtgatctacaaggagcccccacccaacaagatggccaacgtgtacaccatggaggagttcatggagctgggcaatgaggtgcctgaggaggccctggatgccatcatcgacacccagcagcccaaccagtgctgcgtgctggtgtacaccagcggcaccaccggcaaccccaagggcgtgatgctgagccaggacaacatcacctggacagcccgctatggcagccaggccggggacatccggcctgctgaggtgcagcaggaggtggtggtgtcctacctgcccctgagccacatcgccgcccagatctatgacctgtggacaggcatccagtggggcgcccaggtgtgctttgctgagccagatgccctgaagggcagcctggtgaacaccctgcgggaggtggagcccaccagccacatgggcgtgccccgggtgtgggagaagatcatggagcgcatccaggaggtggccgcccagagcggcttcatccggaggaagatgctgctgtgggccatgtctgtgaccctggagcagaacctgacctgccccggcagtgacctgaagcccttcaccacccggctggccgactacctggtgctggccaaggtgcggcaggccctgggctttgccaagtgccagaagaacttctacggggccgcccccatgatggccgagacccagcacttcttcctgggcctgaacatccggctgtatgccggctacggcctgtctgagaccagcggcccccacttcatgagcagcccctacaactaccgcctgtacagcagcggcaagctggtgcccggctgccgggtgaagctggtgaaccaggatgctgagggcattggagagatctgcctgtggggccgcaccatcttcatgggctacctgaacatggaggacaagacctgtgaggccattgatgaggagggctggctgcacactggagatgctggccgcctggatgctgatggcttcctgtacatcaccggccgcctgaaggagctgatcatcacagctggaggagaaaatgtgccccctgtgcccatcgaggaggccgtgaagatggagctgcccatcatcagcaatgccatgctgattggagaccagaggaagttcctgtccatgctgctgaccctgaagtgcaccctggaccctgacaccagtgaccagacagacaacctgacagagcaggccatggagttctgccagagggtgggcagccgggccaccaccgtgtctgagatcatcgagaagaaggatgaggccgtgtaccaggccatcgaggagggcatccggcgggtgaacatgaatgctgctgcccggccctaccacatccagaagtgggccatcctggagcgggacttcagcatcagcggcggggagctgggccccaccatgaagctgaagaggctgactgtgctggagaagtacaagggcatcatcgacagcttctaccaggagcagaagatgtag

SEQ ID NO: 142477 - DNA, 1449 bp, synthetic construct
  misc_feature 1..1449: note = Description of Artificial Sequence: Synthetic coding sequence
  source 1..1449: mol_type = other DNA
atggccaacgtgtacaccatggaggagttcatggagctgggcaatgaggtgcctgaggaggccctggatgccatcatcgacacccagcagcccaaccagtgctgcgtgctggtgtacaccagcggcaccaccggcaaccccaagggcgtgatgctgagccaggacaacatcacctggacagcccgctatggcagccaggccggggacatccggcctgctgaggtgcagcaggaggtggtggtgtcctacctgcccctgagccacatcgccgcccagatctatgacctgtggacaggcatccagtggggcgcccaggtgtgctttgctgagccagatgccctgaagggcagcctggtgaacaccctgcgggaggtggagcccaccagccacatgggcgtgccccgggtgtgggagaagatcatggagcgcatccaggaggtggccgcccagagcggcttcatccggaggaagatgctgctgtgggccatgtctgtgaccctggagcagaacctgacctgccccggcagtgacctgaagcccttcaccacccggctggccgactacctggtgctggccaaggtgcggcaggccctgggctttgccaagtgccagaagaacttctacggggccgcccccatgatggccgagacccagcacttcttcctgggcctgaacatccggctgtatgccggctacggcctgtctgagaccagcggcccccacttcatgagcagcccctacaactaccgcctgtacagcagcggcaagctggtgcccggctgccgggtgaagctggtgaaccaggatgctgagggcattggagagatctgcctgtggggccgcaccatcttcatgggctacctgaacatggaggacaagacctgtgaggccattgatgaggagggctggctgcacactggagatgctggccgcctggatgctgatggcttcctgtacatcaccggccgcctgaaggagctgatcatcacagctggaggagaaaatgtgccccctgtgcccatcgaggaggccgtgaagatggagctgcccatcatcagcaatgccatgctgattggagaccagaggaagttcctgtccatgctgctgaccctgaagtgcaccctggaccctgacaccagtgaccagacagacaacctgacagagcaggccatggagttctgccagagggtgggcagccgggccaccaccgtgtctgagatcatcgagaagaaggatgaggccgtgtaccaggccatcgaggagggcatccggcgggtgaacatgaatgctgctgcccggccctaccacatccagaagtgggccatcctggagcgggacttcagcatcagcggcggggagctgggccccaccatgaagctgaagaggctgactgtgctggagaagtacaagggcatcatcgacagcttctaccaggagcagaagatgtag

SEQ ID NO: 142478 - DNA, 2001 bp, synthetic construct
  misc_feature 1..2001: note = Description of Artificial Sequence: Synthetic coding sequence
  source 1..2001: mol_type = other DNA
atgacaggcacccccaagacccaggagggcgccaaggacctggaggtggacatgaacaagacagaggtgaccccccggctgtggaccacctgcagagatggagaggtgctgctgcggctgagcaagcacggccctggccacgagacccccatgaccatccctgagttcttccgggagagcgtgaaccgcttcggcacctacccagccctggccagcaagaatggcaagaagtgggagatcctgaacttcaaccagtactatgaggcctgcaggaaggccgccaagagcctcatcaagctgggcctggagcgcttccacggcgtgggcatcctgggcttcaacagcgctgagtggttcatcacagctgtgggcgccatcctggccggcggcctgtgtgtgggcatctatgccaccaacagcgctgaggtgtgccagtatgtgatcacccacgccaaggtgaacatcctgctggtggagaatgaccagcagctgcagaagatcctgagcatcccccagagcagcctggagcccctgaaggccatcatccagtaccgcctgcccatgaagaagaacaacaacctgtacagctgggatgacttcatggagctgggccgcagcatcccagacacccagctggagcaggtgattgagagccagaaggccaaccagtgtgctgtgctgatctacaccagcggcaccaccggcatccccaagggcgtgatgctgagccatgacaacatcacctggattgctggagctgtgaccaaggacttcaagctgacagacaagcatgagaccgtggtgtcctacctgcccctgagccacatcgccgcccagatgatggacatctgggtgcccatcaagattggagccctgacctactttgcccaggctgatgccctgaagggcaccctggtgtccaccctgaaggaggtgaagcccaccgtcttcatcggcgtgccccagatctgggagaagatccacgagatggtgaagaagaacagcgccaagtccatgggcctgaagaagaaggcctttgtgtgggccaggaacatcggcttcaaggtgaacagcaagaagatgctgggcaagtacaacacccctgtgtcctacaggatggccaagaccctggtgttcagcaaggtgaagaccagcctgggcctggaccactgccacagcttcatcagcggcacagcccccctgaaccaggagacagctgagttcttcctgagcctggacatccccatcggggagctgtatggcctgtctgagagcagcggcccccacaccatcagcaaccagaacaactaccgcctgctgagctgtgggaagatcctgaccggctgcaagaacatgctgttccagcagaacaaggatggcattggagagatctgcctgtggggccgccacatcttcatgggctacctggagagcgagacagagaccacagaggccattgatgatgagggctggctgcacagcggggacctgggccagctggatggcctgggcttcctgtatgtgacaggccacatcaaggagatcctgatcacagctggaggagaaaatgtgccccccatccctgtggagaccctggtgaagaagaagatccccatcatcagcaatgccatgctggtgggggacaagctgaagttcctgtccatgctgctgaccctgaagtgtgagatgaaccagatgtctggagagcccctggacaagctgaactttgaggccatcaacttctgccggggcctgggcagccaggccagcacagtgacagaaattgtgaagcagcaggaccccctggtgtacaaggccatccagcagggcatcaatgctgtgaaccaggaggccatgaacaatgcccagagaattgagaagtgggtgatcctggagaaggacttcagcatctacggcggggagctgggccccatgatgaagctgaagaggcactttgtggcccagaagtacaagaagcagattgaccacatgtaccactag

SEQ ID NO: 142479 - DNA, 1848 bp, synthetic construct
  misc_feature 1..1848: note = Description of Artificial Sequence: Synthetic coding sequence
  source 1..1848: mol_type = other DNA
atggctgtgtatgtgggcatgctgcggctgggccgcctgtgtgccggcagcagcggcgtgctgggcgcccgggccgccctgagccgctcctggcaggaggcccggctgcagggcgtgcgcttcctgagcagccgggaggtggacaggatggtgtccacccccatcggcggcctgtcctatgtgcagggctgcaccaagaagcacctgaacagcaagacagtgggccagtgcctggagaccacagcccagagggtgcctgagcgggaggccctggtggtgctgcatgaagatgtgcggctgacctttgcccagctgaaggaggaggtggacaaggccgccagcggcctgctgagcatcggcctgtgcaagggggaccggctgggcatgtggggccccaacagctatgcctgggtgctgatgcagctggccacagcccaggccggcatcatcctggtgtctgtgaacccagcctaccaggccatggagctggagtatgtgctgaagaaggtgggctgcaaggccctggtgttccccaagcagttcaagacccagcagtactacaacgtgctgaagcagatctgcccagaggtggagaatgcccagcccggggccctgaagagccagaggctgcctgacctgaccaccgtcatctctgtggatgcccccctgcccggcaccctgctgctggatgaggtggtggccgccggcagcacccggcagcacctggaccagctgcagtacaaccagcagttcctgagctgccacgaccccatcaacatccagttcaccagcggcaccaccggcagccccaagggggccaccctgagccactacaacatcgtgaacaacagcaacatcctgggggagcggctgaagctgcacgagaagaccccagagcagctgaggatgatcctgcccaaccccctgtaccactgcctgggctctgtggccggcaccatgatgtgcctgatgtatggagccaccctcatcctggccagccccatcttcaacgggaagaaggccctggaggccatcagccgggagcggggcaccttcctgtatggcacccccaccatgtttgtggacatcctgaaccagcctgacttcagcagctatgacatcagcaccatgtgtggcggcgtgattgctggcagccctgcccctcctgagctgatccgggccatcatcaacaagatcaacatgaaggacctggtggtggcctacggcaccacagagaacagccctgtgacctttgcccacttcccagaagatactgtggagcagaaggccgagagcgtgggccgcatcatgccccacacagaggcccgcatcatgaacatggaggccggcaccctggccaagctgaacaccccaggagagctgtgcatccggggctactgtgtgatgctgggctactggggcgagccccagaagacagaggaggccgtggaccaggacaagtggtactggacaggagatgtggccaccatgaatgagcagggcttctgcaagatcgtgggccgcagcaaggacatgatcatccggggcggggagaacatctacccagctgagctggaggacttcttccacacccaccccaaggtgcaggaggtgcaggtggtgggcgtgaaggatgacaggatgggagaggagatctgtgcctgcatccggctgaaggatggagaggagaccaccgtggaggagatcaaggccttctgcaagggcaagatcagccacttcaagatccccaagtacatcgtgtttgtgaccaactaccccctgaccatcagcggcaagatccagaagttcaagctgcgggagcagatggagcggcacctgaacctgtag

SEQ ID NO: 142480 - DNA, 1923 bp, synthetic construct
  misc_feature 1..1923: note = Description of Artificial Sequence: Synthetic coding sequence
  source 1..1923: mol_type = other DNA
atggctgtgtatgtgggcatgctgcggctgggccgcctgtgtgccggcagcagcggcgtgctgggcgcccgggccgccctgagccgctcctggcaggaggcccggctgcagggcgtgcgcttcctgagcgcccggggcggcatggaggccggccggcagaggatctctgtgcccagcagcttcaccgccagcgctgctgcccacagccgggaggtggacaggatggtgtccacccccatcggcggcctgtcctatgtgcagggctgcaccaagaagcacctgaacagcaagacagtgggccagtgcctggagaccacagcccagagggtgcctgagcgggaggccctggtggtgctgcatgaagatgtgcggctgacctttgcccagctgaaggaggaggtggacaaggccgccagcggcctgctgagcatcggcctgtgcaagggggaccggctgggcatgtggggccccaacagctatgcctgggtgctgatgcagctggccacagcccaggccggcatcatcctggtgtctgtgaacccagcctaccaggccatggagctggagtatgtgctgaagaaggtgggctgcaaggccctggtgttccccaagcagttcaagacccagcagtactacaacgtgctgaagcagatctgcccagaggtggagaatgcccagcccggggccctgaagagccagaggctgcctgacctgaccaccgtcatctctgtggatgcccccctgcccggcaccctgctgctggatgaggtggtggccgccggcagcacccggcagcacctggaccagctgcagtacaaccagcagttcctgagctgccacgaccccatcaacatccagttcaccagcggcaccaccggcagccccaagggggccaccctgagccactacaacatcgtgaacaacagcaacatcctgggggagcggctgaagctgcacgagaagaccccagagcagctgaggatgatcctgcccaaccccctgtaccactgcctgggctctgtggccggcaccatgatgtgcctgatgtacggggccaccctcatcctggccagccccatcttcaacgggaagaaggccctggaggccatcagccgggagcggggcaccttcctgtatggcacccccaccatgtttgtggacatcctgaaccagcctgacttcagcagctatgacatcagcaccatgtgtggcggcgtgattgctggcagccctgcccctcctgagctgatccgggccatcatcaacaagatcaacatgaaggacctggtggtggcctacggcaccacagagaacagccctgtgacctttgcccacttccctgaggacacagtggagcagaaggccgagagcgtgggccgcatcatgccccacacagaggcccgcatcatgaacatggaggccggcaccctggccaagctgaacaccccaggagagctgtgcatccggggctactgtgtgatgctgggctactggggcgagccccagaagacagaggaggccgtggaccaggacaagtggtactggacaggagatgtggccaccatgaatgagcagggcttctgcaagatcgtgggccgcagcaaggacatgatcatcagaggaggagagaacatctacccagctgagctggaggacttcttccacacccaccccaaggtgcaggaggtgcaggtggtgggcgtgaaggatgacaggatgggagaggagatctgtgcctgcatccggctgaaggatggagaggagaccaccgtggaggagatcaaggccttctgcaagggcaagatcagccacttcaagatccccaagtacatcgtgtttgtgaccaactaccccctgaccatcagcggcaagatccagaagttcaagctgcgggagcagatggagcggcacctgaacctgtag

SEQ ID NO: 142481 - DNA, 1809 bp, synthetic construct
  misc_feature 1..1809: note = Description of Artificial Sequence: Synthetic coding sequence
  source 1..1809: mol_type = other DNA
atggctgtgtatgtgggcatgctgcggctgggccgcctgtgtgccggcagcagcggcgtgctgggcgcccgggccgccctgagccgctcctggcaggaggcccggctgcagggcgtgcgcttcctgagcagccgggaggtggacaggatggtgtccacccccatcggcggcctgtcctatgtgcagggctgcaccaagaagcacctgaacagcaagacagtgggccagtgcctggagaccacagcccagagggtgcctgagcgggaggccctggtggtgctgcatgaagatgtgcggctgacctttgcccagctgaaggaggaggtggacaaggccgccagcggcctgctgagcatcggcctgtgcaagggggaccggctgggcatgtggggccccaacagctatgcctgggtgctgatgcagctggccacagcccaggccatggagctggagtatgtgctgaagaaggtgggctgcaaggccctggtgttccccaagcagttcaagacccagcagtactacaacgtgctgaagcagatctgcccagaggtggagaatgcccagcccggggccctgaagagccagaggctgcctgacctgaccaccgtcatctctgtggatgcccccctgcccggcaccctgctgctggatgaggtggtggccgccggcagcacccggcagcacctggaccagctgcagtacaaccagcagttcctgagctgccacgaccccatcaacatccagttcaccagcggcaccaccggcagccccaagggggccaccctgagccactacaacatcgtgaacaacagcaacatcctgggggagcggctgaagctgcacgagaagaccccagagcagctgaggatgatcctgcccaaccccctgtaccactgcctgggctctgtggccggcaccatgatgtgcctgatgtacggggccaccctcatcctggccagccccatcttcaacgggaagaaggccctggaggccatcagccgggagcggggcaccttcctgtatggcacccccaccatgtttgtggacatcctgaaccagcctgacttcagcagctatgacatcagcaccatgtgtggcggcgtgattgctggcagccctgcccctcctgagctgatccgggccatcatcaacaagatcaacatgaaggacctggtggtggcctacggcaccacagagaacagccctgtgacctttgcccacttccctgaggacacagtggagcagaaggccgagagcgtgggccgcatcatgccccacacagaggcccgcatcatgaacatggaggccggcaccctggccaagctgaacaccccaggagagctgtgcatccggggctactgtgtgatgctgggctactggggcgagccccagaagacagaggaggccgtggaccaggacaagtggtactggacaggagatgtggccaccatgaatgagcagggcttctgcaagatcgtgggccgcagcaaggacatgatcatcagaggaggagagaacatctacccagctgagctggaggacttcttccacacccaccccaaggtgcaggaggtgcaggtggtgggcgtgaaggatgacaggatgggagaggagatctgtgcctgcatccggctgaaggatggagaggagaccaccgtggaggagatcaaggccttctgcaagggcaagatcagccacttcaagatccccaagtacatcgtgtttgtgaccaactaccccctgaccatcagcggcaagatccagaagttcaagctgcgggagcagatggagcggcacctgaacctgtag

SEQ ID NO: 142482 - DNA, 1719 bp, synthetic construct
  misc_feature 1..1719: note = Description of Artificial Sequence: Synthetic coding sequence
  source 1..1719: mol_type = other DNA
atggctgtgtatgtgggcatgctgcggctgggccgcctgtgtgccggcagcagcggcgtgctgggcgcccgggccgccctgagccgctcctggcaggaggcccggctgcagggcgtgcgcttcctgagcagccgggaggtggacaggatggtgtccacccccatcggcggcctgtcctatgtgcagggctgcaccaagaagcacctgaacagcaagacagtgggccagtgcctggagaccacagcccagagggtgcctgagcgggaggccctggtggtgctgcatgaagatgtgcggctgacctttgcccagctgaaggaggaggtgtctgtgaacccagcctaccaggccatggagctggagtatgtgctgaagaaggtgggctgcaaggccctggtgttccccaagcagttcaagacccagcagtactacaacgtgctgaagcagatctgcccagaggtggagaatgcccagcccggggccctgaagagccagaggctgcctgacctgaccaccgtcatctctgtggatgcccccctgcccggcaccctgctgctggatgaggtggtggccgccggcagcacccggcagcacctggaccagctgcagtacaaccagcagttcctgagctgccacgaccccatcaacatccagttcaccagcggcaccaccggcagccccaagggggccaccctgagccactacaacatcgtgaacaacagcaacatcctgggggagcggctgaagctgcacgagaagaccccagagcagctgaggatgatcctgcccaaccccctgtaccactgcctgggctctgtggccggcaccatgatgtgcctgatgtacggggccaccctcatcctggccagccccatcttcaacgggaagaaggccctggaggccatcagccgggagcggggcaccttcctgtatggcacccccaccatgtttgtggacatcctgaaccagcctgacttcagcagctatgacatcagcaccatgtgtggcggcgtgattgctggcagccctgcccctcctgagctgatccgggccatcatcaacaagatcaacatgaaggacctggtggtggcctacggcaccacagagaacagccctgtgacctttgcccacttccctgaggacacagtggagcagaaggccgagagcgtgggccgcatcatgccccacacagaggcccgcatcatgaacatggaggccggcaccctggccaagctgaacaccccaggagagctgtgcatccggggctactgtgtgatgctgggctactggggcgagccccagaagacagaggaggccgtggaccaggacaagtggtactggacaggagatgtggccaccatgaatgagcagggcttctgcaagatcgtgggccgcagcaaggacatgatcatcagaggaggagagaacatctacccagctgagctggaggacttcttccacacccaccccaaggtgcaggaggtgcaggtggtgggcgtgaaggatgacaggatgggagaggagatctgtgcctgcatccggctgaaggatggagaggagaccaccgtggaggagatcaaggccttctgcaagggcaagatcagccacttcaagatccccaagtacatcgtgtttgtgaccaactaccccctgaccatcagcggcaagatccagaagttcaagctgcgggagcagatggagcggcacctgaacctgtag

SEQ ID NO: 142483 - DNA, 1368 bp, synthetic construct
  misc_feature 1..1368: note = Description of Artificial Sequence: Synthetic coding sequence
  source 1..1368: mol_type = other DNA
atggagctggagtatgtgctgaagaaggtgggctgcaaggccctggtgttccccaagcagttcaagacccagcagtactacaacgtgctgaagcagatctgcccagaggtggagaatgcccagcccggggccctgaagagccagaggctgcctgacctgaccaccgtcatctctgtggatgcccccctgcccggcaccctgctgctggatgaggtggtggccgccggcagcacccggcagcacctggaccagctgcagtacaaccagcagttcctgagctgccacgaccccatcaacatccagttcaccagcggcaccaccggcagccccaagggggccaccctgagccactacaacatcgtgaacaacagcaacatcctgggggagcggctgaagctgcacgagaagaccccagagcagctgaggatgatcctgcccaaccccctgtaccactgcctgggctctgtggccggcaccatgatgtgcctgatgtatggagccaccctcatcctggccagccccatcttcaacgggaagaaggccctggaggccatcagccgggagcggggcaccttcctgtatggcacccccaccatgtttgtggacatcctgaaccagcctgacttcagcagctatgacatcagcaccatgtgtggcggcgtgattgctggcagccctgcccctcctgagctgatccgggccatcatcaacaagatcaacatgaaggacctggtggtggcctacggcaccacagagaacagccctgtgacctttgcccacttcccagaagatactgtggagcagaaggccgagagcgtgggccgcatcatgccccacacagaggcccgcatcatgaacatggaggccggcaccctggccaagctgaacaccccaggagagctgtgcatccggggctactgtgtgatgctgggctactggggcgagccccagaagacagaggaggccgtggaccaggacaagtggtactggacaggagatgtggccaccatgaatgagcagggcttctgcaagatcgtgggccgcagcaaggacatgatcatccggggcggggagaacatctacccagctgagctggaggacttcttccacacccaccccaaggtgcaggaggtgcaggtggtgggcgtgaaggatgacaggatgggagaggagatctgtgcctgcatccggctgaaggatggagaggagaccaccgtggaggagatcaaggccttctgcaagggcaagatcagccacttcaagatccccaagtacatcgtgtttgtgaccaactaccccctgaccatcagcggcaagatccagaagttcaagctgcgggagcagatggagcggcacctgaacctgtag

SEQ ID NO: 142484 - DNA, 1731 bp, synthetic construct
  misc_feature 1..1731: note = Description of Artificial Sequence: Synthetic coding sequence
  source 1..1731: mol_type = other DNA
atgctgccccacgtggtgctgaccttccggcggctgggctgtgccctggccagctgccgcctggccccagcccggcaccggggcagcggcctgctgcacacagcccctgtggcccggagtgacagaagtgcccctgtgttcacccgggccctggcctttggagacagaattgccctggtggaccagcacggccgccacacctaccgggagctgtacagccgcagcctgcggctgagccaggagatctgccgcctgtgtggctgtgtgggcggggacctgcgggaggagcgggtgtccttcctgtgtgccaatgatgccagctatgtggtggcccagtgggcctcctggatgtctgggggcgtggccgtgcccctgtacaggaagcaccctgctgcccagctggagtatgtgatctgtgacagccagagctctgtggtgctggccagccaggagtacctggagctgctgagccctgtggtgaggaagctgggcgtgcccctgctgcccctgaccccagccatctacaccggggctgtggaggagcctgctgaggtgcctgtgcctgagcagggctggagaaataaaggagccatgatcatctacaccagcggcaccaccggccggcccaagggcgtgctgagcacccaccagaacatccgggctgtggtgacaggcctggtgcacaagtgggcctggaccaaggatgatgtgatcctgcacgtgctgcccctgcaccacgtgcacggcgtggtgaatgccctgctgtgccccctgtgggtgggcgccacctgtgtgatgatgcctgagttcagcccccagcaggtgtgggagaagttcctgagcagcgagaccccccgcatcaacgtgttcatggctgtgcccaccatctacaccaagctgatggagtactatgacagacacttcacccagccccacgcccaggacttcctgcgggctgtgtgtgaggagaagatccggctgatggtgtctggcagcgctgccctgcccctgcctgtgctggagaagtggaagaacatcaccggccacaccctgctggagagatatggcatgacagagatcggcatggccctgagcggccccctgaccacagctgtgcggctgcccggctctgtgggcacccccctgcccggggtgcaggtgagaattgtgtctgagaacccccagcgggaggcctgcagctacaccatccatgctgaaggagatgagcggggcaccaaggtgaccccaggctttgaggagaaggagggggagctgctggtgcggggccccagcgtcttccgggagtactggaacaagccagaggagaccaagagcgccttcaccctggatggctggttcaagacaggagacacagtggtgttcaaggatggccagtactggatccggggccgcacctctgtggacatcatcaagacaggaggctacaaggtgtctgccctggaggtggagtggcacctgctggcccaccccagcatcacagatgtggccgtgattggagtgcctgacatgacctggggccagagggtgacagctgtggtgaccctgcgggagggccacagcctgagccaccgggagctgaaggagtgggccagaaatgtgctggccccctatgctgtgcccagcgagctggtgctggtggaggagatccccaggaaccagatgggcaagattgacaagaaggccctgatccgccacttccaccccagctag

SEQ ID NO: 142485 - DNA, 1731 bp, synthetic construct; identical to SEQ ID NO: 142484
  misc_feature 1..1731: note = Description of Artificial Sequence: Synthetic coding sequence
  source 1..1731: mol_type = other DNA

SEQ ID NO: 142486 - DNA, 714 bp, synthetic construct
  misc_feature 1..714: note = Description of Artificial Sequence: Synthetic coding sequence
  source 1..714: mol_type = other DNA
atgctgccccacgtggtgctgaccttccggcggctgggctgtgccctggccagctgccgcctggccccagcccggcaccggggcagcggcctgctgcacacagcccctgtggcccggagtgacagaagtgcccctgtgttcacccgggccctggcctttggagacagaattgccctggtggaccagcacggccgccacacctaccgggagctgtacagccgcagcctgcggctgagccaggagatctgccgcctgtgtggctgtgtgggcggggacctgcgggaggagcgggtgtccttcctgtgtgccaatgatgccagctatgtggtggcccagtgggcctcctggatgtctgggggcgtggccgtgcccctgtacaggaagcaccctgctgcccagctggagtatgtgatctgtgacagccagagctctgtggtgctggccagccaggagtacctggagctgctgagccctgtggtgaggaagctgggcgtgcccctgctgcccctgaccccagccatctacaccggggctgtggaggagcctgctgaggtgcctgtgcctgagcagggctggagaaataaaggagccatgatcatctacaccagcggcaccaccggccggcccaagggcgtgctgagcacccaccagaacatccgggctgtggtgacaggcctggtgcacaagtgggcctggaccaaggatgatgtgtag

SEQ ID NO: 142487 - DNA, 2097 bp, synthetic construct
  misc_feature 1..2097: note = Description of Artificial Sequence: Synthetic coding sequence
  source 1..2097: mol_type = other DNA
atgcaggcccacgagctgttccgctacttcaggatgcctgagctggtggacttccggcagtatgtgaggaccctgcccaccaacaccctgatgggctttggagcctttgctgccctgaccaccttctggtacgccacccggcccaagcccctgaagccaccctgtgacctgtccatgcagagcgtggaggtggccggcagcggcggggccaggagaagtgccctgctggacagtgatgagcccctggtgtacttctatgatgatgtgaccaccctgtatgagggcttccagaggggcatccaggtgagcaacaacggcccctgcctgggcagcaggaagccagaccagccctatgagtggctgagctacaagcaggtggccgagctgtctgaatgtattggcagcgccctgatccagaagggcttcaagacagccccagaccagttcatcggcatctttgcccagaacagacctgagtgggtgatcatcgagcagggctgctttgcctacagcatggtgattgtgcccctgtatgacaccctgggcaatgaggccatcacctacatcgtgaacaaggccgagctgagcctggtgtttgtggacaagccagagaaggccaagctgctgctggagggcgtggagaacaagctgatccctggcctgaagatcatcgtggtgatggatgcctacggcagcgagctggtggagcggggccagagatgtggggtggaggtgacctccatgaaggccatggaggacctgggccgggccaacagaaggaagcccaagcccccagcccctgaggacctggccgtcatctgcttcaccagcggcaccaccggcaaccccaagggggccatggtgacccacagaaatattgtgtctgactgcagcgcctttgtgaaggccacagaaaatacagtgaacccctgcccagatgacaccctcatctccttcctgcccctggcccacatgtttgagcgggtggtggagtgtgtgatgctgtgccacggggccaagattggcttcttccagggcgacatccggctgctgatggatgacctgaaggtgctgcagcccaccgtcttccctgtggtgccccggctgctgaacaggatgtttgaccgcatcttcggccaggccaacaccaccctgaagcgctggctgctggactttgccagcaagaggaaggaggccgagctgcggagcggcatcatccggaacaacagcctgtgggacaggctcatcttccacaaggtgcagagcagcctgggcggccgggtgcggctgatggtgactggagctgcccctgtgtctgccaccgtgctgaccttcctgcgggccgccctgggctgccagttctatgagggctacggccagacagagtgcacagctggctgctgcctgaccatgcctggggactggacagctggccacgtgggcgcccccatgccctgcaacctgatcaagctggtggatgtggaggagatgaactacatggctgctgagggggagggggaggtgtgtgtgaagggccccaacgtgttccagggctacctgaaggaccctgccaagacagctgaggccctggacaaggatggctggctgcacactggagacatcggcaagtggctgcccaacggcaccctgaagatcatcgacaggaagaagcacatcttcaagctggcccagggcgagtacatcgcccctgagaagattgagaacatctacatgaggtctgagcctgtggcccaggtgtttgtgcatggagagagcctgcaggccttcctgattgccatcgtggtgcctgatgtggagaccctgtgctcctgggcccagaagaggggctttgagggcagctttgaggagctgtgcaggaacaaggatgtgaagaaggccatcctggaggacatggtgcggctgggcaaggacagcggcctgaagccctttgagcaggtgaagggcatcaccctgcaccctgagctgttcagcattgacaatggcctgctgacccccaccatgaaggccaagaggcctgagctgaggaactacttccgcagccagattgatgacctgtacagcaccatcaaggtgtag

SEQ ID NO: 142488 - DNA, 1584 bp, synthetic construct
  misc_feature 1..1584: note = Description of Artificial Sequence: Synthetic coding sequence
  source 1..1584: mol_type = other DNA
atggtgattgtgcccctgtatgacaccctgggcaatgaggccatcacctacatcgtgaacaaggccgagctgagcctggtgtttgtggacaagccagagaaggccaagctgctgctggagggcgtggagaacaagctgatccctggcctgaagatcatcgtggtgatggatgcctacggcagcgagctggtggagcggggccagagatgtggggtggaggtgacctccatgaaggccatggaggacctgggccgggccaacagaaggaagcccaagcccccagcccctgaggacctggccgtcatctgcttcaccagcggcaccactggaaaccccaagggggccatggtgacccacaggaacatcgtgtctgactgcagcgcctttgtgaaggccacagagaacacagtgaacccctgcccagatgacaccctcatctccttcctgcccctggcccacatgtttgagcgggtggtggagtgtgtgatgctgtgccacggggccaagattggcttcttccagggcgacatccggctgctgatggatgacctgaaggtgctgcagcccaccgtcttccctgtggtgccccggctgctgaacaggatgtttgaccgcatcttcggccaggccaacaccaccctgaagcgctggctgctggactttgccagcaagaggaaggaggccgagctgcggagcggcatcatccggaacaacagcctgtgggacaggctcatcttccacaaggtgcagagcagcctgggcggccgggtgcggctgatggtgactggagctgcccctgtgtctgccaccgtgctgaccttcctgcgggccgccctgggctgccagttctatgagggctacggccagacagaatgtacagctggctgctgcctgaccatgcctggggactggacagctggccacgtgggcgcccccatgccctgcaacctgatcaagctggtggatgtggaggagatgaactacatggctgctgagggggagggggaggtgtgtgtgaagggccccaacgtgttccagggctacctgaaggaccctgccaagacagctgaggccctggacaaggatggctggctgcacactggagacatcggcaagtggctgcccaacggcaccctgaagatcatcgacaggaagaagcacatcttcaagctggcccagggcgagtacatcgcccctgagaagattgagaacatctacatgaggtctgagcctgtggcccaggtgtttgtgcacggggagagcctgcaggccttcctgattgccatcgtggtgcctgatgtggagaccctgtgctcctgggcccagaagaggggctttgagggcagctttgaggagctgtgcaggaacaaggatgtgaagaaggccatcctggaggacatggtgcggctgggcaaggacagcggcctgaagccctttgagcaggtgaagggcatcaccctgcaccctgagctgttcagcattgacaatggcctgctgacccccaccatgaaggccaagaggcctgagctgaggaactacttccgcagccagattgatgacctgtacagcaccatcaaggtgtag

SEQ ID NO: 142489 - DNA, 1584 bp, synthetic construct; identical to SEQ ID NO: 142488
  misc_feature 1..1584: note = Description of Artificial Sequence: Synthetic coding sequence
  source 1..1584: mol_type = other DNA

SEQ ID NO: 142490 - DNA, 2097 bp, synthetic construct; identical to SEQ ID NO: 142487
  misc_feature 1..2097: note = Description of Artificial Sequence: Synthetic coding sequence
  source 1..2097: mol_type = other DNA

SEQ ID NO: 142491 - DNA, 1995 bp, synthetic construct
  misc_feature 1..1995: note = Description of Artificial Sequence: Synthetic coding sequence
  source 1..1995: mol_type = other DNA
atgcaggcccacgagctgttccgctacttcaggatgcctgagctggtggacttccggcagtatgtgaggaccctgcccaccaacaccctgatgggctttggagcctttgctgccctgaccaccttctggtacgccacccggcccaagcccctgaagccaccctgtgacctgtccatgcagagcgtggaggtggccggcagcggcggggccaggagaagtgccctgctggacagtgatgagcccctggtgtacttctatgatgatgtgaccaccctgtatgagggcttccagaggggcatccaggtgagcaacaacggcccctgcctgggcagcaggaagccagaccagccctatgagtggctgagctacaagcagtgggtgatcatcgagcagggctgctttgcctacagcatggtgattgtgcccctgtatgacaccctgggcaatgaggccatcacctacatcgtgaacaaggccgagctgagcctggtgtttgtggacaagccagagaaggccaagctgctgctggagggcgtggagaacaagctgatccctggcctgaagatcatcgtggtgatggatgcctacggcagcgagctggtggagcggggccagagatgtggggtggaggtgacctccatgaaggccatggaggacctgggccgggccaacagaaggaagcccaagcccccagcccctgaggacctggccgtcatctgcttcaccagcggcaccaccggcaaccccaagggggccatggtgacccacagaaatattgtgtctgactgcagcgcctttgtgaaggccacagaaaatacagtgaacccctgcccagatgacaccctcatctccttcctgcccctggcccacatgtttgagcgggtggtggagtgtgtgatgctgtgccacggggccaagattggcttcttccagggcgacatccggctgctgatggatgacctgaaggtgctgcagcccaccgtcttccctgtggtgccccggctgctgaacaggatgtttgaccgcatcttcggccaggccaacaccaccctgaagcgctggctgctggactttgccagcaagaggaaggaggccgagctgcggagcggcatcatccggaacaacagcctgtgggacaggctcatcttccacaaggtgcagagcagcctgggcggccgggtgcggctgatggtgactggagctgcccctgtgtctgccaccgtgctgaccttcctgcgggccgccctgggctgccagttctatgagggctacggccagacagagtgcacagctggctgctgcctgaccatgcctggggactggacagctggccacgtgggcgcccccatgccctgcaacctgatcaagctggtggatgtggaggagatgaactacatggctgctgagggggagggggaggtgtgtgtgaagggccccaacgtgttccagggctacctgaaggaccctgccaagacagctgaggccctggacaaggatggctggctgcacactggagacatcggcaagtggctgcccaacggcaccctgaagatcatcgacaggaagaagcacatcttcaagctggcccagggcgagtacatcgcccctgagaagattgagaacatctacatgaggtctgagcctgtggcccaggtgtttgtgcatggagagagcctgcaggccttcctgattgccatcgtggtgcctgatgtggagaccctgtgctcctgggcccagaagaggggctttgagggcagctttgaggagctgtgcaggaacaaggatgtgaagaaggccatcctggaggacatggtgcggctgggcaaggacagcggcctgaagccctttgagcaggtgaagggcatcaccctgcaccctgagctgttcagcattgacaatggcctgctgacccccaccatgaaggccaagaggcctgagctgaggaactacttccgcagccagattgatgacctgtacagcaccatcaaggtgtag

SEQ ID NO: 142492 - DNA, 2097 bp, synthetic construct; identical to SEQ ID NO: 142487
  misc_feature 1..2097: note = Description of Artificial Sequence: Synthetic coding sequence
  source 1..2097: mol_type = other DNA

SEQ ID NO: 142493 - DNA, 2163 bp, synthetic construct
  misc_feature 1..2163: note = Description of Artificial Sequence: Synthetic coding sequence
  source 1..2163: mol_type = other DNA
atgaacaaccacgtgagcagcaagcccagcaccatgaagctgaagcacaccatcaaccccatcctgctgtacttcatccacttcctgatcagcctgtacaccatcctgacctacatccccttctacttcttcagcgagagccggcaggagaagagcaaccgcatcaaggccaagcctgtgaacagcaagccagacagcgcctacagatctgtgaacagcctggatggcctggcctctgtgctgtacccaggctgtgacaccctggacaaggtgttcacctacgccaagaacaagttcaagaacaagaggctgctgggcacccgggaggtgctgaatgaggaggatgaggtgcagcccaacgggaagatcttcaagaaggtgatcctgggccagtacaactggctgtcctatgaagatgtgtttgtgcgggccttcaactttggaaatggcctgcagatgctgggccagaagcccaagaccaacatcgccatcttctgtgagaccagggctgagtggatgattgctgcccaggcctgcttcatgtacaacttccagctggtgaccctgtatgccaccctgggcggccctgccatcgtgcacgccctgaatgaaacagaggtgaccaacatcatcaccagcaaggagctgctgcagaccaagctgaaggacatcgtgtccctggtgccccggctgcggcacatcatcaccgtggatggcaagccacccacctggagcgagttccccaagggcatcatcgtgcacaccatggctgctgtggaggccctgggcgccaaggcctccatggagaaccagccccacagcaagcccctgcccagcgacattgctgtgatcatgtacaccagcggcagcacaggcctgcccaagggcgtgatgatcagccacagcaacatcatcgccggcatcaccggcatggccgagcgcatccctgagctgggggaggaggatgtgtacatcggctacctgcccctggcccacgtgctggagctgtctgctgagctggtgtgcctgagccacggctgcagaattggctacagcagcccccagaccctggccgaccagagcagcaagatcaagaagggcagcaaaggagacacctccatgctgaagcccaccctgatggctgctgtgcctgagatcatggaccgcatctacaagaatgtgatgaacaaggtgtctgagatgagcagcttccagaggaacctcttcatcctggcctacaactacaagatggagcagatcagcaagggcaggaacacccccctgtgtgacagctttgtgttcaggaaggtgcgcagcctgctgggcggcaacatccggctgctgctgtgtggcggggcccccctgagcgccaccacccagcgcttcatgaacatctgcttctgctgccctgtgggccagggctacggcctgacagagagcgctggagctggcaccatcagcgaggtgtgggactacaacacaggccgggtgggcgcccccctggtgtgctgtgagatcaagctgaagaactgggaggagggcggctacttcaacacagacaagccccaccccagaggagagatcctgattggaggccagagcgtgaccatgggctactacaagaatgaggccaagaccaaggctgacttctttgaagatgaaaatggccagcgctggctgtgcaccggggacattggagaatttgagccagatggctgcctgaagatcatcgacaggaagaaggacctggtgaagctgcaggccggggagtatgtgtccctgggcaaggtggaggccgccctgaagaacctgcccctggtggacaacatctgtgcctatgccaacagctaccacagctatgtgattggatttgtggtgcccaaccagaaggagctgacagagctggccaggaagaagggcctgaagggcacctgggaggagctgtgcaacagctgtgagatggagaatgaggtgctgaaggtgctgtctgaggccgccatcagcgccagcctggagaagtttgagatccctgtgaagatccggctgagccctgagccctggaccccagagaccggcctggtgacagatgccttcaagctgaagaggaaggagctgaagacccactaccaggccgacattgaaagaatgtatggcaggaagtag

SEQ ID NO: 142494 - DNA, 2163 bp, synthetic construct; identical to SEQ ID NO: 142493
  misc_feature 1..2163: note = Description of Artificial Sequence: Synthetic coding sequence
  source 1..2163: mol_type = other DNA

SEQ ID NO: 142495 - DNA, 267 bp, synthetic construct
  misc_feature 1..267: note = Description of Artificial Sequence: Synthetic coding sequence
  source 1..267: mol_type = other DNA
atgaacaaccacgtgagcagcaagcccagcaccatgaagctgaagcacaccatcaaccccatcctgctgtacttcatccacttcctgatcagcctgtacaccatcctgacctacatccccttctacttcttcagcgagagccggcaggagaagagcaaccgcatcaaggccaagcctgtgaacagcaagccagacagcgcctacagatctgtgaacagcctggatggcctggcctctgtgctgtacccaggctgtgacaccctgtag

SEQ ID NO: 142496 - DNA, 288 bp, synthetic construct
  misc_feature 1..288: note = Description of Artificial Sequence: Synthetic coding sequence
  source 1..288: mol_type = other DNA
atgaacaaccacgtgagcagcaagcccagcaccatgaagctgaagcacaccatcaaccccatcctgctgtacttcatccacttcctgatcagcctgtacaccatcctgacctacatccccttctacttcttcagcgagagccggcaggagaagagcaaccgcatcaaggccaagcctgtgaacagcaagccagacagcgcctacagatctgtgaacagcctggatggcctggcctctgtgctgtacccaggctgtgacaccctggacaaggtgttcacctacgcctag

SEQ ID NO: 142497 - DNA, 2052 bp, synthetic construct
  misc_feature 1..2052: note = Description of Artificial Sequence: Synthetic coding sequence
  source 1..2052: mol_type = other DNA
atgctgttcatcttcaacttcctgttcagccccctgcccaccccagccctgatctgcatcctgacctttggagctgccatcttcctgtggctgatcacccggccccagcctgtgctgcccctgctggacctgaacaaccagagcgtgggcattgaaggaggagccaggaaaggagtgtcccagaagaacaatgacctgaccagctgctgcttcagtgatgccaagaccatgtatgaggtgttccagaggggcctggccgtgtctgacaatggcccctgcctgggctacaggaagcccaaccagccctaccgctggctgagctacaagcaggtgtctgacagagctgagtacctgggcagctgcctgctgcacaagggctacaagagcagcccagaccagtttgtgggcatctttgcccagaacagacctgagtggatcatcagcgagctggcctgctacacctacagcatggtggccgtgcccctgtatgacaccctgggccctgaggccatcgtgcacatcgtgaacaaggctgacatcgccatggtgatctgtgacaccccccagaaggccctggtgctgattggaaatgtggagaagggcttcacccccagcctgaaggtgatcatcctgatggacccctttgatgatgacctgaagcagagaggagagaagagcggcatcgagatcctgagcctgtatgatgctgagaacctgggcaaggagcacttcaggaagcctgtgccccccagccctgaggacctgagcgtcatctgcttcaccagcggcaccactggagaccccaagggggccatgatcacccaccagaacatcgtgtccaatgctgctgccttcctgaagtgtgtggagcacgcctatgagcccaccccagatgatgtggccatctcctacctgcccctggcccacatgtttgagcgcatcgtgcaggccgtggtgtacagctgtggggcccgggtgggcttcttccagggcgacatccggctgctggctgatgacatgaagaccctgaagcccaccctcttccctgctgtgccccggctgctgaaccgcatctatgacaaggtgcagaatgaggccaagacccccctgaagaagttcctgctgaagctggccgtgagcagcaagttcaaggagctgcagaagggcatcatcagacatgacagcttctgggacaagctgatctttgccaagatccaggacagcctgggcggccgggtgcgggtcatcgtgactggagctgcccccatgagcacctctgtgatgaccttcttccgggccgccatgggctgccaggtgtatgaggcctacggccagacagaatgtactggaggctgcaccttcaccctgcccggggactggaccagcggccacgtgggcgtgcccctggcctgcaactacgtgaagctggaggatgtggccgacatgaactacttcaccgtgaacaatgaaggagaggtgtgcatcaagggcaccaacgtgttcaagggctacctgaaggaccctgagaagacccaggaggccctggacagtgatggctggctgcacactggagacatcggccgctggctgcccaacggcaccctgaagatcatcgacaggaagaagaacatcttcaagctggcccagggcgagtacatcgcccctgagaagattgagaacatctacaacagaagccagcctgtgctgcagatctttgtgcacggggagagcctgcggagcagcctggtgggcgtggtggtgcctgacacagatgtgctgcccagctttgctgccaagctgggcgtgaagggcagctttgaggagctgtgccagaaccaggtggtgcgggaggccatcctggaggacctgcagaagattggcaaggagagcggcctgaagacctttgagcaggtgaaggccatcttcctgcaccctgagcccttcagcattgaaaatggcctgctgacccccaccctgaaggccaagagaggagagctgagcaagtacttccgcacccagattgacagcctgtatgagcacatccaggactag

SEQ ID NO: 142498 - DNA, 2052 bp, synthetic construct; identical to SEQ ID NO: 142497
  misc_feature 1..2052: note = Description of Artificial Sequence: Synthetic coding sequence
  source 1..2052: mol_type = other DNA

SEQ ID NO: 142499 - DNA, 2220 bp, synthetic construct
  misc_feature 1..2220: note = Description of Artificial Sequence: Synthetic coding sequence
  source 1..2220: mol_type = other DNA
atggatgccctgaagccaccctgcctgtggagaaatcatgagcggggcaagaaggaccgggacagctgtggcaggaagaacagcgagcccggcagcccccacagcctggaggccctgagagatgctgcccccagccagggcctgaacttcctgctgctcttcaccaagatgctgttcatcttcaacttcctgttcagccccctgcccaccccagccctgatctgcatcctgacctttggagctgccatcttcctgtggctgatcacccggccccagcctgtgctgcccctgctggacctgaacaaccagagcgtgggcattgaaggaggagccaggaaaggagtgtcccagaagaacaatgacctgaccagctgctgcttcagtgatgccaagaccatgtatgaggtgttccagaggggcctggccgtgtctgacaatggcccctgcctgggctacaggaagcccaaccagccctaccgctggctgagctacaagcaggtgtctgacagagctgagtacctgggcagctgcctgctgcacaagggctacaagagcagcccagaccagtttgtgggcatctttgcccagaacagacctgagtggatcatcagcgagctggcctgctacacctacagcatggtggccgtgcccctgtatgacaccctgggccctgaggccatcgtgcacatcgtgaacaaggctgacatcgccatggtgatctgtgacaccccccagaaggccctggtgctgattggaaatgtggagaagggcttcacccccagcctgaaggtgatcatcctgatggacccctttgatgatgacctgaagcagagaggagagaagagcggcatcgagatcctgagcctgtatgatgctgagaacctgggcaaggagcacttcaggaagcctgtgccccccagccctgaggacctgagcgtcatctgcttcaccagcggcaccactggagaccccaagggggccatgatcacccaccagaacatcgtgtccaatgctgctgccttcctgaagtgtgtggagcacgcctatgagcccaccccagatgatgtggccatctcctacctgcccctggcccacatgtttgagcgcatcgtgcaggccgtggtgtacagctgtggggcccgggtgggcttcttccagggcgacatccggctgctggctgatgacatgaagaccctgaagcccaccctcttccctgctgtgccccggctgctgaaccgcatctatgacaaggtgcagaatgaggccaagacccccctgaagaagttcctgctgaagctggccgtgagcagcaagttcaaggagctgcagaagggcatcatcagacatgacagcttctgggacaagctgatctttgccaagatccaggacagcctgggcggccgggtgcgggtcatcgtgactggagctgcccccatgagcacctctgtgatgaccttcttccgggccgccatgggctgccaggtgtatgaggcctacggccagacagaatgtactggaggctgcaccttcaccctgcccggggactggaccagcggccacgtgggcgtgcccctggcctgcaactacgtgaagctggaggatgtggccgacatgaactacttcaccgtgaacaatgaaggagaggtgtgcatcaagggcaccaacgtgttcaagggctacctgaaggaccctgagaagacccaggaggccctggacagtgatggctggctgcacactggagacatcggccgctggctgcccaacggcaccctgaagatcatcgacaggaagaagaacatcttcaagctggcccagggcgagtacatcgcccctgagaagattgagaacatctacaacagaagccagcctgtgctgcagatctttgtgcacggggagagcctgcggagcagcctggtgggcgtggtggtgcctgacacagatgtgctgcccagctttgctgccaagctgggcgtgaagggcagctttgaggagctgtgccagaaccaggtggtgcgggaggccatcctggaggacctgcagaagattggcaaggagagcggcctgaagacctttgagcaggtgaaggccatcttcctgcaccctgagcccttcagcattgaaaatggcctgctgacccccaccctgaaggccaagagaggagagctgagcaagtacttccgcacccagattgacagcctgtatgagcacatccaggactag

SEQ ID NO: 142500 - DNA, 1398 bp, synthetic construct
  misc_feature 1..1398: note = Description of Artificial Sequence: Synthetic coding sequence
  source 1..1398: mol_type = other DNA
atgctgtttcctggggccagcatcgtgcctgagtgctggctgctggtgctgatccagaacctgggcaaggagcacttcaggaagcctgtgccccccagccctgaggacctgagcgtcatctgcttcaccagcggcaccactggagaccccaagggggccatgatcacccaccagaacatcgtgtccaatgctgctgccttcctgaagtgtgtggagcacgcctatgagcccaccccagatgatgtggccatctcctacctgcccctggcccacatgtttgagcgcatcgtgcaggccgtggtgtacagctgtggggcccgggtgggcttcttccagggcgacatccggctgctggctgatgacatgaagaccctgaagcccaccctcttccctgctgtgccccggctgctgaaccgcatctatgacaaggtgcagaatgaggccaagacccccctgaagaagttcctgctgaagctggccgtgagcagcaagttcaaggagctgcagaagggcatcatcagacatgacagcttctgggacaagctgatctttgccaagatccaggacagcctgggcggccgggtgcgggtcatcgtgactggagctgcccccatgagcacctctgtgatgaccttcttccgggccgccatgggctgccaggtgtatgaggcctacggccagacagaatgtactggaggctgcaccttcaccctgcccggggactggaccagcggccacgtgggcgtgcccctggcctgcaactacgtgaagctggaggatgtggccgacatgaactacttcaccgtgaacaatgaaggagaggtgtgcatcaagggcaccaacgtgttcaagggctacctgaaggaccctgagaagacccaggaggccctggacagtgatggctggctgcacactggagacatcggccgctggctgcccaacggcaccctgaagatcatcgacaggaagaagaacatcttcaagctggcccagggcgagtacatcgcccctgagaagattgagaacatctacaacagaagccagcctgtgctgcagatctttgtgcacggggagagcctgcggagcagcctggtgggcgtggtggtgcctgacacagatgtgctgcccagctttgctgccaagctgggcgtgaagggcagctttgaggagctgtgccagaaccaggtggtgcgggaggccatcctggaggacctgcagaagattggcaaggagagcggcctgaagacctttgagcaggtgaaggccatcttcctgcaccctgagcccttcagcattgaaaatggcctgctgacccccaccctgaaggccaagagaggagagctgagcaagtacttccgcacccagattgacagcctgtatgagcacatccaggactag

SEQ ID NO: 142501 - DNA, 2052 bp, synthetic construct; identical to SEQ ID NO: 142497
  misc_feature 1..2052: note = Description of Artificial Sequence: Synthetic coding sequence
  source 1..2052: mol_type = other DNA

SEQ ID NO: 142502 - DNA, 1980 bp, synthetic construct
  misc_feature 1..1980: note = Description of Artificial Sequence: Synthetic coding sequence
  source 1..1980: mol_type = other DNA
atgctgttcatcttcaacttcctgttcagccccctgcccaccccagccctgatctgcatcctgacctttggagctgccatcttcctgtggctgatcacccggccccagcctgtgctgcccctgctggacctgaacaaccagagcgtgggcattgaaggaggagccaggaaaggagtgtcccagaagaacaatgacctgaccagctgctgcttcagtgatgccaagaccatgtatgaggtgttccagaggggcctggccgtgtctgacaatggcccctgcctgggctacaggaagcccaaccagccctaccgctggctgagctacaagcaggtgtctgacagagctgagtacctgggcagctgcctgctgcacaagggctacaagagcagcccagaccagtttgtgggcatctttgcccagaacagacctgagtggatcatcagcgagctggcctgctacacctacagcatggtggccgtgcccctgtatgacaccctgggccctgaggccatcgtgcacatcgtgaacaaggctgacatcgccatggtgatctgtgacaccccccagaaggccctggtgctgattggaaatgtggagaagggcttcacccccagcctgaaggtgatcatcctgatggacccctttgatgatgacctgaagcagagaggagagaagagcggcatcgagatcctgagcctgtatgatgctgagaacctgggcaaggagcacttcaggaagcctgtgccccccagccctgaggacctgagcgtcatctgcttcaccagcggcaccactggagaccccaagggggccatgatcacccaccagaacatcgtgtccaatgctgctgccttcctgaagtgtgtggagcacgcctatgagcccaccccagatgatgtggccatctcctacctgcccctggcccacatgtttgagcgcatcgtgcaggccgtggtgtacagctgtggggcccgggtgggcttcttccagggcgacatccggctgctggctgatgacatgaagaccctgaagcccaccctcttccctgctgtgccccggctgctgaaccgcatctatgacaaggtgcagaatgaggccaagacccccctgaagaagttcctgctgaagctggccgtgagcagcaagttcaaggagctgcagaagggcatcatcagacatgacagcttctgggacaagctgatctttgccaagatccaggacagcctgggcggccgggtgcgggtcatcgtgactggagctgcccccatgagcacctctgtgatgaccttcttccgggccgccatgggctgccaggtgtatgaggcctacggccagacagaatgtactggaggctgcaccttcaccctgcccggggactggaccagcggccacgtgggcgtgcccctggcctgcaactacgtgaagctggaggatgtggccgacatgaactacttcaccgtgaacaatgaaggagaggtgtgcatcaagggcaccaacgtgttcaagggctacctgaaggaccctgagaagacccaggaggccctggacagtgatggctggctgcacactggagacatcggccgctggctgcccaacggcaccctgaagatcatcgacaggaagaagaacatcttcaagctggcccagggcgagtacatcgcccctgagaagattgagaacatctacaacagaagccagcctgtgctgcagatctttgtgcacggggagagcctgcggagcagcctggtgggcgtggtggtgcctgacacagatgtgctgcccagctttgctgccaagctgggcgtgaagggcagctttgaggagctgtgccagaaccaggtgaaggccatcttcctgcaccctgagcccttcagcattgaaaatggcctgctgacccccaccctgaaggccaagagaggagagctgagcaagtacttccgcacccagattgacagcctgtatgagcacatccaggactag

SEQ ID NO: 142503 - DNA, 2169 bp, synthetic construct
  misc_feature 1..2169: note = Description of Artificial Sequence: Synthetic coding sequence
  source 1..2169: mol_type = other DNA
atgctgaccttcttcctggtgtctgggggcagcctgtggctgtttgtggagtttgtgctgagcctgctggagaagatgcagacccaggagatcctgcgcatcctgcggctgcctgagctgggggacctgggccagttcttccgcagcctgagcgccaccaccctggtgtccatgggcgccctggccgccatcctggcctactggttcacccaccggcccaaggccctgcagcccccctgcaacctgctgatgcagagcgaggaggtggaggacagcggcggggcccggcgcagcgtcatcggcagcggcccccagctgctgacccactactatgatgatgcccggaccatgtaccaggtgttccggcggggcctgagcatctctggaaatggcccctgcctgggcttcaggaagcccaagcagccctaccagtggctgagctaccaggaggtggccgacagagctgagttcctgggcagcggcctgctgcagcacaactgcaaggcctgcacagaccagttcatcggcgtgtttgcccagaacagacctgagtggatcatcgtggagctggcctgctacacctacagcatggtggtggtgcccctgtatgacaccctgggccctggggccatccgctacatcatcaacacagctgacatcagcaccgtcatcgtggacaagccccagaaggctgtgctgctgctggagcacgtggagaggaaggagaccccaggcctgaagctgatcatcctgatggacccctttgaggaggccctgaaggagcggggccagaagtgtggggtggtgatcaagtccatgcaggccgtggaggactgtggccaggagaaccaccaggcccctgtgcccccccagccagatgacctgagcatcgtgtgcttcaccagcggcaccactggaaaccccaagggggccatgctgacccatggaaatgtggtggccgacttcagcggcttcctgaaggtgacagagagccagtgggcccccacctgtgctgatgtgcacatctcctacctgcccctggcccacatgtttgagaggatggtgcagagcgtggtgtactgccacggcggccgggtgggcttcttccagggcgacatccggctgctgagtgatgacatgaaggccctgtgccccaccatcttccctgtggtgccccggctgctgaacaggatgtatgacaagatcttcagccaggccaacacccccctgaagcgctggctgctggagtttgctgccaagaggaagcaggccgaggtgcgcagcggcatcatcagaaatgacagcatctgggatgagctgttcttcaacaagatccaggccagcctgggcggctgtgtgaggatgattgtgactggagctgccccagccagccccaccgtgctgggcttcctgcgggccgccctgggctgccaggtgtatgagggctacggccagacagaatgtacagctggctgcaccttcaccacccctggggactggaccagcggccacgtgggcgcccccctgccctgcaaccacatcaagctggtggatgtggaggagctgaactactgggcctgcaagggggagggggagatctgtgtgcggggccccaacgtgttcaagggctacctgaaggaccctgacaggaccaaggaggccctggacagtgatggctggctgcacactggagacatcggcaagtggctgcctgctggcaccctgaagatcatcgacaggaagaagcacatcttcaagctggcccagggcgagtatgtggcccctgagaagattgagaacatctacatccgcagccagcctgtggcccagatctacgtgcacggggacagcctgaaggccttcctggtgggcatcgtggtgcctgaccctgaggtgatgcccagctgggcccagaagaggggcatcgagggcacctatgctgacctgtgcaccaacaaggacctgaagaaggccatcctggaggacatggtgcggctgggcaaggagagcggcctgcacagctttgagcaggtgaaggccatccacatccacagcgacatgttttctgtgcagaatggcctgctgacccccaccctgaaggccaagaggcctgagctgcgggagtacttcaagaagcagatcgaggagctgtacagcatctccatgtag

SEQ ID NO: 142504 - DNA, 1869 bp, synthetic construct
  misc_feature 1..1869: note = Description of Artificial Sequence: Synthetic coding sequence
  source 1..1869: mol_type = other DNA
atgcagacccaggagatcctgcgcatcctgcggctgcctgagctgggggacctgggccagttcttccgcagcctgagcgccaccaccctggacagcggcggggcccggcgcagcgtcatcggcagcggcccccagctgctgacccactactatgatgatgcccggaccatgtaccaggtgttccggcggggcctgagcatctctggaaatggcccctgcctgggcttcaggaagcccaagcagccctaccagtggctgagctaccaggaggtggccgacagagctgagttcctgggcagcggcctgctgcagcacaactgcaaggcctgcacagaccagttcatcggcgtgtttgcccagaacagacctgagtggatcatcgtggagctggcctgctacacctacagcatggtggtggtgcccctgtatgacaccctgggccctggggccatccgctacatcatcaacacagctgacatcagcaccgtcatcgtggacaagccccagaaggctgtgctgctgctggagcacgtggagaggaaggagaccccaggcctgaagctgatcatcctgatggacccctttgaggaggccctgaaggagcggggccagaagtgtggggtggtgatcaagtccatgcaggccgtggaggactgtggccaggagaaccaccaggcccctgtgcccccccagccagatgacctgagcatcgtgtgcttcaccagcggcaccactggaaaccccaagggggccatgctgacccatggaaatgtggtggccgacttcagcggcttcctgaaggtgacagaaggagacatccggctgctgagtgatgacatgaaggccctgtgccccaccatcttccctgtggtgccccggctgctgaacaggatgtatgacaagatcttcagccaggccaacacccccctgaagcgctggctgctggagtttgctgccaagaggaagcaggccgaggtgcgcagcggcatcatcagaaatgacagcatctgggatgagctgttcttcaacaagatccaggccagcctgggcggctgtgtgaggatgattgtgactggagctgccccagccagccccaccgtgctgggcttcctgcgggccgccctgggctgccaggtgtatgagggctacggccagacagaatgtacagctggctgcaccttcaccacccctggggactggaccagcggccacgtgggcgcccccctgccctgcaaccacatcaagctggtggatgtggaggagctgaactactgggcctgcaagggggagggggagatctgtgtgcggggccccaacgtgttcaagggctacctgaaggaccctgacaggaccaaggaggccctggacagtgatggctggctgcacactggagacatcggcaagtggctgcctgctggcaccctgaagatcatcgacaggaagaagcacatcttcaagctggcccagggcgagtatgtggcccctgagaagattgagaacatctacatccgcagccagcctgtggcccagatctacgtgcacggggacagcctgaaggccttcctggtgggcatcgtggtgcctgaccctgaggtgatgcccagctgggcccagaagaggggcatcgagggcacctatgctgacctgtgcaccaacaaggacctgaagaaggccatcctggaggacatggtgcggctgggcaaggagagcggcctgcacagctttgagcaggtgaaggccatccacatccacagcgacatgttttctgtgcagaatggcctgctgacccccaccctgaaggccaagaggcctgagctgcgggagtacttcaagaagcagatcgaggagctgtacagcatctccatgtag

SEQ ID NO: 142505 - DNA, 2094 bp, synthetic construct
  misc_feature 1..2094: note = Description of Artificial Sequence: Synthetic coding sequence
  source 1..2094: mol_type = other DNA
atgcagacccaggagatcctgcgcatcctgcggctgcctgagctgggggacctgggccagttcttccgcagcctgagcgccaccaccctggtgtccatgggcgccctggccgccatcctggcctactggttcacccaccggcccaaggccctgcagcccccctgcaacctgctgatgcagagcgaggaggtggaggacagcggcggggccaggagatctgtgattggcagcggcccccagctgctgacccactactatgatgatgcccggaccatgtaccaggtgttcagaagaggcctgagcatctctggaaatggcccctgcctgggcttcaggaagcccaagcagccctaccagtggctgagctaccaggaggtggccgacagagctgagttcctgggcagcggcctgctgcagcacaactgcaaggcctgcacagaccagttcatcggcgtgtttgcccagaacagacctgagtggatcatcgtggagctggcctgctacacctacagcatggtggtggtgcccctgtatgacaccctgggccctggggccatccgctacatcatcaacacagctgacatcagcacagtgattgtggacaagccccagaaggctgtgctgctgctggagcacgtggagaggaaggagaccccaggcctgaagctgatcatcctgatggacccctttgaggaggccctgaaggagcggggccagaagtgtggggtggtgatcaagtccatgcaggccgtggaggactgtggccaggagaaccaccaggcccctgtgcccccccagccagatgacctgagcatcgtgtgcttcaccagcggcaccaccggcaaccccaagggggccatgctgacccacggcaatgtggtggccgacttcagcggcttcctgaaggtgacagagaaggtgatcttcccccggcaggatgatgtgctgatctccttcctgcccctggcccacatgtttgagagggtcatccagagcgtggtgtactgccacggcggccgggtgggcttcttccagggcgacatccggctgctgagtgatgacatgaaggccctgtgccccaccatcttccctgtggtgccccggctgctgaacaggatgtatgacaagatcttcagccaggccaacacccccctgaagcgctggctgctggagtttgctgccaagaggaagcaggccgaggtgcgcagcggcatcatcagaaatgacagcatctgggatgagctgttcttcaacaagatccaggccagcctgggcggctgtgtgaggatgattgtgactggagctgccccagccagccccaccgtgctgggcttcctgcgggccgccctgggctgccaggtgtatgagggctacggccagacagagtgcacagctggctgcaccttcaccacccctggggactggaccagcggccacgtgggcgcccccctgccctgcaaccacatcaagctggtggatgtggaggagctgaactactgggcctgcaagggggagggggagatctgtgtgcggggccccaacgtgttcaagggctacctgaaggaccctgacaggaccaaggaggccctggacagtgatggctggctgcacactggagacatcggcaagtggctgcctgctggcaccctgaagatcatcgacaggaagaagcacatcttcaagctggcccagggcgagtatgtggcccctgagaagattgagaacatctacatccgcagccagcctgtggcccagatctacgtgcatggagacagcctgaaggccttcctggtgggcatcgtggtgcctgaccctgaggtgatgcccagctgggcccagaagaggggcatcgagggcacctacgccgacctgtgcaccaacaaggacctgaagaaggccatcctggaggacatggtgcggctgggcaaggagagcggcctgcacagctttgagcaggtgaaggccatccacatccacagcgacatgttttctgtgcagaatggcctgctgacccccaccctgaaggccaagaggcctgagctgcgggagtacttcaagaagcagatcgaggagctgtacagcatctccatgtag

SEQ ID NO: 142506 - DNA, 2094 bp, synthetic construct
  misc_feature 1..2094: note = Description of Artificial Sequence: Synthetic coding sequence
  source 1..2094: mol_type = other DNA
atgcagacccaggagatcctgcgcatcctgcggctgcctgagctgggggacctgggccagttcttccgcagcctgagcgccaccaccctggtgtccatgggcgccctggccgccatcctggcctactggttcacccaccggcccaaggccctgcagcccccctgcaacctgctgatgcagagcgaggaggtggaggacagcggcggggccaggagatctgtgattggcagcggcccccagctgctgacccactactatgatgatgcccggaccatgtaccaggtgttcagaagaggcctgagcatctctggaaatggcccctgcctgggcttcaggaagcccaagcagccctaccagtggctgagctaccaggaggtggccgacagagctgagttcctgggcagcggcctgctgcagcacaactgcaaggcctgcacagaccagttcatcggcgtgtttgcccagaacagacctgagtggatcatcgtggagctggcctgctacacctacagcatggtggtggtgcccctgtatgacaccctgggccctggggccatccgctacatcatcaacacagctgacatcagcacagtgattgtggacaagccccagaaggctgtgctgctgctggagcacgtggagaggaaggagaccccaggcctgaagctgatcatcctgatggacccctttgaggaggccctgaaggagcggggccagaagtgtggggtggtgatcaagtccatgcaggccgtggaggactgtggccaggagaaccaccaggcccctgtgcccccccagccagatgacctgagcatcgtgtgcttcaccagcggcaccaccggcaaccccaagggggccatgctgacccacggcaatgtggtggccgacttcagcggcttcctgaaggtgacagagagccagtgggcccccacctgtgctgatgtgcacatctcctacctgcccctggcccacatgtttgagaggatggtgcagagcgtggtgtactgccacggcggccgggtgggcttcttccagggcgacatccggctgctgagtgatgacatgaaggccctgtgccccaccatcttccctgtggtgccccggctgctgaacaggatgtatgacaagatcttcagccaggccaacacccccctgaagcgctggctgctggagtttgctgccaagaggaagcaggccgaggtgcgcagcggcatcatcagaaatgacagcatctgggatgagctgttcttcaacaagatccaggccagcctgggcggctgtgtgaggatgattgtgactggagctgccccagccagccccaccgtgctgggcttcctgcgggccgccctgggctgccaggtgtatgagggctacggccagacagagtgcacagctggctgcaccttcaccacccctggggactggaccagcggccacgtgggcgcccccctgccctgcaaccacatcaagctggtggatgtggaggagctgaactactgggcctgcaagggggagggggagatctgtgtgcggggccccaacgtgttcaagggctacctgaaggaccctgacaggaccaaggaggccctggacagtgatggctggctgcacactggagacatcggcaagtggctgcctgctggcaccctgaagatcatcgacaggaagaagcacatcttcaagctggcccagggcgagtatgtggcccctgagaagattgagaacatctacatccgcagccagcctgtggcccagatctacgtgcatggagacagcctgaaggccttcctggtgggcatcgtggtgcctgaccctgaggtgatgcccagctgggcccagaagaggggcatcgagggcacctacgccgacctgtgcaccaacaaggacctgaagaaggccatcctggaggacatggtgcggctgggcaaggagagcggcctgcacagctttgagcaggtgaaggccatccacatccacagcgacatgttttctgtgcagaatggcctgctgacccccaccctgaaggccaagaggcctgagctgcgggagtacttcaagaagcagatcgaggagctgtacagcatctccatgtag

SEQ ID NO: 142507 - DNA, 2127 bp, synthetic construct
  misc_feature 1..2127: note = Description of Artificial Sequence: Synthetic coding sequence
  source 1..2127: mol_type = other DNA
atgcctgagtttgtgctgagcctgctggagaagatgcagacccaggagatcctgcgcatcctgcggctgcctgagctgggggacctgggccagttcttccgcagcctgagcgccaccaccctggtgtccatgggcgccctggccgccatcctggcctactggttcacccaccggcccaaggccctgcagcccccctgcaacctgctgatgcagagcgaggaggtggaggacagcggcggggcccggcgcagcgtcatcggcagcggcccccagctgctgacccactactatgatgatgcccggaccatgtaccaggtgttccggcggggcctgagcatctctggaaatggcccctgcctgggcttcaggaagcccaagcagccctaccagtggctgagctaccaggaggtggccgacagagctgagttcctgggcagcggcctgctgcagcacaactgcaaggcctgcacagaccagttcatcggcgtgtttgcccagaacagacctgagtggatcatcgtggagctggcctgctacacctacagcatggtggtggtgcccctgtatgacaccctgggccctggggccatccgctacatcatcaacacagctgacatcagcaccgtcatcgtggacaagccccagaaggctgtgctgctgctggagcacgtggagaggaaggagaccccaggcctgaagctgatcatcctgatggacccctttgaggaggccctgaaggagcggggccagaagtgtggggtggtgatcaagtccatgcaggccgtggaggactgtggccaggagaaccaccaggcccctgtgcccccccagccagatgacctgagcatcgtgtgcttcaccagcggcaccactggaaaccccaagggggccatgctgacccatggaaatgtggtggccgacttcagcggcttcctgaaggtgacagagaaggtgatcttcccccggcaggatgatgtgctgatctccttcctgcccctggcccacatgtttgagagggtcatccagagcgtggtgtactgccacggcggccgggtgggcttcttccagggcgacatccggctgctgagtgatgacatgaaggccctgtgccccaccatcttccctgtggtgccccggctgctgaacaggatgtatgacaagatcttcagccaggccaacacccccctgaagcgctggctgctggagtttgctgccaagaggaagcaggccgaggtgcgcagcggcatcatcagaaatgacagcatctgggatgagctgttcttcaacaagatccaggccagcctgggcggctgtgtgaggatgattgtgactggagctgccccagccagccccaccgtgctgggcttcctgcgggccgccctgggctgccaggtgtatgagggctacggccagacagaatgtacagctggctgcaccttcaccacccctggggactggaccagcggccacgtgggcgcccccctgccctgcaaccacatcaagctggtggatgtggaggagctgaactactgggcctgcaagggggagggggagatctgtgtgcggggccccaacgtgttcaagggctacctgaaggaccctgacaggaccaaggaggccctggacagtgatggctggctgcacactggagacatcggcaagtggctgcctgctggcaccctgaagatcatcgacaggaagaagcacatcttcaagctggcccagggcgagtatgtggcccctgagaagattgagaacatctacatccgcagccagcctgtggcccagatctacgtgcacggggacagcctgaaggccttcctggtgggcatcgtggtgcctgaccctgaggtgatgcccagctgggcccagaagaggggcatcgagggcacctatgctgacctgtgcaccaacaaggacctgaagaaggccatcctggaggacatggtgcggctgggcaaggagagcggcctgcacagctttgagcaggtgaaggccatccacatccacagcgacatgttttctgtgcagaatggcctgctgacccccaccctgaaggccaagaggcctgagctgcgggagtacttcaagaagcagatcgaggagctgtacagcatctccatgtag

SEQ ID NO: 142508 - DNA, 2004 bp, synthetic construct
  misc_feature 1..2004: note = Description of Artificial Sequence: Synthetic coding sequence
  source 1..2004: mol_type = other DNA
atgcagacccaggagatcctgcgcatcctgcggctgcctgagctgggggacctgggccagttcttccgcagcctgagcgccaccaccctggtgtccatgggcgccctggccgccatcctggcctactggttcacccaccggcccaaggccctgcagcccccctgcaacctgctgatgcagagcgaggaggtggaggacagcggcggggccaggagatctgtgattggcagcggcccccagctgctgacccactactatgatgatgcccggaccatgtaccaggtgttcagaagaggcctgagcatctctggaaatggcccctgcctgggcttcaggaagcccaagcagccctaccagtggctgagctaccaggaggtggccgacagagctgagttcctgggcagcggcctgctgcagcacaactgcaaggcctgcacagaccagttcatcggcgtgtttgcccagaacagacctgagtggatcatcgtggagctggcctgctacacctacagcatggtggtggtgcccctgtatgacaccctgggccctggggccatccgctacatcatcaacacagctgacatcagcacagtgattgtggacaagccccagaaggctgtgctgctgctggagcacgtggagaggaaggagaccccaggcctgaagctgatcatcctgatggacccctttgaggaggccctgaaggagcggggccagaagtgtggggtggtgatcaagtccatgcaggccgtggaggactgtggccaggagaaccaccaggcccctgtgcccccccagccagatgacctgagcatcgtgtgcttcaccagcggcaccaccggcaaccccaagggggccatgctgacccacggcaatgtggtggccgacttcagcggcttcctgaaggtgacagagagccagtgggcccccacctgtgctgatgtgcacatctcctacctgcccctggcccacatgtttgagaggatggtgcagagcgtggtgtactgccacggcggccgggtgggcttcttccagggcgacatccggctgctgagtgatgacatgaaggccctgtgccccaccatcttccctgtggtgccccggctgctgaacaggatgtatgacaagatcttcagccaggccaacacccccctgaagcgctggctgctggagtttgctgccaagaggaagcaggccgaggtgcgcagcggcatcatcagaaatgacagcatctgggatgagctgttcttcaacaagatccaggccagcctgggcggctgtgtgaggatgattgtgactggagctgccccagccagccccaccgtgctgggcttcctgcgggccgccctgggctgccaggtgtatgagggctacggccagacagagtgcacagctggctgcaccttcaccacccctggggactggaccagcggccacgtgggcgcccccctgccctgcaaccacatcaagctggtggatgtggaggagctgaactactgggcctgcaagggggagggggagatctgtgtgcggggccccaacgtgttcaagggctacctgaaggaccctgacaggaccaaggaggccctggacagtgatggctggctgcacactggagacatcggcaagtggctgcctgctggcaccctgaagatcatcgacaggaagaagcacatcttcaagctggcccagggcgagtatgtggcccctgagaagattgagaacatctacatccgcagccagcctgtggcccagatctacgtgcatggagacagcctgaaggccttcctggtgggcatcgtggtgcctgaccctgaggtgatgcccagctgggcccagaagaggggcatcgagggcacctacgccgacctgtgcaccaacaaggacctgaagaaggccatcctggaggacatggtgcggctgggcaaggagagcggcctgcacagctttgagcaggacctgccccagtgcctgatccagatcaaggtgttcagcaagtactag

SEQ ID NO: 142509 - DNA, 2169 bp, synthetic construct
  misc_feature 1..2169: note = Description of Artificial Sequence: Synthetic coding sequence
  source 1..2169: mol_type = other DNA
atgctgaccttcttcctggtgtctgggggcagcctgtggctgtttgtggagtttgtgctgagcctgctggagaagatgcagacccaggagatcctgcgcatcctgcggctgcctgagctgggggacctgggccagttcttccgcagcctgagcgccaccaccctggtgtccatgggcgccctggccgccatcctggcctactggttcacccaccggcccaaggccctgcagcccccctgcaacctgctgatgcagagcgaggaggtggaggacagcggcggggcccggcgcagcgtcatcggcagcggcccccagctgctgacccactactatgatgatgcccggaccatgtaccaggtgttccggcggggcctgagcatctctggaaatggcccctgcctgggcttcaggaagcccaagcagccctaccagtggctgagctaccaggaggtggccgacagagctgagttcctgggcagcggcctgctgcagcacaactgcaaggcctgcacagaccagttcatcggcgtgtttgcccagaacagacctgagtggatcatcgtggagctggcctgctacacctacagcatggtggtggtgcccctgtatgacaccctgggccctggggccatccgctacatcatcaacacagctgacatcagcaccgtcatcgtggacaagccccagaaggctgtgctgctgctggagcacgtggagaggaaggagaccccaggcctgaagctgatcatcctgatggacccctttgaggaggccctgaaggagcggggccagaagtgtggggtggtgatcaagtccatgcaggccgtggaggactgtggccaggagaaccaccaggcccctgtgcccccccagccagatgacctgagcatcgtgtgcttcaccagcggcaccactggaaaccccaagggggccatgctgacccatggaaatgtggtggccgacttcagcggcttcctgaaggtgacagagaaggtgatcttcccccggcaggatgatgtgctgatctccttcctgcccctggcccacatgtttgagagggtcatccagagcgtggtgtactgccacggcggccgggtgggcttcttccagggcgacatccggctgctgagtgatgacatgaaggccctgtgccccaccatcttccctgtggtgccccggctgctgaacaggatgtatgacaagatcttcagccaggccaacacccccctgaagcgctggctgctggagtttgctgccaagaggaagcaggccgaggtgcgcagcggcatcatcagaaatgacagcatctgggatgagctgttcttcaacaagatccaggccagcctgggcggctgtgtgaggatgattgtgactggagctgccccagccagccccaccgtgctgggcttcctgcgggccgccctgggctgccaggtgtatgagggctacggccagacagaatgtacagctggctgcaccttcaccacccctggggactggaccagcggccacgtgggcgcccccctgccctgcaaccacatcaagctggtggatgtggaggagctgaactactgggcctgcaagggggagggggagatctgtgtgcggggccccaacgtgttcaagggctacctgaaggaccctgacaggaccaaggaggccctggacagtgatggctggctgcacactggagacatcggcaagtggctgcctgctggcaccctgaagatcatcgacaggaagaagcacatcttcaagctggcccagggcgagtatgtggcccctgagaagattgagaacatctacatccgcagccagcctgtggcccagatctacgtgcacggggacagcctgaaggccttcctggtgggcatcgtggtgcctgaccctgaggtgatgcccagctgggcccagaagaggggcatcgagggcacctatgctgacctgtgcaccaacaaggacctgaagaaggccatcctggaggacatggtgcggctgggcaaggagagcggcctgcacagctttgagcaggtgaaggccatccacatccacagcgacatgttttctgtgcagaatggcctgctgacccccaccctgaaggccaagaggcctgagctgcgggagtacttcaagaagcagatcgaggagctgtacagcatctccatgtag

SEQ ID NO: 142510 - DNA, 2139 bp, synthetic construct
  misc_feature 1..2139: note = Description of Artificial Sequence: Synthetic coding sequence
  source 1..2139: mol_type = other DNA
atgcagacccaggagatcctgcgcatcctgcggctgcctgagctgggggacctgggccagttcttccgcagcctgagcgccaccaccctggtgtccatgggcgccctggccgccatcctggcctactggttcacccaccggcccaaggccctgcagcccccctgcaacctgctgatgcagagcgaggaggtggaggacagcggcggggccaggagatctgtgattggcagcggcccccagctgctgacccactactatgatgatgcccggaccatgtaccaggtgttcagaagaggcctgagcatctctggaaatggcccctgcctgggcttcaggaagcccaagcagccctaccagtggctgagctaccaggaggtggccgacagagctgagttcctgggcagcggcctgctgcagcacaactgcaaggcctgcacagaccagttcatcggcgtgtttgcccagaacagacctgagtggatcatcgtggagctggcctgctacacctacagcatggtggtggtgcccctgtatgacaccctgggccctggggccatccgctacatcatcaacacaggcctgagctgccaggagggcgccagcgccacagccagcacccaggccgacatcagcaccgtcatcgtggacaagccccagaaggctgtgctgctgctggagcacgtggagaggaaggagaccccaggcctgaagctgatcatcctgatggacccctttgaggaggccctgaaggagcggggccagaagtgtggggtggtgatcaagtccatgcaggccgtggaggactgtggccaggagaaccaccaggcccctgtgcccccccagccagatgacctgagcatcgtgtgcttcaccagcggcaccactggaaaccccaagggggccatgctgacccatggaaatgtggtggccgacttcagcggcttcctgaaggtgacagagaaggtgatcttcccccggcaggatgatgtgctgatctccttcctgcccctggcccacatgtttgagagggtcatccagagcgtggtgtactgccacggcggccgggtgggcttcttccagggcgacatccggctgctgagtgatgacatgaaggccctgtgccccaccatcttccctgtggtgccccggctgctgaacaggatgtatgacaagatcttcagccaggccaacacccccctgaagcgctggctgctggagtttgctgccaagaggaagcaggccgaggtgcgcagcggcatcatcagaaatgacagcatctgggatgagctgttcttcaacaagatccaggccagcctgggcggctgtgtgaggatgattgtgactggagctgccccagccagccccaccgtgctgggcttcctgcgggccgccctgggctgccaggtgtatgagggctacggccagacagaatgtacagctggctgcaccttcaccacccctggggactggaccagcggccacgtgggcgcccccctgccctgcaaccacatcaagctggtggatgtggaggagctgaactactgggcctgcaagggggagggggagatctgtgtgcggggccccaacgtgttcaagggctacctgaaggaccctgacaggaccaaggaggccctggacagtgatggctggctgcacactggagacatcggcaagtggctgcctgctggcaccctgaagatcatcgacaggaagaagcacatcttcaagctggcccagggcgagtatgtggcccctgagaagattgagaacatctacatccgcagccagcctgtggcccagatctacgtgcacggggacagcctgaaggccttcctggtgggcatcgtggtgcctgaccctgaggtgatgcccagctgggcccagaagaggggcatcgagggcacctatgctgacctgtgcaccaacaaggacctgaagaaggccatcctggaggacatggtgcggctgggcaaggagagcggcctgcacagctttgagcaggtgaaggccatccacatccacagcgacatgttttctgtgcagaatggcctgctgacccccaccctgaaggccaagaggcctgagctgcgggagtacttcaagaagcagatcgaggagctgtacagcatctccatgtag

SEQ ID NO: 142511 - DNA, 2094 bp, synthetic construct; identical to SEQ ID NO: 142506
  misc_feature 1..2094: note = Description of Artificial Sequence: Synthetic coding sequence
  source 1..2094: mol_type = other DNA

SEQ ID NO: 142512 - DNA, 1821 bp, synthetic construct
  misc_feature 1..1821: note = Description of Artificial Sequence: Synthetic coding sequence
  source 1..1821: mol_type = other DNA
atgtaccaggtgttccggcggggcctgagcatctctggaaatggcccctgcctgggcttcaggaagcccaagcagccctaccagtggctgagctaccaggaggtggccgacagagctgagttcctgggcagcggcctgctgcagcacaactgcaaggcctgcacagaccagttcatcggcgtgtttgcccagaacagacctgagtggatcatcgtggagctggcctgctacacctacagcatggtggtggtgcccctgtatgacaccctgggccctggggccatccgctacatcatcaacacagctgacatcagcaccgtcatcgtggacaagccccagaaggctgtgctgctgctggagcacgtggagaggaaggagaccccaggcctgaagctgatcatcctgatggacccctttgaggaggccctgaaggagcggggccagaagtgtggggtggtgatcaagtccatgcaggccgtggaggactgtggccaggagaaccaccaggcccctgtgcccccccagccagatgacctgagcatcgtgtgcttcaccagcggcaccactggaaaccccaagggggccatgctgacccatggaaatgtggtggccgacttcagcggcttcctgaaggtgacagagaaggtgatcttcccccggcaggatgatgtgctgatctccttcctgcccctggcccacatgtttgagagggtcatccagagcgtggtgtactgccacggcggccgggtgggcttcttccagggcgacatccggctgctgagtgatgacatgaaggccctgtgccccaccatcttccctgtggtgccccggctgctgaacaggatgtatgacaagatcttcagccaggccaacacccccctgaagcgctggctgctggagtttgctgccaagaggaagcaggccgaggtgcgcagcggcatcatcagaaatgacagcatctgggatgagctgttcttcaacaagatccaggccagcctgggcggctgtgtgaggatgattgtgactggagctgccccagccagccccaccgtgctgggcttcctgcgggccgccctgggctgccaggtgtatgagggctacggccagacagaatgtacagctggctgcaccttcaccacccctggggactggaccagcggccacgtgggcgcccccctgccctgcaaccacatcaagctggtggatgtggaggagctgaactactgggcctgcaagggggagggggagatctgtgtgcggggccccaacgtgttcaagggctacctgaaggaccctgacaggaccaaggaggccctggacagtgatggctggctgcacactggagacatcggcaagtggctgcctgctggcaccctgaagatcatcgacaggaagaagcacatcttcaagctggcccagggcgagtatgtggcccctgagaagattgagaacatctacatccgcagccagcctgtggcccagatctacgtgcacggggacagcctgaaggccttcctggtgggcatcgtggtgcctgaccctgaggtgatgcccagctgggcccagaagaggggcatcgagggcacctatgctgacctgtgcaccaacaaggacctgaagaaggccatcctggaggacatggtgcggctgggcaaggagagcggcctgcacagctttgagcaggtgaaggccatccacatccacagcgacatgttttctgtgcagaatggcctgctgacccccaccctgaaggccaagaggcctgagctgcgggagtacttcaagaagcagatcgaggagctgtacagcatctccatgtag

SEQ ID NO: 142513 - DNA, 1386 bp, synthetic construct
  misc_feature 1..1386: note = Description of Artificial Sequence: Synthetic coding sequence
  source 1..1386: mol_type = other DNA
atgagccggcaggtggtgcgcagcagcaagttcagacatgtgtttggccagcctgccaaggctgaccagtgctatgaagatgtgcgggtgtcccagaccacctgggacagcggcttctgtgctgtgaaccccaagtttgtggccctgatctgtgaggccagcggcggcggggccttcctggtgctgcccctgggcaagacaggccgggtggacaagaatgcccccaccgtgtgtggccacacagcccctgtgctggacatcgcctggtgcccccacaatgacaacgtgattgccagcggcagcgaggactgcaccgtgatggtgtgggagatcccagatggcggcctgatgctgcccctgcgggagcctgtggtgaccctggagggccacaccaagagggtgggcatcgtggcctggcacaccacagcccagaatgtgctgctgtctgctggctgtgacaacgtcatcatggtgtgggatgtgggcactggagctgccatgctgaccctgggccctgaggtgcacccagacaccatctacagcgtggactggagcagagatggcggcctcatctgcaccagctgccgggacaagagggtgcgcatcatcgagcccaggaaaggaacagtggtggccgagaaggaccggccccatgagggcaccaggcctgtgcgggctgtgtttgtgtctgagggcaagatcctgaccaccggcttcagcaggatgtctgagcggcaggtggccctgtgggacaccaagcacctggaggagcccctgagcctgcaggagctggacaccagcagcggcgtgctgctgcccttctttgatcctgacaccaacatcgtgtacctgtgtgggaaaggagacagcagcatccgctactttgagatcaccagcgaggcccccttcctgcactacctgtccatgttcagcagcaaggagagccagaggggcatgggctacatgcccaagaggggcctggaggtgaacaagtgtgagatcgcccgcttctacaagctgcatgaaagaagatgtgagcccatcgccatgacagtgcccaggaagagtgacctcttccaggaggacctgtacccacccacagctggccctgaccctgccctgacagctgaggagtggctgggcggcagagatgctggccccctgctgatcagcctgaaggatggctacgtgccccccaagagccgggagctgcgggtgaacagaggcctggacaccggcagaagaagagctgcccctgaggccagcggcacccccagcagtgatgctgtgtcccggctggaggaggagatgaggaagctgcaggccaccgtgcaggagctgcagaagaggctggaccggctggaggagaccgtgcaggccaagtag

SEQ ID NO: 142514 - DNA, 1734 bp, synthetic construct
  misc_feature 1..1734: note = Description of Artificial Sequence: Synthetic coding sequence
  source 1..1734: mol_type = other DNA
atgcagtggctgatgaggttccgcaccctgtggggcatccacaagagcttccacaacatccacccagcccccagccagctgcgctgccgcagcctgtctgaatttggagccccccgctggaatgactatgaggtgcctgaggagttcaactttgccagctatgtgctggactactgggcccagaaggagaaggagggcaagaggggccccaacccagccttctggtgggtgaatggccagggagatgaggtgaagtggagcttccgggagatgggagacctgacccggcgggtggccaacgtgttcacccagacctgtggcctgcagcagggcgaccacctggccctgatgctgccccgggtgcctgagtggtggctggtggccgtgggctgcatgaggacaggcatcatcttcatcccagccaccatcctgctgaaggccaaggacatcctgtaccgcctgcagctgagcaaggccaagggcatcgtgaccattgatgccctggccagcgaggtggacagcatcgccagccagtgccccagcctgaagaccaagctgctggtgtctgaccacagccgggagggctggctggacttccgcagcctggtgaagagcgccagccctgagcacacctgtgtgaagagcaagaccctggaccccatggtgatcttcttcaccagcggcaccaccggcttccccaagatggccaagcacagccacggcctggccctgcagcccagcttccctggcagcaggaagctgcggagcctgaagaccagtgatgtgtcctggtgcctgagtgacagcggctggatcgtggccaccatctggaccctggtggagccctggacagctggctgcaccgtcttcatccaccacctgccccagtttgacaccaaggtgatcatccagaccctgctgaagtaccccatcaaccacttctggggcgtgagcagcatctacaggatgatcctgcagcaggacttcaccagcatccgcttccctgccctggagcactgctacacaggaggagaggtggtgctgcccaaggaccaggaggagtggaagagaagaacaggcctgctgctgtatgaaaattatggccagagcgagaccggcctcatctgtgccacctactggggcatgaagatcaagccaggcttcatgggcaaggccaccccaccctatgatgtgcaggtgattgatgacaagggcagcatcctgccccccaacacagagggcaacatcggcatccgcatcaagcctgtgcggcctgtgtccctcttcatgtgctatgaaggagaccctgagaagacagccaaggtggagtgtggggacttctacaacacaggagaccggggcaagatggatgaggagggctacatctgcttcctgggccgcagtgatgacatcatcaatgccagcggctacagaattggccctgctgaggtggagagcgccctggtggagcaccctgctgtggccgagagcgctgtggtgggcagcccagaccccatccggggggaggtggtgaaggccttcatcgtgctgaccccccagttcctgagccatgacaaggaccagctgaccaaggagctgcagcagcacgtgaagtctgtgacagccccctacaagtaccccaggaaggtggagtttgtgtctgagctgcccaagaccatcaccgggaagattgaaaggaaggagctgaggaagaaggagaccggccagatgtag

SEQ ID NO: 142515 - DNA, 1734 bp, synthetic construct; identical to SEQ ID NO: 142514
  misc_feature 1..1734: note = Description of Artificial Sequence: Synthetic coding sequence
  source 1..1734: mol_type = other DNA

SEQ ID NO: 142516 - DNA, 465 bp, synthetic construct
  misc_feature 1..465: note = Description of Artificial Sequence: Synthetic coding sequence
  source 1..465: mol_type = other DNA
atgcagtggctgatgaggttccgcaccctgtggggcatccacaagagcttccacaacatccacccagcccccagccagctgcgctgccgcagcctgtctgaatttggagccccccgctggaatgactatgaggtgcctgaggagttcaactttgccagctatgtgctggactactgggcccagaaggagaaggagggcaagaggggccccaacccagccttctggtgggtgaatggccagggagatgaggtgaagtggagcttccgggagatgggagacctgacccggcgggtggccaacgtgttcacccagacctgtggcctgcagcagggcgaccacctggccctgatgctgccccgggtgcctgagtggtggctggtggccgtgggctgcatgaggacaggcatcatcttcatcccagccaccatcctgctgaaggccaaggacatcctgtaccgcctgtag

SEQ ID NO: 142517 - DNA, 1533 bp, synthetic construct
  misc_feature 1..1533: note = Description of Artificial Sequence: Synthetic coding sequence
  source 1..1533: mol_type = other DNA
atgaggcctggcctgtccttcctgctggccctgctcttcttcctgggccaggccgccggggacctgggagatgtgggcccccccatccccagccctggcttcagcagcttccctggggtggacagcagcagcagcttcagcagcagcagccgcagcggcagcagcagcagccgcagcctgggcagcggcggctctgtgtcccagctgttcagcaacttcaccggctctgtggatgaccggggcacctgccagtgcagcgtgtccctgcctgacaccaccttccctgtggacagagtggagcggctggagttcaccgcccacgtgctgagccagaagtttgagaaggagctgagcaaggtgcgggagtatgtgcagctgatctctgtgtatgagaagaagctgctgaacctgactgtgagaattgacatcatggagaaggacaccatctcctacacagagctggactttgagctgatcaaggtggaggtgaaggagatggagaagctggtgatccagctgaaggagagctttggaggcagcagcgagatcgtggaccagctggaggtggagatccggaacatgaccctgctggtggagaagctggagaccctggacaagaacaacgtgctggccatcagaagagagatcgtggccctgaagaccaagctgaaggaatgtgaggccagcaaggaccagaacacccctgtggtgcaccccccacccaccccaggcagctgtggccacggcggcgtggtgaacatcagcaagcccagcgtggtgcagctgaactggaggggcttctcctacctgtatggagcctggggccgggactacagcccccagcaccccaacaagggcctgtactgggtggcccccctgaacacagatggccgcctgctggagtactaccgcctgtacaacaccctggatgacctgctgctgtacatcaatgcccgggagctgcgcatcacctacggccagggcagcggcacagctgtgtacaacaacaacatgtatgtgaacatgtacaacacaggcaacatcgcccgggtgaacctgaccaccaacaccatcgctgtgacccagaccctgcccaatgctgcctacaacaaccgcttctcctatgccaacgtggcctggcaggacatcgactttgctgtggatgaaaatggcctgtgggtgatctacagcacagaggccagcacaggcaacatggtgatcagcaagctgaatgacaccaccctgcaggtgctgaacacctggtacaccaagcagtacaagcccagcgccagcaatgccttcatggtgtgtggggtgctgtatgccaccaggaccatgaacaccaggacagaggagatcttctactactatgacaccaacacaggcaaggagggcaagctggacatcgtgatgcacaagatgcaggagaaggtgcagagcatcaactacaacccctttgaccagaagctgtatgtgtacaatgatggctacctgctgaactatgacctgtctgtgctgcagaagccccagtag

SEQ ID NO: 142518 - DNA, 1734 bp, synthetic construct
  misc_feature 1..1734: note = Description of Artificial Sequence: Synthetic coding sequence
  source 1..1734: mol_type = other DNA
atgcactggctgaggaaggtgcagggcctgtgcaccctgtggggcacccagatgagcagcaggaccctgtacatcaacagccggcagctggtgtccctgcagtggggccaccaggaggtgcctgccaagttcaactttgccagtgatgtgctggaccactgggccgacatggagaaggccggcaagaggctgcccagccctgccctgtggtgggtgaatggcaagggcaaggagctgatgtggaacttccgggagctgtctgagaacagccagcaggccgccaacgtgctgagcggggcctgtggcctgcagagaggagacagagtggccgtggtgctgccccgggtgcctgagtggtggctggtgatcctgggctgcatccgggccggcctcatcttcatgcctggcaccatccagatgaagagcacagacatcctgtaccgcctgcagatgagcaaggccaaggccatcgtggccggagatgaagtcatccaggaggtggacacagtggcctctgaatgtcccagcctgcgcatcaagctgctggtgtctgagaagagctgtgatggctggctgaacttcaagaagctgctgaatgaggccagcaccacccaccactgtgtggagaccggcagccaggaggccagcgccatctacttcaccagcggcaccagcggcctgcccaagatggccgagcacagctacagcagcctgggcctgaaggccaagatggatgctggctggacaggcctgcaggccagtgacatcatgtggaccatcagtgacaccggctggatcctgaacatcctgtgcagcctgatggagccctgggccctgggcgcctgcacctttgtgcacctgctgcccaagtttgaccccctggtgatcctgaagaccctgagcagctaccccatcaagtccatgatgggcgcccccatcgtgtacaggatgctgctgcagcaggacctgagcagctacaagttcccccacctgcagaactgtgtgacagtgggggagagcctgctgcctgagaccctggagaactggagggcccagacaggcctggacatccgggagagctatggccagacagagaccggcctgacctgcatggtgtccaagaccatgaagatcaagccaggctacatgggcacagctgccagctgctatgatgtgcagatcattgatgacaagggaaatgtgctgcccccaggcacagaaggagacatcggcatccgggtgaagcccatccggcccatcggcatcttcagcggctacgtggacaacccagacaagacagctgccaacatccggggggacttctggctgctgggggaccggggcatcaaggatgaagatggctacttccagttcatgggccgggccaatgacatcatcaacagcagcggctacagaattggccccagcgaggtggagaatgccctgatggagcaccctgctgtggtggagacagctgtgatcagcagcccagaccctgtgcggggggaggtggtgaaggcctttgtggtgctggccagccagttcctgagccatgaccctgagcagctgaccaaggagctgcagcagcacgtgaagtctgtgacagccccctacaagtaccccaggaagattgaatttgtgctgaacctgcccaagacagtgacaggcaagatccagagggccaagctgcgggacaaggagtggaagatgtctgggaaggcccgggcccagtag

SEQ ID NO: 142519 - DNA, 1497 bp, synthetic construct
  misc_feature 1..1497: note = Description of Artificial Sequence: Synthetic coding sequence
  source 1..1497: mol_type = other DNA
atgtggaacttccgggagctgtctgagaacagccagcaggccgccaacgtgctgagcggggcctgtggcctgcagagaggagacagagtggccgtggtgctgccccgggtgcctgagtggtggctggtgatcctgggctgcatccgggccggcctcatcttcatgcctggcaccatccagatgaagagcacagacatcctgtaccgcctgcagatgagcaaggccaaggccatcgtggccggagatgaggtgatccaggaggtggacacagtggccagcgagtgccccagcctgcgcatcaagctgctggtgtctgagaagagctgtgatggctggctgaacttcaagaagctgctgaatgaggccagcaccacccaccactgtgtggagaccggcagccaggaggccagcgccatctacttcaccagcggcaccagcggcctgcccaagatggccgagcacagctacagcagcctgggcctgaaggccaagatggatgctggctggacaggcctgcaggccagtgacatcatgtggaccatcagtgacaccggctggatcctgaacatcctgtgcagcctgatggagccctgggccctgggcgcctgcacctttgtgcacctgctgcccaagtttgaccccctggtgatcctgaagaccctgagcagctaccccatcaagtccatgatgggcgcccccatcgtgtacaggatgctgctgcagcaggacctgagcagctacaagttcccccacctgcagaactgtgtgacagtgggggagagcctgctgcctgagaccctggagaactggagggcccagacaggcctggacatccgggagagctatggccagacagaaacaggcctgacctgcatggtgtccaagaccatgaagatcaagccaggctacatgggcacagctgccagctgctatgatgtgcagatcattgatgacaagggaaatgtgctgcccccaggcacagaaggagacatcggcatccgggtgaagcccatccggcccatcggcatcttcagcggctacgtggacaacccagacaagacagctgccaacatccggggggacttctggctgctgggggaccggggcatcaaggatgaagatggctacttccagttcatgggccgggccaatgacatcatcaacagcagcggctaccgcatcggccccagcgaggtggagaatgccctgatggagcaccctgctgtggtggagacagctgtgatcagcagcccagaccctgtgcggggggaggtggtgaaggcctttgtggtgctggccagccagttcctgagccatgaccctgagcagctgaccaaggagctgcagcagcacgtgaagtctgtgacagccccctacaagtaccccaggaagattgaatttgtgctgaacctgcccaagacagtgacaggcaagatccagagggccaagctgcgggacaaggagtggaagatgtctgggaaggcccgggcccagtag

SEQ ID NO: 142520 - DNA, 627 bp, synthetic construct
  misc_feature 1..627: note = Description of Artificial Sequence: Synthetic coding sequence
  source 1..627: mol_type = other DNA
atgcactggctgaggaaggtgcagggcctgtgcaccctgtggggcacccagatgagcagcaggaccctgtacatcaacagccggcagctggtgtccctgcagtggggccaccaggaggtgcctgccaagttcaactttgccagtgatgtgctggaccactgggccgacatggagaaggccggcaagaggctgcccagccctgccctgtggtgggtgaatggcaagggcaaggagctgatgtggaacttccgggagctgtctgagaacagccagcaggccgccaacgtgctgagcggggcctgtggcctgcagagaggagacagagtggccgtggtgctgccccgggtgcctgagtggtggctggtgatcctgggctgcatccgggccggcctcatcttcatgcctggcaccatccagatgaagagcacagacatcctgtaccgcctgcagatgagcaaggccaaggccatcgtggccggagatgaagtcatccaggaggtggacacagtggcctctgaatgtcccagcctgcgcatcaagctgctggtgtctgagaagagctgtgatggctggctgaacttcaagaagctgctgaagtacaaggtgcgccacagagatgtgaagtag

SEQ ID NO: 142521 - DNA, 1050 bp, synthetic construct
  misc_feature 1..1050: note = Description of Artificial Sequence: Synthetic coding sequence
  source 1..1050: mol_type = other DNA
atgaggcaccccccactcatcaccgtgtggaggctggaggccaagatggatgctggctggacaggcctgcaggccagtgacatcatgtggaccatcagtgacaccggctggatcctgaacatcctgtgcagcctgatggagccctgggccctgggcgcctgcacctttgtgcacctgctgcccaagtttgaccccctggtgatcctgaagaccctgagcagctaccccatcaagtccatgatgggcgcccccatcgtgtacaggatgctgctgcagcaggacctgagcagctacaagttcccccacctgcagaactgtgtgacagtgggggagagcctgctgcctgagaccctggagaactggagggcccagacaggcctggacatccgggagagctatggccagacagagaccggcctgacctgcatggtgtccaagaccatgaagatcaagccaggctacatgggcacagctgccagctgctatgatgtgcagatcattgatgacaagggaaatgtgctgcccccaggcacagaaggagacatcggcatccgggtgaagcccatccggcccatcggcatcttcagcggctacgtggacaacccagacaagacagctgccaacatccggggggacttctggctgctgggggaccggggcatcaaggatgaagatggctacttccagttcatgggccgggccaatgacatcatcaacagcagcggctacagaattggccccagcgaggtggagaatgccctgatggagcaccctgctgtggtggagacagctgtgatcagcagcccagaccctgtgcggggggaggtggtgaaggcctttgtggtgctggccagccagttcctgagccatgaccctgagcagctgaccaaggagctgcagcagcacgtgaagtctgtgacagccccctacaagtaccccaggaagattgaatttgtgctgaacctgcccaagacagtgacaggcaagatccagagggccaagctgcgggacaaggagtggaagatgtctgggaaggcccgggcccagtag

SEQ ID NO: 142522 - DNA, 1734 bp, synthetic construct; identical to SEQ ID NO: 142518
  misc_feature 1..1734: note = Description of Artificial Sequence: Synthetic coding sequence
  source 1..1734: mol_type = other DNA

SEQ ID NO: 142523 - DNA, 1734 bp, synthetic construct
  misc_feature 1..1734: note = Description of Artificial Sequence: Synthetic coding sequence
  source 1..1734: mol_type = other DNA
atgcactggctgaggaaggtgcagggcctgtgcaccctgtggggcacccagatgagcagcaggaccctgtacatcaacagccggcagctggtgtccctgcagtggggccaccaggaggtgcctgccaagttcaactttgccagtgatgtgctggaccactgggccgacatggagaaggccggcaagaggctgcccagccctgccctgtggtgggtgaatggcaagggcaaggagctgatgtggaacttccgggagctgtctgagaacagccagcaggccgccaacatcctgagcggggcctgtggcctgcagagaggagacagagtggccgtgatgctgccccgggtgcctgagtggtggctggtgatcctgggctgcatccgggccggcctcatcttcatgcctggcaccatccagatgaagagcacagacatcctgtaccgcctgcagatgagcaaggccaaggccatcgtggccggagatgaagtcatccaggaggtggacacagtggcctctgaatgtcccagcctgcgcatcaagctgctggtgtctgagaagagctgtgatggctggctgaacttcaagaagctgctgaatgaggccagcaccacccaccactgtgtggagaccggcagccaggaggccagcgccatctacttcaccagcggcaccagcggcctgcccaagatggccgagcacagctacagcagcctgggcctgaaggccaagatggatgctggctggacaggcctgcaggccagtgacatcatgtggaccatcagtgacaccggctggatcctgaacatcctgggcagcctgctggagagctggaccctgggcgcctgcacctttgtgcacctgctgcccaagtttgaccccctggtgatcctgaagaccctgagcagctaccccatcaagtccatgatgggcgcccccatcgtgtacaggatgctgctgcagcaggacctgagcagctacaagttcccccacctgcagaactgcctggccggcggggagagcctgctgcctgagaccctggagaactggagggcccagacaggcctggacatccgggagttctacggccagacagagaccggcctgacctgcatggtgtccaagaccatgaagatcaagccaggctacatgggcacagctgccagctgctatgatgtgcaggtgattgatgacaagggaaatgtgctgcccccaggcacagaaggagacatcggcatccgggtgaagcccatccggcccatcggcatcttcagcggctacgtggagaacccagacaagacagctgccaacatccggggggacttctggctgctgggggaccggggcatcaaggatgaagatggctacttccagttcatgggccgggcagatgacatcatcaacagcagcggctacagaattggccccagcgaggtggagaatgccctgatgaagcaccctgctgtggtggagacagctgtgatcagcagcccagaccctgtgcggggggaggtggtgaaggccttcgtcatcctggccagccagttcctgagccatgaccctgagcagctgaccaaggagctgcagcagcacgtgaagtctgtgacagccccctacaagtaccccaggaagattgaatttgtgctgaacctgcccaagacagtgacaggcaagatccagaggaccaagctgcgggacaaggagtggaagatgtctgggaaggcccgggcccagtag

SEQ ID NO: 142524 - DNA, 627 bp, synthetic construct
  misc_feature 1..627: note = Description of Artificial Sequence: Synthetic coding sequence
  source 1..627: mol_type = other DNA
atgcactggctgaggaaggtgcagggcctgtgcaccctgtggggcacccagatgagcagcaggaccctgtacatcaacagccggcagctggtgtccctgcagtggggccaccaggaggtgcctgccaagttcaactttgccagtgatgtgctggaccactgggccgacatggagaaggccggcaagaggctgcccagccctgccctgtggtgggtgaatggcaagggcaaggagctgatgtggaacttccgggagctgtctgagaacagccagcaggccgccaacatcctgagcggggcctgtggcctgcagagaggagacagagtggccgtgatgctgccccgggtgcctgagtggtggctggtgatcctgggctgcatccgggccggcctcatcttcatgcctggcaccatccagatgaagagcacagacatcctgtaccgcctgcagatgagcaaggccaaggccatcgtggccggagatgaagtcatccaggaggtggacacagtggcctctgaatgtcccagcctgcgcatcaagctgctggtgtctgagaagagctgtgatggctggctgaacttcaagaagctgctgaagtacaaggtgcgccaccgggaggtgaagtag

SEQ ID NO: 142525 - DNA, 1761 bp, synthetic construct
  misc_feature 1..1761: note = Description of Artificial Sequence: Synthetic coding sequence
  source 1..1761: mol_type = other DNA
atgctggcccgggtgaccaggaagatgctgcggcatgccaagtgcttccagaggctggccatcttcggctctgtgcgggccctgcacaaggacaacagaacagccaccccccagaacttcagcaactatgaatccatgaagcaggacttcaagctgggcatccctgagtacttcaactttgccaaggatgtgctggaccagtggacagacaaggagaaggccggcaagaagcccagcaacccagccttctggtggatcaacagaaatggagaggagatgcgctggagctttgaggagctgggcagcctgagcaggaagtttgccaacatcctgtctgaggcctgcagcctgcagagaggagacagagtcatcctgatcctgccccgggtgcctgagtggtggctggccaacgtggcctgcctgaggactggaacagtgctgatccctggcaccacccagctgacccagaaggacatcctgtaccgcctgcagagcagcaaggccaactgcatcatcaccaatgatgtgctggccccagctgtggatgctgtggccagcaaatgtgagaacctgcacagcaagctgattgtgtctgagaacagccgggagggctggggcaacctgaaggagctgatgaagcacgccagtgacagccacacctgtgtgaagaccaagcacaatgagatcatggccatcttcttcaccagcggcaccagcggctaccccaagatgacagcccacacccacagcagctttggcctgggcctgtctgtgaatggccgcttctggctggacctgacccccagtgatgtgatgtggaacaccagtgacaccggctgggccaagagcgcctggagctctgtgttcagcccctggatccagggcgcctgtgtgttcacccaccacctgcccaggtttgagcccaccagcatcctgcagaccctgagcaagtaccccatcaccgtcttctgcagcgcccccaccgtgtacaggatgctggtgcagaatgacatcaccagctacaagttcaagagcctgaagcactgtgtgtctgctggggagcccatcaccccagatgtgacagagaagtggaggaacaagacaggcctggacatctatgagggctacggccagacagaaacagtgctgatctgtggcaacttcaagggcatgaagatcaagccaggctccatgggcaagcccagccctgcctttgatgtgaagatcgtggatgtgaatggaaatgtgctgcccccaggccaggagggggacatcggcatccaggtgctgcccaaccggcccttcggcctcttcacccactacgtggacaaccccagcaagacagccagcaccctgcggggcaacttctacatcactggagaccggggctacatggacaaggatggctacttctggtttgtggcccgggcagatgatgtgatcctgagcagcggctaccgcatcggcccctttgaggtggagaatgccctgaatgagcaccccagcgtggccgagagcgctgtggtgagcagcccagaccccatccggggggaggtggtgaaggcctttgtggtgctgaacccagactacaagagccatgaccaggagcagctgatcaaggagatccaggagcacgtgaagaagaccacagccccctacaagtaccccaggaaggtggagttcatccaggagctgcccaagaccatcagcggcaagaccaagagaaatgagctgaggaagaaggagtggaagaccatctag

SEQ ID NO: 142526 - DNA, 1317 bp, synthetic construct
  misc_feature 1..1317: note = Description of Artificial Sequence: Synthetic coding sequence
  source 1..1317: mol_type = other DNA
atgctggcccgggtgaccaggaagatgctgcggcatgccaagtgcttccagaggctggccatcttcggctctgtgcgggccctgcacaaggacaacagaacagccaccccccagaacttcagcaactatgaatccatgaagcaggacttcaagctgggcatccctgagtacttcaactttgccaaggatgtgctggaccagtggacagacaaggagaaggccggcaagaagcccagcaacccagccttctggtggatcaacagaaatggagaggagatgcgctggagctttgaggagctgggcagcctgagcaggaagtttgccaacatcctgtctgaggcctgcagcctgcagagaggagacagagtcatcctgatcctgccccgggtgcctgagtggtggctggccaacgtggcctgcctgaggactggaacagtgctgatccctggcaccacccagctgacccagaaggacatcctgtaccgcctgcagagcagcaaggccaactgcatcatcaccaatgatgtgctggccccagctgtggatgctgtggccagcaaatgtgagaacctgcacagcaagctgattgtgtctgagaacagccgggagggctggggcaacctgaaggagctgatgaagcacgccagtgacagccacacctgtgtgaagaccaagcacaatgagatcatggccatcttcttcaccagcggcaccagcggctaccccaagatgacagcccacacccacagcagctttggcctgggcctgtctgtgaatggccgcttctggctggacctgacccccagtgatgtgatgtggaacaccagtgacaccggctgggccaagagcgcctggagctctgtgttcagcccctggatccagggcgcctgtgtgttcacccaccacctgcccaggtttgagcccaccagcatcctgcagaccctgagcaagtaccccatcaccgtcttctgcagcgcccccaccgtgtacaggatgctggtgcagaatgacatcaccagctacaagttcaagagcctgaagcactgtgtgtctgctggggagcccatcaccccagatgtgacagagaagtggaggaacaagacaggcctggacatctatgagggctacggccagacagaaacagtgctgatctgtggcaacttcaagggcatgaagatcaagccaggctccatgggcaagcccagccctgcctttgatgtgaaggtgtgcaccagccccagcaggaggatgttcaacaaccccatctgcaccctgcccacctaccgcctgcccccctacaagctgagcctgctgtag

SEQ ID NO: 142527 - DNA, 1737 bp, synthetic construct
  misc_feature 1..1737: note = Description of Artificial Sequence: Synthetic coding sequence
  source 1..1737: mol_type = other DNA
atgaagcaggacttcaagctgggcatccctgagtacttcaactttgccaaggatgtgctggaccagtggacagacaaggagaaggccggcaagaagcccagcaacccagccttctggtggatcaacagaaatggagaggagatgcgctggagctttgaggagctgggcagcctgagcaggaagtttgccaacatcctgtctgaggcctgcagcctgcagagaggagacagagtcatcctgatcctgccccgggtgcctgagtggtggctggccaacgtggcctgcctgaggacaggcaccgtgctgatccctggcaccacccagctgacccagaaggacatcctgtaccgcctgcagagcagcaaggccaactgcatcatcaccaatgatgtgctggccccagctgtggatgctgtggccagcaaatgtgagaacctgcacagcaagctgattgtgtctgagaacagccgggagggctggggcaacctgaaggagctgatgaaggtgttcctgtgccaccctggctggagcacagtggcccgctcctggctgacagccaccagcaccagcctggtgcaggccatcctgagcctgctgagctcctgggactacagacatgccagtgacagccacacctgtgtgaagaccaagcacaatgagatcatggccatcttcttcaccagcggcaccagcggctaccccaagatgacagcccacacccacagcagctttggcctgggcctgtctgtgaatggccgcttctggctggacctgacccccagtgatgtgatgtggaacaccagtgacaccggctgggccaagagcgcctggagctctgtgttcagcccctggatccagggcgcctgtgtgttcacccaccacctgcccaggtttgagcccaccagcatcctgcagaccctgagcaagtaccccatcaccgtcttctgcagcgcccccaccgtgtacaggatgctggtgcagaatgacatcaccagctacaagttcaagagcctgaagcactgtgtgtctgctggggagcccatcaccccagatgtgacagagaagtggaggaacaagacaggcctggacatctatgagggctacggccagacagaaacagtgctgatctgtggcaacttcaagggcatgaagatcaagccaggctccatgggcaagcccagccctgcctttgatgtgaagatcgtggatgtgaatggaaatgtgctgcccccaggccaggagggggacatcggcatccaggtgctgcccaaccggcccttcggcctcttcacccactacgtggacaaccccagcaagacagccagcaccctgcggggcaacttctacatcactggagaccggggctacatggacaaggatggctacttctggtttgtggcccgggcagatgatgtgatcctgagcagcggctaccgcatcggcccctttgaggtggagaatgccctgaatgagcaccccagcgtggccgagagcgctgtggtgagcagcccagaccccatccggggggaggtggtgaaggcctttgtggtgctgaacccagactacaagagccatgaccaggagcagctgatcaaggagatccaggagcacgtgaagaagaccacagccccctacaagtaccccaggaaggtggagttcatccaggagctgcccaagaccatcagcggcaagaccaagagaaatgagctgaggaagaaggagtggaagaccatctag

SEQ ID NO: 142528 - DNA, 1740 bp, synthetic construct
  misc_feature 1..1740: note = Description of Artificial Sequence: Synthetic coding sequence
  source 1..1740: mol_type = other DNA
atgaggccctggctgcggcacctggtgctgcaggccctgaggaacagccgggccttctgtggcagccacggcaagccagcccccctgcctgtgccccagaagatcgtggccacctgggaggccatcagcctgggccggcagctggtgcctgagtacttcaactttgcccatgatgtgctggatgtgtggagccggctggaggaggccggccacaggcctcccaacccagccttctggtgggtgaatggcaccggggctgagatcaagtggagctttgaggagctgggcaagcagagcaggaaggccgccaacgtgctgggcggggcctgtggcctgcagcccggggacaggatgatgctggtgctgccccggctgcctgagtggtggctggtgtctgtggcctgcatgaggacaggcaccgtgatgatccctggggtgacccagctgacagagaaggacctgaagtaccgcctgcaggccagccgggccaagagcatcatcaccagtgacagcctggccccccgggtggatgccatctctgctgagtgccccagcctgcagaccaagctgctggtgtctgacagcagccggcccggctggctgaacttccgggagctgctgcgggaggccagcacagagcacaactgcatgaggaccaagagccgggaccccctggccatctacttcaccagcggcaccaccggggcccccaagatggtggagcacagccagagcagctatggcctgggctttgtggccagcggccgccgctgggtggccctgacagaaagtgacatcttctggaacaccacagacaccggctgggtgaaggccgcctggaccctcttcagcgcctggcccaacggcagctgcatctttgtgcatgagctgccccgggtggatgccaaggtgatcctgaacaccctgagcaagttccccatcaccaccctgtgctgcgtgcccaccatcttccggctgctggtgcaggaggacctgacccgctaccagttccagagcctgcggcactgcctgactggaggagaggccctgaacccagatgtgcgggagaagtggaagcaccagacaggagtggagctgtatgagggctacggccagagcgagaccgtggtgatctgtgccaaccccaagggcatgaagatcaagagcggctccatgggcaaggccagccccccctatgatgtgcagatcgtggatgatgagggcaatgtgctgcccccaggagaggagggcaatgtggccgtgcgcatccggcccacccggcccttctgcttcttcaactgctacctggacaaccctgagaagacagctgccagcgagcagggcgacttctacatcactggagaccgggccaggatggacaaggatggctacttctggttcatgggcagaaatgatgatgtgatcaacagcagcagctaccgcatcggccctgtggaggtggagagcgccctggccgagcaccctgctgtgctggagagcgctgtggtgagcagcccagaccccatccggggggaggtggtgaaggccttcatcgtgctgaccccagcctacagcagccatgaccctgaggccctgacccgggagctgcaggagcacgtgaagagggtgacagccccctacaagtaccccaggaaggtggcctttgtgtctgagctgcccaagacagtgtctgggaagatccagaggagcaagctgcggagccaggagtggggcaagtag

SEQ ID NO: 142529 - DNA, 2070 bp, synthetic construct
  misc_feature 1..2070: note = Description of Artificial Sequence: Synthetic coding sequence
  source 1..2070: mol_type = other DNA
atggccgcccggaccctgggccggggcgtgggccgcctgctgggcagcctgcggggcctgagcggccagcctgcccggcccccctgtggggtgtctgcccccaggagagctgccagcggccccagcggcagcgccccagctgtggccgctgctgctgcccagcccggcagctacccagccctgagcgcccaggccgcccgggagcctgctgccttctggggccccctggcccgggacaccctggtgtgggacaccccctaccacacagtgtgggactgtgacttcagcacaggcaagattggctggttcctgggcggccagctgaatgtgtctgtgaactgcctggaccagcacgtgaggaagagccctgagagcgtggccctgatctgggagagagatgagcctggaacagaggtgcgcatcacctaccgggagctgctggagaccacctgccgcctggccaacaccctgaagagacatggagtgcacagaggagacagagtggccatctacatgcctgtgagccccctggccgtggccgccatgctggcctgtgcccgcatcggggctgtgcacacagtcatctttgctggcttctctgctgagagcctggccggccgcatcaatgatgccaagtgcaaggtggtgatcaccttcaaccagggcctgcggggcggccgggtggtggagctgaagaagatcgtggatgaggccgtgaagcactgccccaccgtgcagcacgtgctggtggcccacaggacagacaacaaggtgcacatgggagacctggatgtgcccctggagcaggagatggccaaggaggaccctgtgtgtgcccctgagagcatgggcagcgaggacatgctgttcatgctgtacaccagcggcagcacaggcatgcccaagggcatcgtgcacacccaggccggctacctgctgtatgctgccctgacccacaagctggtgtttgaccaccagcccggggacatcttcggctgtgtggccgacatcggctggatcaccggccacagctatgtggtgtatggccccctgtgcaatggagccacctctgtgctgtttgagagcacccctgtgtacccaaatgccggccgctactgggagaccgtggagcggctgaagatcaaccagttctatggagcccccacagctgtgcggctgctgctgaagtatggagatgcctgggtgaagaagtatgacaggagcagcctgcggaccctgggctctgtgggggagcccatcaactgtgaggcctgggagtggctgcaccgggtggtgggggacagccgctgcaccctggtggacacctggtggcagacagagaccggcggcatctgcatcgccccccggcccagcgaggagggcgctgagatcctgcctgccatggccatgaggcccttcttcggcatcgtgcctgtgctgatggatgagaagggctctgtggtggagggcagcaatgtgtctggggccctgtgcatcagccaggcctggccaggcatggcccggaccatctatggagaccaccagagatttgtggatgcctacttcaaggcctacccaggctactacttcaccggagatggagcctacagaacagagggcggctactaccagatcaccggccgcatggatgatgtgatcaacatcagcggccaccggctgggcacagctgagattgaagatgccatcgctgaccaccctgctgtgcctgagagcgctgtgattggctacccccatgacatcaagggggaggccgcctttgccttcatcgtggtgaaggacagcgctggggacagtgatgtggtggtgcaggagctgaagtccatggtggccaccaagatcgccaagtatgctgtgcctgatgagatcctggtggtgaagaggctgcccaagaccaggtctgggaaggtgatgaggcggctgctgaggaagatcatcaccagcgaggcccaggagctgggggacaccaccaccctggaggaccccagcatcatcgccgagatcctgtctgtgtaccagaagtgcaaggacaagcaggccgccgccaagtag

SEQ ID NO: 142530 - DNA, 462 bp, synthetic construct
  misc_feature 1..462: note = Description of Artificial Sequence: Synthetic coding sequence
  source 1..462: mol_type = other DNA
atggccgcccggaccctgggccggggcgtgggccgcctgctgggcagcctgcggggcctgagcggccagcctgcccggcccccctgtggggtgtctgcccccaggagagctgccagcggccccagcggcagcgccccagctgtggccgctgctgctgcccagcccggcagctacccagccctgagcgcccaggccgcccgggagcctgctgccttctggggccccctggcccgggacaccctggtgtgggacaccccctaccacacagtgtgggactgtgacttcagcacaggcaagattggctggttcctgggcggccagctgaatgtgtctgtgaactgcctggaccagcacgtgaggaagagccctgagagcgtggccctgatctgggagagagatgagcctggaacagaggtgcgcatcacctacagcccctggctgcagatgccctgtggcccctag

SEQ ID NO: 142531 - DNA, 1455 bp, synthetic construct
  misc_feature 1..1455: note = Description of Artificial Sequence: Synthetic coding sequence
  source 1..1455: mol_type = other DNA
atggccgcccggaccctgggccggggcgtgggccgcctgctgggcagcctgcggggcctgagcggccagcctgcccggcccccctgtggggtgtctgcccccaggagagctgccagcggccccagcggcagcgccccagctgtggccgctgctgctgcccagcccggcagctacccagccctgagcgcccaggccgcccgggagcctgctgccttctggggccccctggcccgggacaccctggtgtgggacaccccctaccacacagtgtgggactgtgacttcagcacaggcaagattggctggttcctgggcggccagctgaatgtgtctgtgaactgcctggaccagcacgtgaggaagagccctgagagcgtggccctgatctgggagagagatgagcctggaacagaggtgcgcatcacctaccgggagctgctggagaccacctgccgcctggccaacaccctgaagagacatggagtgcacagaggagacagagtggccatctacatgcctgtgagccccctggccgtggccgccatgctggcctgtgcccgcatcggggctgtgcacacagtcatctttgctggcttctctgctgagagcctggccggccgcatcaatgatgtgggggagcccatcaactgtgaggcctgggagtggctgcaccgggtggtgggggacagccgctgcaccctggtggacacctggtggcagacagaaacaggaggcatctgcatcgccccccggcccagcgaggagggcgctgagatcctgcctgccatggccatgaggcccttctttggaattgtgcctgtgctgatggatgagaagggctctgtggtggagggcagcaatgtgtctggggccctgtgcatcagccaggcctggccaggcatggcccggaccatctacggggaccaccagagatttgtggatgcctacttcaaggcctacccaggctactacttcaccggagatggagcctacagaacagaaggaggctactaccagatcactggaaggatggatgatgtgatcaacatcagcggccaccggctgggcacagctgagattgaagatgccatcgctgaccaccctgctgtgcctgagagcgctgtgattggctacccccatgacatcaagggggaggccgcctttgccttcatcgtggtgaaggacagcgctggggacagtgatgtggtggtgcaggagctgaagtccatggtggccaccaagatcgccaagtatgctgtgcctgatgagatcctggtggtgaagaggctgcccaagaccaggtctgggaaggtgatgaggcggctgctgaggaagatcatcaccagcgaggcccaggagctgggggacaccaccaccctggaggaccccagcatcatcgccgagatcctgtctgtgtaccagaagtgcaaggacaagcaggccgccgccaagtag

SEQ ID NO: 142532 - DNA, 1728 bp, synthetic construct
  misc_feature 1..1728: note = Description of Artificial Sequence: Synthetic coding sequence
  source 1..1728: mol_type = other DNA
atggccgcccggaccctgggccggggcgtgggccgcctgctgggcagcctgcggggcctgagcggccagcctgcccggcccccctgtggggtgtctgcccccaggagagctgccagcggccccagcggcagcgccccagctgtggccgctgctgctgcccagcccggcagctacccagccctgagcgcccaggccgcccgggagcctgctgccttctggggccccctggcccgggacaccctggtgtgggacaccccctaccacacagtgtgggactgtgacttcagcacaggcaagattggctggttcctgggcggccagctgaatgtgtctgtgaactgcctggaccagcacgtgaggaagagccctgagagcgtggccctgatctgggagagagatgagcctggaacagaggtgcgcatcacctaccgggagctgctggagaccacctgccgcctggccaacaccctgaagagacatggagtgcacagaggagacagagtggccatctacatgcctgtgagccccctggccgtggccgccatgctggcctgtgcccgcatcggggctgtgcacacagtcatctttgctggcttctctgctgagagcctggccggccgcatcaatgatgccaagtgcaaggtggtgatcaccttcaaccagggcctgcggggcggccgggtggtggagctgaagaagatcgtggatgaggccgtgaagcactgccccaccgtgcagcacgtgctggtggcccacaggacagacaacaaggtgcacatgggagacctggatgtgcccctggagcaggagatggccaaggaggaccctgtgtgtgcccctgagagcatgggcagcgaggacatgctgttcatgctgtacaccagcggcagcacaggcatgcccaagggcatcgtgcacacccaggccggctacctgctgtatgctgccctgacccacaagctggtgtttgaccaccagcccggggacatcttcggctgtgtggccgacatcggctggatcaccggccacagctatgtggtgtatggccccctgtgcaatggagccacctctgtgctgtttgagagcacccctgtgtacccaaatgccggccgctactgggagaccgtggagcggctgaagatcaaccagttctatggagcccccacagctgtgcggctgctgctgaagtatggagatgcctgggtgaagaagtatgacaggagcagcctgcggaccctgggctctgtgggggagcccatcaactgtgaggcctgggagtggctgcaccgggtggtgggggacagccgctgcaccctggtggacacctggtggcagacagagaccggcggcatctgcatcgccccccggcccagcgaggagggcgctgagatcctgcctgccatggccatgaggcccttcttcggcatcgtgcctgtgctgatggatgagaagggctctgtggtggagggcagcaatgtgtctggggccctgtgcatcagccaggcctggccaggcatggcccggaccatctatggagaccaccagagatttgtggatgcctacttcaaggcctacccaggctactacttcaccggagatggagcctacagaacagagggcggctactaccagatcaccggccgcatggatgatgtgatcaacatcctgcagatcgtgggcttcttccgggaggccatcagaaattctggggacctgctggagcactag

SEQ ID NO: 142533 - DNA, 1821 bp, synthetic construct
  misc_feature 1..1821: note = Description of Artificial Sequence: Synthetic coding sequence
  source 1..1821: mol_type = other DNA
atgctgaagaccttcctgttcctggagaagtacttcccctgcatcaagtacagcagcgcctgcttccctggcaccggcctggatgtgtatgacatcaagtttgctgtgctgctgcacccccagacagccctgcacttcggccccccacccagcctgatggccttcagcagcctgtgctgccgggagctgctggagaccacctgccgcctggccaacaccctgaagagacatggagtgcacagaggagacagagtggccatctacatgcctgtgagccccctggccgtggccgccatgctggcctgtgccagaattggagctgtgcacacagtcatctttgctggcttctctgctgagagcctggccggccgcatcaatgatgccaagtgcaaggtggtgatcaccttcaaccagggcctgcggggcggccgggtggtggagctgaagaagatcgtggatgaagctgtgaagcactgccccaccgtgcagcacgtgctggtggcccacaggacagacaacaaggtgcacatgggagacctggatgtgcccctggagcaggagatggccaaggaggaccctgtgtgtgcccctgagagcatgggcagcgaggacatgctgttcatgctgtacaccagcggcagcacaggcatgcccaagggcatcgtgcacacccaggccggctacctgctgtatgctgccctgacccacaagctggtgtttgaccaccagcccggggacatcttcggctgtgtggccgacatcggctggatcaccggccacagctatgtggtgtatggccccctgtgcaatggagccacctctgtgctgtttgagagcacccctgtgtacccaaatgccggccgctactgggagaccgtggagcggctgaagatcaaccagttctacggggcccccacagctgtgcggctgctgctgaagtatggagatgcctgggtgaagaagtatgacaggagcagcctgcggaccctgggctctgtgggggagcccatcaactgtgaggcctgggagtggctgcaccgggtggtgggggacagccgctgcaccctggtggacacctggtggcagacagaaacaggaggcatctgcatcgccccccggcccagcgaggagggcgctgagatcctgcctgccatggccatgaggcccttctttggaattgtgcctgtgctgatggatgagaagggctctgtggtggagggcagcaatgtgtctggggccctgtgcatcagccaggcctggccaggcatggcccggaccatctacggggaccaccagagatttgtggatgcctacttcaaggcctacccaggctactacttcaccggagatggagcctacagaacagaaggaggctactaccagatcactggaaggatggatgatgtgatcaacatcagcggccaccggctgggcacagctgagattgaagatgccatcgctgaccaccctgctgtgcctgagagcgctgtgattggctacccccatgacatcaagggggaggccgcctttgccttcatcgtggtgaaggacagcgctggggacagtgatgtggtggtgcaggagctgaagtccatggtggccaccaagatcgccaagtatgctgtgcctgatgagatcctggtggtgaagaggctgcccaagaccaggtctgggaaggtgatgaggcggctgctgaggaagatcatcaccagcgaggcccaggagctgggggacaccaccaccctggaggaccccagcatcatcgccgagatcctgtctgtgtaccagaagtgcaaggacaagcaggccgccgccaagtag

SEQ ID NO: 142534 - DNA, 1707 bp, synthetic construct
  misc_feature 1..1707: note = Description of Artificial Sequence: Synthetic coding sequence
  source 1..1707: mol_type = other DNA
atgagaagaaggaaggagcggcagccctgggaccgcttccacttcctgcactttgcccctcatggccgggagctgctggagaccacctgccgcctggccaacaccctgaagagacatggagtgcacagaggagacagagtggccatctacatgcctgtgagccccctggccgtggccgccatgctggcctgtgccagaattggagctgtgcacacagtcatctttgctggcttctctgctgagagcctggccggccgcatcaatgatgccaagtgcaaggtggtgatcaccttcaaccagggcctgcggggcggccgggtggtggagctgaagaagatcgtggatgaagctgtgaagcactgccccaccgtgcagcacgtgctggtggcccacaggacagacaacaaggtgcacatgggagacctggatgtgcccctggagcaggagatggccaaggaggaccctgtgtgtgcccctgagagcatgggcagcgaggacatgctgttcatgctgtacaccagcggcagcacaggcatgcccaagggcatcgtgcacacccaggccggctacctgctgtatgctgccctgacccacaagctggtgtttgaccaccagcccggggacatcttcggctgtgtggccgacatcggctggatcaccggccacagctatgtggtgtatggccccctgtgcaatggagccacctctgtgctgtttgagagcacccctgtgtacccaaatgccggccgctactgggagaccgtggagcggctgaagatcaaccagttctacggggcccccacagctgtgcggctgctgctgaagtatggagatgcctgggtgaagaagtatgacaggagcagcctgcggaccctgggctctgtgggggagcccatcaactgtgaggcctgggagtggctgcaccgggtggtgggggacagccgctgcaccctggtggacacctggtggcagacagaaacaggaggcatctgcatcgccccccggcccagcgaggagggcgctgagatcctgcctgccatggccatgaggcccttctttggaattgtgcctgtgctgatggatgagaagggctctgtggtggagggcagcaatgtgtctggggccctgtgcatcagccaggcctggccaggcatggcccggaccatctacggggaccaccagagatttgtggatgcctacttcaaggcctacccaggctactacttcaccggagatggagcctacagaacagaaggaggctactaccagatcactggaaggatggatgatgtgatcaacatcagcggccaccggctgggcacagctgagattgaagatgccatcgctgaccaccctgctgtgcctgagagcgctgtgattggctacccccatgacatcaagggggaggccgcctttgccttcatcgtggtgaaggacagcgctggggacagtgatgtggtggtgcaggagctgaagtccatggtggccaccaagatcgccaagtatgctgtgcctgatgagatcctggtggtgaagaggctgcccaagaccaggtctgggaaggtgatgaggcggctgctgaggaagatcatcaccagcgaggcccaggagctgggggacaccaccaccctggaggaccccagcatcatcgccgagatcctgtctgtgtaccagaagtgcaaggacaagcaggccgccgccaagtag

SEQ ID NO: 142535 - DNA, 2145 bp, synthetic construct
  misc_feature 1..2145: note = Description of Artificial Sequence: Synthetic coding sequence
  source 1..2145: mol_type = other DNA
atgggcctgcctgaggagcgggtgcgcagcggcagcggcagccggggccaggaggaggccggggccggcggccgggcccgctcctggagccccccacctgaggtgagccgcagcgcccacgtgcccagcctgcagcgctaccgggagctgcaccggcgctctgtggaggagccccgggagttctggggagacatcgccaaggagttctactggaagaccccctgccccggccccttcctgcgctacaactttgatgtgaccaagggcaagatcttcatcgagtggatgaagggggccaccaccaacatctgctacaacgtgctggacagaaatgtgcatgagaagaagctgggggacaaggtggccttctactgggagggcaatgagcccggggagaccacccagatcacctaccaccagctgctggtgcaggtgtgccagttcagcaatgtgctgaggaagcagggcatccagaagggggacagagtggccatctacatgcccatgatccctgagctggtggtggccatgctggcctgtgccagaattggagccctgcacagcatcgtgtttgctggcttcagcagcgagagcctgtgtgagcgcatcctggacagcagctgcagcctgctgatcaccacagatgccttctacagaggagagaagctggtgaacctgaaggagctggctgatgaggccctgcagaagtgccaggagaagggcttccctgtgcgctgctgcatcgtggtgaagcacctgggccgggcagagctgggcatgggagacagcaccagccagagcccccccatcaagaggagctgcccagatgtgcagggcaagctgaaggagaagagcaagagggtgcagccccagatctcctggaaccagggcatcgacctgtggtggcatgagctgatgcaggaggccggagatgaatgtgagcctgagtggtgtgatgctgaggaccccctcttcatcctgtacaccagcggcagcacaggcaagcccaagggcgtggtgcacacagtgggcggctacatgctgtatgtggccaccaccttcaagtatgtgtttgacttccacgcagaagatgtgttctggtgcacagctgacatcggctggatcaccggccacagctatgtgacctacggccccctggccaacggggccacctctgtgctgtttgagggcatccccacctacccagatgtgaaccggctgtggagcatcgtggacaagtacaaggtgaccaagttctacacagcccccacagccatccggctgctgatgaagtttggagatgagcctgtgaccaagcacagccgggccagcctgcaggtgctgggcaccgtgggggagcccatcaaccctgaggcctggctgtggtaccaccgggtggtgggcgcccagcgctgccccatcgtggacaccttctggcagacagaaacaggaggccacatgctgacccccctgcccggggccacccccatgaagccaggcagcgccaccttccccttctttggagtggccccagccatcctgaatgaaagtggagaggagctggagggggaggccgagggctacctggtgttcaagcagccctggccaggcatcatgaggacagtgtatggcaaccacgagagatttgagaccacctacttcaagaagtttcctggctactacgtgactggagatggctgccagagggaccaggacggctactactggatcaccggcagaattgatgacatgctgaatgtgtctggccacctgctgagcacagctgaggtggagagcgccctggtggagcacgaggccgtggccgaggccgctgtggtgggccacccccaccctgtgaagggggagtgcctgtactgctttgtgaccctgtgtgatggccacaccttcagccccaagctgacagaggagctgaagaagcagatccgggagaagattggccccatcgccaccccagactacatccagaatgcccctggcctgcccaagaccaggtctgggaagatcatgagaagagtgctgaggaagatcgcccagaatgaccatgacctgggggacatgagcacagtggccgaccccagcgtcatcagccacctgttcagccaccgctgcctgaccatccagtag

SEQ ID NO: 142536 - DNA, 1956 bp, synthetic construct
  misc_feature 1..1956: note = Description of Artificial Sequence: Synthetic coding sequence
  source 1..1956: mol_type = other DNA
atgatggtgcgctgggccctgctgtgtgagttctggggagacatcgccaaggagttctactggaagaccccctgccccggccccttcctgcgctacaactttgatgtgaccaagggcaagatcttcatcgagtggatgaagggggccaccaccaacatctgctacaacgtgctggacagaaatgtgcatgagaagaagctgggggacaaggtggccttctactgggagggcaatgagcccggggagaccacccagatcacctaccaccagctgctggtgcaggtgtgccagttcagcaatgtgctgaggaagcagggcatccagaagggggacagagtggccatctacatgcccatgatccctgagctggtggtggccatgctggcctgtgccagaattggagccctgcacagcatcgtgtttgctggcttcagcagcgagagcctgtgtgagcgcatcctggacagcagctgcagcctgctgatcaccacagatgccttctacagaggagagaagctggtgaacctgaaggagctggctgatgaggccctgcagaagtgccaggagaagggcttccctgtgcgctgctgcatcgtggtgaagcacctgggccgggcagagctgggcatgggagacagcaccagccagagcccccccatcaagaggagctgcccagatgtgcagatctcctggaaccagggcatcgacctgtggtggcatgagctgatgcaggaggccggagatgaatgtgagcctgagtggtgtgatgctgaggaccccctcttcatcctgtacaccagcggcagcacaggcaagcccaagggcgtggtgcacacagtgggcggctacatgctgtatgtggccaccaccttcaagtatgtgtttgacttccacgccgaggatgtgttctggtgcacagctgacatcggctggatcaccggccacagctatgtgacctacggccccctggccaatggagccacctctgtgctgtttgagggcatccccacctacccagatgtgaaccggctgtggagcatcgtggacaagtacaaggtgaccaagttctacacagcccccacagccatccggctgctgatgaagtttggagatgagcctgtgaccaagcacagccgggccagcctgcaggtgctgggcaccgtgggggagcccatcaaccctgaggcctggctgtggtaccaccgggtggtgggcgcccagcgctgccccatcgtggacaccttctggcagacagagaccggcggccacatgctgacccccctgcccggggccacccccatgaagccaggcagcgccaccttccccttcttcggcgtggccccagccatcctgaatgaaagtggagaggagctggagggggaggccgagggctacctggtgttcaagcagccctggccaggcatcatgaggacagtgtatggcaaccacgagagatttgagaccacctacttcaagaagtttcctggctactacgtgactggagatggctgccagagggaccaggacggctactactggatcaccggcagaattgatgacatgctgaatgtgtctggccacctgctgagcacagctgaggtggagagcgccctggtggagcatgaagctgtggccgaggccgctgtggtgggccacccccaccctgtgaagggagaatgtctgtactgctttgtgaccctgtgtgatggccacaccttcagccccaagctgacagaggagctgaagaagcagatccgggagaagattggccccatcgccaccccagactacatccagaatgcccctggcctgcccaagaccaggtctgggaagatcatgagaagagtgctgaggaagatcgcccagaatgaccatgacctgggggacatgagcacagtggccgaccccagcgtcatcagccacctgttcagccaccgctgcctgaccatccagtag

SEQ ID NO: 142537 - DNA, 2106 bp, synthetic construct
  misc_feature 1..2106: note = Description of Artificial Sequence: Synthetic coding sequence
  source 1..2106: mol_type = other DNA
atgggcctgcctgaggagcgggtgcgcagcggcagcggcagccggggccaggaggaggccggggccggcggccgggcccgctcctggagccccccacctgaggtgagccgcagcgcccacgtgcccagcctgcagcgctaccgggagctgcaccggcgctctgtggaggagccccgggagttctggggagacatcgccaaggagttctactggaagaccccctgccccggccccttcctgcgctacaactttgatgtgaccaagggcaagatcttcatcgagtggatgaagggggccaccaccaacatctgctacaacgtgctggacagaaatgtgcatgagaagaagctgggggacaaggtggccttctactgggagggcaatgagcccggggagaccacccagatcacctaccaccagctgctggtgcaggtgtgccagttcagcaatgtgctgaggaagcagggcatccagaagggggacagagtggccatctacatgcccatgatccctgagctggtggtggccatgctggcctgtgccagaattggagccctgcacagcatcgtgtttgctggcttcagcagcgagagcctgtgtgagcgcatcctggacagcagctgcagcctgctgatcaccacagatgccttctacagaggagagaagctggtgaacctgaaggagctggctgatgaggccctgcagaagtgccaggagaagggcttccctgtgcgctgctgcatcgtggtgaagcacctgggccgggcagagctgggcatgggagacagcaccagccagagcccccccatcaagaggagctgcccagatgtgcagatctcctggaaccagggcatcgacctgtggtggcatgagctgatgcaggaggccggagatgaatgtgagcctgagtggtgtgatgctgaggaccccctcttcatcctgtacaccagcggcagcacaggcaagcccaagggcgtggtgcacacagtgggcggctacatgctgtatgtggccaccaccttcaagtatgtgtttgacttccacgccgaggatgtgttctggtgcacagctgacatcggctggatcaccggccacagctatgtgacctacggccccctggccaatggagccacctctgtgctgtttgagggcatccccacctacccagatgtgaaccggctgtggagcatcgtggacaagtacaaggtgaccaagttctacacagcccccacagccatccggctgctgatgaagtttggagatgagcctgtgaccaagcacagccgggccagcctgcaggtgctgggcaccgtgggggagcccatcaaccctgaggcctggctgtggtaccaccgggtggtgggcgcccagcgctgccccatcgtggacaccttctggcagacagagaccggcggccacatgctgacccccctgcccggggccacccccatgaagccaggcagcgccaccttccccttcttcggcgtggccccagccatcctgaatgaaagtggagaggagctggagggggaggccgagggctacctggtgttcaagcagccctggccaggcatcatgaggacagtgtatggcaaccacgagagatttgagaccacctacttcaagaagtttcctggctactacgtgactggagatggctgccagagggaccaggacggctactactggatcaccggcagaattgatgacatgctgaatgtgtctggccacctgctgagcacagctgaggtggagagcgccctggtggagcatgaagctgtggccgaggccgctgtggtgggccacccccaccctgtgaagggagaatgtctgtactgctttgtgaccctgtgtgatggccacaccttcagccccaagctgacagaggagctgaagaagcagatccgggagaagattggccccatcgccaccccagactacatccagaatgcccctggcctgcccaagaccaggtctgggaagatcatgagaagagtgctgaggaagatcgcccagaatgaccatgacctgggggacatgagcacagtggccgaccccagcgtcatcagccacctgttcagccaccgctgcctgaccatccagtag

SEQ ID NO: 142538 - DNA, 2100 bp, synthetic construct
  misc_feature 1..2100: note = Description of Artificial Sequence: Synthetic coding sequence
  source 1..2100: mol_type = other DNA
atgggcctgcctgaggagcgggtgcgcagcggcagcggcagccggggccaggaggaggccggggccggcggccgggcccgctcctggagccccccacctgaggtgagccgcagcgcccacgtgcccagcctgcagcgctaccgggagctgcaccggcgctctgtggaggagccccgggagttctggggagacatcgccaaggagttctactggaagaccccctgccccggccccttcctgcgctacaactttgatgtgaccaagggcaagatcttcatcgagtggatgaagggggccaccaccaacatctgctacaacgtgctggacagaaatgtgcatgagaagaagctgggggacaaggtggccttctactgggagggcaatgagcccggggagaccacccagatcacctaccaccagctgctggtgcaggtgtgccagttcagcaatgtgctgaggaagcagggcatccagaagggggacagagtggccatctacatgcccatgatccctgagctggtggtggccatgctggcctgtgccagaattggagccctgcacagcatcgtgtttgctggcttcagcagcgagagcctgtgtgagcgcatcctggacagcagctgcagcctgctgatcaccacagatgccttctacagaggagagaagctggtgaacctgaaggagctggctgatgaggccctgcagaagtgccaggagaagggcttccctgtgcgctgctgcatcgtggtgaagcacctgggccgggcagagctgggcatgggagacagcaccagccagagcccccccatcaagaggagctgcccagatgtgcagatctcctggaaccagggcatcgacctgtggtggcatgagctgatgcaggaggccggagatgaatgtgagcctgagtggtgtgatgctgagcacagcagcagctgcacccctgtggccccccaggccaacccccgggtgtggttcacccagctgggcgccacctgctacgtggccaccaccttcaagtatgtgtttgacttccacgccgaggatgtgttctggtgcacagctgacatcggctggatcaccggccacagctatgtgacctacggccccctggccaatggagccacctctgtgctgtttgagggcatccccacctacccagatgtgaaccggctgtggagcatcgtggacaagtacaaggtgaccaagttctacacagcccccacagccatccggctgctgatgaagtttggagatgagcctgtgaccaagcacagccgggccagcctgcaggtgctgggcaccgtgggggagcccatcaaccctgaggcctggctgtggtaccaccgggtggtgggcgcccagcgctgccccatcgtggacaccttctggcagacagagaccggcggccacatgctgacccccctgcccggggccacccccatgaagccaggcagcgccaccttccccttcttcggcgtggccccagccatcctgaatgaaagtggagaggagctggagggggaggccgagggctacctggtgttcaagcagccctggccaggcatcatgaggacagtgtatggcaaccacgagagatttgagaccacctacttcaagaagtttcctggctactacgtgactggagatggctgccagagggaccaggacggctactactggatcaccggcagaattgatgacatgctgaatgtgtctggccacctgctgagcacagctgaggtggagagcgccctggtggagcatgaagctgtggccgaggccgctgtggtgggccacccccaccctgtgaagggagaatgtctgtactgctttgtgaccctgtgtgatggccacaccttcagccccaagctgacagaggagctgaagaagcagatccgggagaagattggccccatcgccaccccagactacatccagaatgcccctggcctgcccaagaccaggtctgggaagatcatgagaagagtgctgaggaagatcgcccagaatgaccatgacctgggggacatgagcacagtggccgaccccagcgtcatcagccacctgttcagccaccgctgcctgaccatccagtag

SEQ ID NO: 142539 - DNA, 1230 bp, synthetic construct
  misc_feature 1..1230: note = Description of Artificial Sequence: Synthetic coding sequence
  source 1..1230: mol_type = other DNA
atgcaggaggccggagatgaatgtgagcctgagtggtgtgatgctgaggaccccctcttcatcctgtacaccagcggcagcacaggcaagcccaagggcgtggtgcacacagtgggcggctacatgctgtatgtggccaccaccttcaagtatgtgtttgacttccacgccgaggatgtgttctggtgcacagctgacatcggctggatcaccggccacagctatgtgacctacggccccctggccaatggagccacctctgtgctgtttgagggcatccccacctacccagatgtgaaccggctgtggagcatcgtggacaagtacaaggtgaccaagttctacacagcccccacagccatccggctgctgatgaagtttggagatgagcctgtgaccaagcacagccgggccagcctgcaggtgctgggcaccgtgggggagcccatcaaccctgaggcctggctgtggtaccaccgggtggtgggcgcccagcgctgccccatcgtggacaccttctggcagacagagaccggcggccacatgctgacccccctgcccggggccacccccatgaagccaggcagcgccaccttccccttcttcggcgtggccccagccatcctgaatgaaagtggagaggagctggagggggaggccgagggctacctggtgttcaagcagccctggccaggcatcatgaggacagtgtatggcaaccacgagagatttgagaccacctacttcaagaagtttcctggctactacgtgactggagatggctgccagagggaccaggacggctactactggatcaccggcagaattgatgacatgctgaatgtgtctggccacctgctgagcacagctgaggtggagagcgccctggtggagcatgaagctgtggccgaggccgctgtggtgggccacccccaccctgtgaagggagaatgtctgtactgctttgtgaccctgtgtgatggccacaccttcagccccaagctgacagaggagctgaagaagcagatccgggagaagattggccccatcgccaccccagactacatccagaatgcccctggcctgcccaagaccaggtctgggaagatcatgagaagagtgctgaggaagatcgcccagaatgaccatgacctgggggacatgagcacagtggccgaccccagcgtcatcagccacctgttcagccaccgctgcctgaccatccagtag

SEQ ID NO: 142540 - DNA, 114 bp, synthetic construct
  misc_feature 1..114: note = Description of Artificial Sequence: Synthetic coding sequence
  source 1..114: mol_type = other DNA
atgatggtgcgctgggccctgctgtgtggagaatgtcgcatcctgggccgccactgccagggcatcctgctggaggacagcatgccctggcccatccccagcgtgcagctgtag

SEQ ID NO: 142541 - DNA, 2061 bp, synthetic construct
  misc_feature 1..2061: note = Description of Artificial Sequence: Synthetic coding sequence
  source 1..2061: mol_type = other DNA
atgaagcccagctggctgcagtgcaggaaggtgaccagcgctgggggcctgggcggccccctgcccggcagcagccctgcccggggggccggggccgccctgcgggccctggtggtgcccggcccccggggcggcctgggcggccggggctgccgggccctgagcagcggcagcggcagcgagtacaagacccactttgctgcctctgtgacagatcctgagcgcttctggggcaaggctgctgagcagatctcctggtacaagccctggaccaagaccctggagaacaagcacagccccagcacccgctggtttgtggagggcatgctgaacatctgctacaatgctgtggacagacacattgaaaatggaaaaggagacaagatcgccatcatctatgacagccctgtgaccaacaccaaggccaccttcacctacaaggaggtgctggagcaggtgtccaagctggccggcgtgctggtgaagcacggcatcaagaagggggacacagtggtgatctacatgcccatgatcccccaggccatgtacaccatgctggcctgtgccagaattggagccatccacagcctcatctttggaggctttgccagcaaggagctgagcagcagaattgaccacgtgaagcccaaggtggtggtgacagccagctttggcatcgagcccggccggcgggtggagtatgtgcccctggtggaggaggccctgaagattggccagcacaagccagacaagatcctgatctacaaccggcccaacatggaggccgtgcccctggcccctggccgggacctggactgggatgaggagatggccaaggcccagagccatgactgtgtgcctgtgctgtctgagcaccccctgtacatcctgtacaccagcggcaccaccggcctgcccaagggcgtcatccggcccactggaggctatgctgtgatgctgcactggagcatgagcagcatctacggcctgcagcccggggaggtgtggtgggccgccagtgacctgggctgggtggtgggccacagctacatctgctacggccccctgctgcacggcaacaccaccgtgctgtatgagggcaagcctgtgggcaccccagatgctggggcctacttccgggtgctggccgagcacggcgtggccgccctcttcaccgcccccacagccatccgggccatccggcagcaggaccctggagctgccctgggcaagcagtacagcctgacccgcttcaagaccctgtttgtggccggggagcgctgtgatgtggagaccctggagtggagcaagaatgtgttccgggtgcctgtgctggaccactggtggcagacagaaacaggcagccccatcacagccagctgtgtgggcctgggcaacagcaagaccccacctcctggccaggccggcaagtctgtgcccggctacaacgtgatgatcctggatgacaacatgcagaagctgaaggcccgctgcctgggcaacatcgtggtgaagctgcccctgcccccaggggccttcagcggcctgtggaagaaccaggaggccttcaagcacctgtactttgagaagtttcctggctactatgacaccatggatgctggctacatggatgaggagggctacctgtatgtgatgagccgggtggatgatgtgatcaacgtggccggccaccgcatctctgctggggccatcgaggagagcatcctgagccacggcaccgtggccgactgtgctgtggtgggcaaggaggaccccctgaagggccacgtgcccctggccctgtgtgtgctgaggaaggacatcaatgccacagaggagcaggtgctggaggagatcgtgaagcacgtgcggcagaacatcggccctgtggccgccttcagaaatgctgtgtttgtgaagcagctgcccaagaccaggtctgggaagatccccaggtctgccctgagcgccatcgtgaatggcaagccctacaagatcaccagcaccatcgaggaccccagcatcttcggccacgtggaggagatgctgaagcaggcctag

SEQ ID NO: 142542 - DNA, 1107 bp, synthetic construct
  misc_feature 1..1107: note = Description of Artificial Sequence: Synthetic coding sequence
  source 1..1107: mol_type = other DNA
atgctgcactggagcatgagcagcatctacggcctgcagcccggggaggtgtggtgggccgccagtgacctgggctgggtggtgggccacagctacatctgctacggccccctgctgcacggcaacaccaccgtgctgtatgagggcaagcctgtgggcaccccagatgctggggcctacttccgggtgctggccgagcacggcgtggccgccctcttcaccgcccccacagccatccgggccatccggcagcaggaccctggagctgccctgggcaagcagtacagcctgacccgcttcaagaccctgtttgtggccggggagcgctgtgatgtggagaccctggagtggagcaagaatgtgttccgggtgcctgtgctggaccactggtggcagacagaaacaggcagccccatcacagccagctgtgtgggcctgggcaacagcaagaccccacctcctggccaggccggcaagtctgtgcccggctacaacgtgatgatcctggatgacaacatgcagaagctgaaggcccgctgcctgggcaacatcgtggtgaagctgcccctgcccccaggggccttcagcggcctgtggaagaaccaggaggccttcaagcacctgtactttgagaagtttcctggctactatgacaccatggatgctggctacatggatgaggagggctacctgtatgtgatgagccgggtggatgatgtgatcaacgtggccggccaccgcatctctgctggggccatcgaggagagcatcctgagccacggcaccgtggccgactgtgctgtggtgggcaaggaggaccccctgaagggccacgtgcccctggccctgtgtgtgctgaggaaggacatcaatgccacagaggagcaggtgctggaggagatcgtgaagcacgtgcggcagaacatcggccctgtggccgccttcagaaatgctgtgtttgtgaagcagctgcccaagaccaggtctgggaagatccccaggtctgccctgagcgccatcgtgaatggcaagccctacaagatcaccagcaccatcgaggaccccagcatcttcggccacgtggaggagatgctgaagcaggcctag

SEQ ID NO: 142543 - DNA, 1266 bp, synthetic construct
  misc_feature 1..1266: note = Description of Artificial Sequence: Synthetic coding sequence
  source 1..1266: mol_type = other DNA
atggccgccaccctcatcctggagcccgccggccgctgctgctgggatgagcctgtgagaattgctgtgcggggcctggcccctgagcagcctgtgaccctgcgggccagcctgagagatgagaagggggccctcttccaggcccacgcccgctacagagctgacaccctgggggagctggacctggagcgggccccagccctgggcggcagctttgctggcctggagcccatgggcctgctgtgggccctggagcctgagaagcccctggtgcggctggtgaagagagatgtgaggacccccctggccgtggagctggaggtgctggatggccatgaccctgaccccggccgcctgctgtgccgggtgagacatgagcgctacttcctgcccccaggagtgagaagagagcctgtgcgggccggccgggtgcggggcaccctcttcctgcccccagagcccggccccttccctggcatcgtggacatgtttggcaccggcggcggcctgctggagtaccgggccagcctgctggccgggaaaggatttgctgtgatggccctggcctactacaactatgaggacctgcccaagaccatggagaccctgcacctggagtactttgaggaggccgtgaactacctgctgagccaccctgaggtgaagggccctggggtgggcctgctgggcatcagcaaaggaggagagctgtgcctgtccatggccagcttcctgaagggcatcacagctgctgtggtgatcaatggatctgtggccaacgtgggcggcaccctgcgctacaagggggagaccctgccccctgtgggcgtgaacagaaaccgcatcaaggtgaccaaggatggctacgccgacatcgtggatgtgctgaacagccccctggagggccctgaccagaagagcttcatccctgtggagcgggcagagagcaccttcctgttcctggtgggccaggatgaccacaactggaagtctgagttctacgccaatgaggcctgcaagaggctgcaggcccatggaagaaggaagccccagatcatctgctacccagagaccggccactacatcgagcccccctacttccccctgtgccgggccagcctgcacgccctggtgggcagccccatcatctggggcggggagccccgggcccacgccatggcccaggtggatgcctggaagcagctgcagaccttcttccacaagcacctgggcggccacgagggcaccatccccagcaaggtgtag

SEQ ID NO: 142544 - DNA, 1785 bp, synthetic construct
  misc_feature 1..1785: note = Description of Artificial Sequence: Synthetic coding sequence
  source 1..1785: mol_type = other DNA
atgatccagaatgtgggcaaccacctgcggcggggcctggcctctgtgttcagcaacagaaccagcaggaagagcgccctgcgggctggaaatgattctgccatggctgatggagagggctacagaaaccccacagaggtgcagatgagccagctggtgctgccctgccacaccaaccagagaggagagctgtctgtgggccagctgctgaagtggattgacaccacagcctgcctgtctgctgagagacatgctggctgcccctgtgtgacagcctccatggatgacatctactttgagcacaccatctctgtgggccaggtggtgaacatcaaggccaaggtgaacagagccttcaacagctccatggaggtgggcatccaggtggccagcgaggacctgtgcagcgagaagcagtggaatgtgtgcaaggccctggccacctttgtggcccggcgggagatcaccaaggtgaagctgaagcagatcacccccaggacagaggaggagaagatggagcacagcgtggccgctgagaggaggaggatgaggctggtgtatgctgacaccatcaaggacctgctggccaactgtgccatccagggcgacctggagagccgggactgcagcaggatggtgcctgctgagaagaccagggtggagagcgtggagctggtgctgcccccccacgccaaccaccagggcaacaccttcggcggccagatcatggcctggatggagaatgtggccaccatcgccgccagccggctgtgccgggcccaccccaccctgaaggccatcgagatgttccacttccggggccccagccaggtgggggaccggctggtgctgaaggccatcgtgaacaatgccttcaagcacagcatggaggtgggcgtgtgtgtggaggcctaccggcaggaggccgagacccacagaagacacatcaacagcgccttcatgacctttgtggtgctggatgctgatgaccagccccagctgctgccctggatccggccccagcctggagatggagagcggcgctaccgggaggccagcgccaggaagaagatccggctggacaggaagtacatcgtgtcctgcaagcagacagaggtgcccctgtctgtgccctgggaccccagcaaccaggtgtacctgagctacaacaacgtgagcagcctgaagatgctggtggccaaggacaactgggtgctgagcagcgagatcagccaggtgcggctgtacaccctggaggatgacaagttcctgtccttccacatggagatggtggtgcacgtggatgctgcccaggccttcctgctgctgagtgacctgcggcagaggcctgagtgggacaagcactacagatctgtggagctggtgcagcaggtggatgaagatgatgccatctaccacgtgaccagccctgccctgggcggccacaccaagccccaggactttgtgatcctggccagcaggaggaagccctgtgacaacggggacccctacgtgattgccctgcggtctgtgaccctgcccacccaccgggagaccccagagtacagaagaggagagaccctgtgcagcggcttctgcctgtggagggagggggaccagctgaccaaggtgtcctactacaaccaggccaccccaggagtgctgaactacgtgaccaccaacgtggccggcctgagcagcgagttctacaccaccttcaaggcctgtgagcagttcctgctggacaacagaaatgacctggcccccagcctgcagaccctgtag

SEQ ID NO: 142545 - DNA, 1824 bp, synthetic construct
  misc_feature 1..1824: note = Description of Artificial Sequence: Synthetic coding sequence
  source 1..1824: mol_type = other DNA
atgatccagaatgtgggcaaccacctgcggcggggcctggcctctgtgttcagcaacagaaccagcaggaagagcgccctgcgggctggaaatgattctgccatggctgatggagagggctacagaaaccccacagaggtgcagatgagccagctggtgctgccctgccacaccaaccagagaggagagctgtctgtgggccagctgctgaagtggattgacaccacagcctgcctgtctgctgagagacatgctggctgcccctgtgtgacagcctccatggatgacatctactttgagcacaccatctctgtgggccaggtggtgaacatcaaggccaaggtgaacagagccttcaacagctccatggaggtgggcatccaggtggccagcgaggacctgtgcagcgagaagcagtggaatgtgtgcaaggccctggccacctttgtggcccggcgggagatcaccaaggtgaagctgaagcagatcacccccaggacagaggaggagaagatggagcacagcgtggccgctgagaggaggaggatgaggctggtgtatgctgacaccatcaaggacctgctggccaactgtgccatccagggcgacctggagagccgggactgcagcaggatggtgcctgctgagaagaccagggtggagagcgtggagctggtgctgcccccccacgccaaccaccagggcaacaccttcggcggccagatcatggcctggatggagaatgtggccaccatcgccgccagccggctgtgccgggcccaccccaccctgaaggccatcgagatgttccacttccggggccccagccaggtgggggaccggctggtgctgaaggccatcgtgaacaatgccttcaagcacagcatggaggtgggcgtgtgtgtggaggcctaccggcaggaggccgagacccacagaagacacatcaacagcgccttcatgacctttgtggtgctggatgctgatgaccagccccagctgctgccctggatccggccccagcctggagatggagagcggcgctaccgggaggccagcgccaggaagaagatccggctggacaggaagtacatcgtgtcctgcaagcagacagaggtgcccctgtctgtgccctgggaccccagcaaccaggtgtacctgagctacaacaacgtgagcagcctgaagatgctggtggccaaggacaactgggtgctgagcagcgagatcagccaggtgcggctgtacaccctggaggatgacaagttcctgtccttccacatggagatggtggtgcacgtggatgctgcccaggccttcctgctgctgagtgacctgcggcagaggcctgagtgggacaagcactacagatctgtggagctggtgcagcaggtggatgaagatgatgccatctaccacgtgaccagccctgccctgggcggccacaccaagccccaggactttgtgatcctggccagcaggaggaagccctgtgacaacggggacccctacgtgattgccctgcggtctgtgaccctgcccacccaccgggagaccccagagtacagaagaggagagaccctgtgcagcggcttctgcctgtggagggagggggaccagctgaccaagtgctgctgggtgcgggtgtccctgacagagctggtgtctgccagcggcttctacagctggggcctggagagccgcagcaagggccgccgcagtgatggctggaatggcaagctggccggcggccacctgagcaccctgaaggccatccctgtggccaagatcaacagcagatttggctacctgcaggacacctag

SEQ ID NO: 142546 - DNA, 1668 bp, synthetic construct
  misc_feature 1..1668: note = Description of Artificial Sequence: Synthetic coding sequence
  source 1..1668: mol_type = other DNA
atggagaggcctgcccctggagaggtggtgatgagccaggccatccagcctgcccacgccacagcccggggggagctgtctgctggccagctgctgaagtggattgacaccacagcctgcctggccgctgagaagcatgctggggtgtcctgtgtgacagcctctgtggatgacatccagtttgaggagacagcccgggtgggccaggtgatcaccatcaaggccaaggtgacccgggccttcagcacctccatggagatcagcatcaaggtgatggtgcaggacatgctgaccggcatcgagaagctggtgtctgtggccttcagcacctttgtggccaagcctgtgggcaaggagaagatccacctgaagcctgtgaccctgctgacagagcaggaccacgtggagcacaacctggccgctgagaggaggaaggtgcggctgcagcacgaggacaccttcaacaacctgatgaaggagagcagcaagtttgatgacctgatctttgatgaggaggagggcgctgtgtccacccggggcacctctgtgcagagcattgagctggtgctgccccctcatgccaaccaccacggcaacacctttggaggccagatcatggcctggatggagaccgtggccaccatcagcgccagccggctgtgctgggcccaccccttcctgaagtctgtggacatgttcaagttccggggccccagcacagtgggggaccggctggtgttcaccgccatcgtgaacaacaccttccagacctgtgtggaggtgggcgtgcgggtggaggcctttgactgccaggagtgggccgagggccggggccgccacatcaacagcgccttcctgatctacaatgctgctgatgacaaggaaaatctcatcaccttcccccgcatccagcccatcagcaaggatgacttccgccgctacagaggagccatcgccaggaagaggatccggctgggcaggaaatatgtgatcagccacaaggaggaggtgcccctgtgcatccactgggacatcagcaagcaggccagcctgagtgacagcaatgtggaggccctgaagaagctggccgccaagaggggctgggaggtgaccagcacagtggagaagatcaagatctacaccctggaggagcatgatgtgctgtctgtgtgggtggagaagcacgtgggcagccctgcccacctggcctaccgcctgctgagtgacttcaccaagaggcccctgtgggacccccactttgtgtcctgtgaggtgattgactgggtgtctgaagatgaccagctgtaccacatcacctgccccatcctgaatgatgacaagcccaaggacctggtggtgctggtgtccaggaggaagcccctgaaggatggcaacacctacacagtggccgtgaagagcgtcatcctgcccagcgtgccccccagcccccagtacatccgctctgagatcatctgtgccggcttcctgatccacgccatcgacagcaacagctgcatcgtgtcctacttcaaccacatgtctgccagcatcctgccctactttgctggcaacctgggcggctggagcaagagcattgaggagacagctgccagctgcatccagttcctggagaaccccccagatgatggctttgtgtccaccttctag

SEQ ID NO: 142547 - DNA, 1452 bp, synthetic construct
  misc_feature 1..1452: note = Description of Artificial Sequence: Synthetic coding sequence
  source 1..1452: mol_type = other DNA
atgagcaacaagctgctgagcccccacccccacagcgtggtgctgcggtctgagttcaagatggccagcagccctgctgtgctgcgggccagccggctgtaccagtggagcctgaagagcagcgcccagttcctgggcagcccccagctgcggcaggtgggccagatcatccgggtgcctgccaggatggccgccaccctcatcctggagcccgccggccgctgctgctgggatgagcctgtgagaattgctgtgcggggcctggcccctgagcagcctgtgaccctgcgggccagcctgagagatgagaagggggccctcttccaggcccacgcccgctacagagctgacaccctgggggagctggacctggagcgggccccagccctgggcggcagctttgctggcctggagcccatgggcctgctgtgggccctggagcctgagaagcccctggtgcggctggtgaagagagatgtgaggacccccctggccgtggagctggaggtgctggatggccatgaccctgaccccggccgcctgctgtgccagaccaggcatgagcgctacttcctgcccccaggagtgagaagagagcctgtgcgggtgggccgggtgcggggcaccctcttcctgcccccagagcccggccccttccctggcatcgtggacatgtttggcaccggcggcggcctgctggagtaccgggccagcctgctggccgggaaaggatttgctgtgatggccctggcctactacaactatgaggacctgcccaagaccatggagaccctgcacctggagtactttgaggaggccatgaactacctgctgagccaccctgaggtgaagggccctggggtgggcctgctgggcatcagcaaaggaggagagctgtgcctgtccatggccagcttcctgaagggcatcacagctgctgtggtgatcaatggatctgtggccaacgtgggcggcaccctgcactacaagggggagaccctgccccctgtgggcgtgaacagaaaccgcatcaaggtgaccaaggatggctacgccgacatcgtggatgtgctgaacagccccctggagggccctgaccagaagagcttcatccctgtggagcgggcagagagcaccttcctgttcctggtgggccaggatgaccacaactggaagtctgagttctacgccaatgaggcctgcaagaggctgcaggcccatggaagaaggaagccccagatcatctgctacccagagaccggccactacatcgagcccccctacttccccctgtgccgggccagcctgcacgccctggtgggcagccccatcatctggggcggggagccccgggcccacgccatggcccaggtggatgcctggaagcagctgcagaccttcttccacaagcacctgggcggccacgagggcaccatccccagcaaggtgtag

SEQ ID NO: 142548 - DNA, 1266 bp, synthetic construct
  misc_feature 1..1266: note = Description of Artificial Sequence: Synthetic coding sequence
  source 1..1266: mol_type = other DNA
atgtctgccaccctcatcctggagcccccaggccgctgctgctggaatgaacctgtgagaattgctgtgcggggcctggcccctgagcagagggtgaccctgcgggccagcctgagagatgagaagggggccctcttccgggcccacgcccgctactgtgctgatgcccggggggagctggacctggagcgggccccagccctgggcggcagctttgctggcctggagcccatgggcctgctgtgggccctggagcctgagaagcccttctggaggttcctgaagagagatgtgcagatcccctttgtggtggagctggaggtgctggatggccatgaccctgagcccggccgcctgctgtgccaggcccagcacgagcggcacttcctgcccccaggagtgcggcggcagagcgtgcgggccggccgggtgcgggccaccctcttcctgcccccaggccctggccccttccctggcatcatcgacatcttcggcatcggcggcggcctgctggagtaccgggccagcctgctggccggccacggctttgccaccctggccctggcctactacaactttgaggacctgcccaacaacatggacaacatcagcctggagtactttgaggaggccgtgtgctacatgctgcagcacccccaggtgaagggccctggcatcggcctgctgggcatcagcctgggcgctgacatctgcctgtccatggccagcttcctgaagaatgtgtctgccaccgtgtccatcaatggaagtggcatcagcggcaacacagccatcaactacaagcacagcagcatcccccccctgggctatgacctgcggcgcatcaaggtggccttcagcggcctggtggacatcgtggacatcagaaatgccctggtgggcggctacaagaaccccagcatgatccccatcgagaaggcccagggccccatcctgctgattgtgggccaggatgaccacaactggaggtctgagctgtatgcccagacagtgtctgagcggctgcaggcccacggcaaggagaagccccagatcatctgctacccaggcaccggccactacatcgagcccccctacttccccctgtgcccagccagcctgcaccggctgctgaacaagcacgtgatctggggcggggagccccgggcccacagcaaggcccaggaggatgcctggaagcagatcctggccttcttctgcaagcacctgggcggcacccagaagacagctgtgcccaagctgtag

SEQ ID NO: 142549 - DNA, 624 bp, synthetic construct
  misc_feature 1..624: note = Description of Artificial Sequence: Synthetic coding sequence
  source 1..624: mol_type = other DNA
atgctgcagcaccccaaggtgaagggccccagcatcgccctgctgggcttcagcaaaggaggagacctgtgcctgtccatggccagcttcctgaagggcatcacagccaccgtgctgatcaatgcctgtgtggccaacacagtggcccccctgcactacaaggacatgatcatccccaagctggtggatgacctgggcaaggtgaagatcaccaagagcggcttcctgaccttcatggacacctggagcaaccccctggaggagcacaaccaccagagcctggtgcccctggagaaggcccaggtgcccttcctgttcatcgtgggcatggatgaccagagctggaagtctgagttctacgcccagatcgccagcgagcggctgcaggcccacggcaaggagcggccccagatcatctgctacccagagaccggccactgcatcgaccccccctacttcccccccagccgggcctctgtgcatgctgtgctgggggaggccatcttctacggcggggagcccaaggcccacagcaaggcccaggtggatgcctggcagcagatccagaccttcttccacaagcacctgaatggcaagaagtctgtgaagcacagcaagatctag

SEQ ID NO: 142550 - DNA, 507 bp, synthetic construct
  misc_feature 1..507: note = Description of Artificial Sequence: Synthetic coding sequence
  source 1..507: mol_type = other DNA
atgctgcagcaccccaaggtgaagggccccagcatcgccctgctgggcttcagcaaaggaggagacctgtgcctgtccatggccagcttcctgaagggcatcacagccaccgtgctgatcaatgcctgtgtggccaacacagtggcccccctgcactacaaggacatgatcatccccaagctggtggatgacctgggcaaggtgaagatcaccaagagcggcttcctgaccttcatggacacctggagcaaccccctggaggagcacaaccaccagagcctggtgcccctggagaaggcccaggtgcccttcctgttcatcgtgggcatggatgaccagagctggaagtctgagttctacgcccagatcgccagcgagcggctgcaggcccacggcaaggagcggccccagatcatctgctacccagagaccggccactgcatcgaccccccctacttcccccccagccgggcctctgtgcatgctgtgctgggggaggccatctag

SEQ ID NO: 142551 - DNA, 1113 bp, synthetic construct
  misc_feature 1..1113: note = Description of Artificial Sequence: Synthetic coding sequence
  source 1..1113: mol_type = other DNA
atggcccggcccggcctcatccacagcgcccctggcctgcctgacacctgtgccctgctgcagcccccagctgccagcgctgctgctgcccccagcatgagcggcccagatgtggagacccccagcgccatccagatctgccgcatcatgaggccagatgatgccaacgtggccggaaatgtgcacggcggcaccatcctgaagatgattgaggaggccggggccatcatcagcaccaggcactgcaacagccagaatggagagcgctgtgtggccgccctggcccgggtggagaggacagacttcctgagccccatgtgcatcggggaggtggcccacgtgtctgctgagatcacctacaccagcaagcacagcgtggaggtgcaggtgaatgtgatgtctgagaacatcctgactggagccaagaagctgaccaacaaggccaccctgtggtacgtgcccctgagcctgaagaatgtggacaaggtgctggaggtgccccctgtggtgtacagccggcaggagcaggaggaggagggcaggaagagatatgaggcccagaagctggagaggatggagaccaagtggagaaatggagacatcgtgcagcctgtgctgaaccctgagcccaacacagtgtcctacagccagagcagcctcatccacctggtgggccccagcgactgcaccctgcacggctttgtgcacggcggcgtgaccatgaagctgatggatgaggtggccggcatcgtggccgcccggcactgcaagaccaacatcgtgacagcctctgtggatgccatcaacttccatgacaagatcaggaagggctgcgtcatcaccatcagcggccgcatgaccttcaccagcaacaagtccatggagattgaggtgctggtggatgctgaccctgtggtggacagcagccagaagcgctacagagctgccagcgccttcttcacctacgtgtccctgagccaggagggccgcagcctgcctgtgccccagctggtgcctgagacagaagatgagaagaagagatttgaggagggcaagggccgctacctgcagatgaaggccaagaggcagggccacgccgagccccagccctag

SEQ ID NO: 142552 - DNA, 990 bp, synthetic construct
  misc_feature 1..990: note = Description of Artificial Sequence: Synthetic coding sequence
  source 1..990: mol_type = other DNA
atggccttccagctgagccgcatcatgaggccagatgatgccaacgtggccggaaatgtgcatggaggcaccatcctgaagatgattgaggaggccggggccatcatcagcaccaggcactgcaacagccagaatggagagcgctgtgtggccgccctggcccgggtggagaggacagacttcctgagccccatgtgcattggagaggtggcccacgtgtctgctgagatcacctacaccagcaagcacagcgtggaggtgcaggtgaatgtgatgtctgagaacatcctgaccggggccaagaagctgaccaacaaggccaccctgtggtacgtgcccctgagcctgaagaatgtggacaaggtgctggaggtgccccctgtggtgtacagccggcaggagcaggaggaggagggcaggaagagatatgaggcccagaagctggagaggatggagaccaagtggagaaatggagacatcgtgcagcctgtgctgaaccctgagcccaacacagtgtcctacagccagagcagcctcatccacctggtgggccccagcgactgcaccctgcacggctttgtgcatggaggagtgaccatgaagctgatggatgaggtggccggcatcgtggccgcccggcactgcaagaccaacatcgtgacagcctctgtggatgccatcaacttccatgacaagatcaggaagggctgtgtgatcaccatcagcggccgcatgaccttcaccagcaacaagtccatggagattgaggtgctggtggatgctgaccctgtggtggacagcagccagaagcgctaccgggccgccagcgccttcttcacctacgtgtccctgagccaggagggccgcagcctgcctgtgccccagctggtgcctgagacagaagatgagaagaagagatttgaggagggcaagggccgctacctgcagatgaaggccaagaggcagggccatgctgagccccagccctag

SEQ ID NO: 142553 - DNA, 1053 bp, synthetic construct
  misc_feature 1..1053: note = Description of Artificial Sequence: Synthetic coding sequence
  source 1..1053: mol_type = other DNA
atgctgctgctgcggcgcagcctgagcctgaatgtgctgaggaaggaggtggaccgggcctgcttcggggagaaggccaagcagatcatgaggccagatgatgccaacgtggccggaaatgtgcacggcggcaccatcctgaagatgattgaggaggccggggccatcatcagcaccaggcactgcaacagccagaatggagagcgctgtgtggccgccctggcccgggtggagaggacagacttcctgagccccatgtgcatcggggaggtggcccacgtgtctgctgagatcacctacaccagcaagcacagcgtggaggtgcaggtgaatgtgatgtctgagaacatcctgactggagccaagaagctgaccaacaaggccaccctgtggtacgtgcccctgagcctgaagaatgtggacaaggtgctggaggtgccccctgtggtgtacagccggcaggagcaggaggaggagggcaggaagagatatgaggcccagaagctggagaggatggagaccaagtggagaaatggagacatcgtgcagcctgtgctgaaccctgagcccaacacagtgtcctacagccagagcagcctcatccacctggtgggccccagcgactgcaccctgcacggctttgtgcacggcggcgtgaccatgaagctgatggatgaggtggccggcatcgtggccgcccggcactgcaagaccaacatcgtgacagcctctgtggatgccatcaacttccatgacaagatcaggaagggctgcgtcatcaccatcagcggccgcatgaccttcaccagcaacaagtccatggagattgaggtgctggtggatgctgaccctgtggtggacagcagccagaagcgctacagagctgccagcgccttcttcacctacgtgtccctgagccaggagggccgcagcctgcctgtgccccagctggtgcctgagacagaagatgagaagaagagatttgaggagggcaagggccgctacctgcagatgaaggccaagaggcagggccacgccgagccccagccctag

SEQ ID NO: 142554 - DNA, 1143 bp, synthetic construct
  misc_feature 1..1143: note = Description of Artificial Sequence: Synthetic coding sequence
  source 1..1143: mol_type = other DNA
atgaagctgctggcccgggccctgcggctgtgtgaatttggccggcaggccagcagccggcggctggtggccggccagggctgtgtgggcccccggcggggctgctgtgcccctgtgcaggtggtgggccccagggctgacctgcccccctgtggggcctgcatcaccggccgcatcatgaggccagatgatgccaacgtggccggaaatgtgcacggcggcaccatcctgaagatgattgaggaggccggggccatcatcagcaccaggcactgcaacagccagaatggagagcgctgtgtggccgccctggcccgggtggagaggacagacttcctgagccccatgtgcatcggggaggtggcccacgtgtctgctgagatcacctacaccagcaagcacagcgtggaggtgcaggtgaatgtgatgtctgagaacatcctgactggagccaagaagctgaccaacaaggccaccctgtggtacgtgcccctgagcctgaagaatgtggacaaggtgctggaggtgccccctgtggtgtacagccggcaggagcaggaggaggagggcaggaagagatatgaggcccagaagctggagaggatggagaccaagtggagaaatggagacatcgtgcagcctgtgctgaaccctgagcccaacacagtgtcctacagccagagcagcctcatccacctggtgggccccagcgactgcaccctgcacggctttgtgcacggcggcgtgaccatgaagctgatggatgaggtggccggcatcgtggccgcccggcactgcaagaccaacatcgtgacagcctctgtggatgccatcaacttccatgacaagatcaggaagggctgcgtcatcaccatcagcggccgcatgaccttcaccagcaacaagtccatggagattgaggtgctggtggatgctgaccctgtggtggacagcagccagaagcgctacagagctgccagcgccttcttcacctacgtgtccctgagccaggagggccgcagcctgcctgtgccccagctggtgcctgagacagaagatgagaagaagagatttgaggagggcaagggccgctacctgcagatgaaggccaagaggcagggccacgccgagccccagccctag

SEQ ID NO: 142555 - DNA, 672 bp, synthetic construct
  misc_feature 1..672: note = Description of Artificial Sequence: Synthetic coding sequence
  source 1..672: mol_type = other DNA
atgctgctgctgcggcgcagcctgagcctgaatgtgctgaggaaggaggtggaccgggcctgcttcggggagaaggccaagcagatcatgaggccagatgatgccaacgtggccggaaatgtgcacggcggcaccatcctgaagatgattgaggaggccggggccatcatcagcaccaggcactgcaacagccagaatggagagcgctgtgtggccgccctggcccgggtggagaggacagacttcctgagccccatgtgcatcggggaggtggcccacgtgtctgctgagatcacctacaccagcaagcacagcgtggaggtgcaggtgaatgtgatgtctgagaacatcctgactggagccaagaagctgaccaacaaggccaccctgtggtacgtgcccctgagcctgaagaatgtggacaaggtgctggaggtgccccctgtggtgtacagccggcaggagcaggaggaggagggcaggaagagatatgaggcccagaagctggagaggatggagaccaagtggagaaatggagacatcgtgcagcctgtgctgaaccctgagcccaacacagtgtcctacagccagagcagcctcatccacctggtgggccccagcgactgcaccctgcacggctttgtgcacggcggcggcgtggacttccactag

SEQ ID NO: 142556 - DNA, 798 bp, synthetic construct
  misc_feature 1..798: note = Description of Artificial Sequence: Synthetic coding sequence
  source 1..798: mol_type = other DNA
atgtgcattggagaggtggcccacgtgtctgctgagatcacctacaccagcaagcacagcgtggaggtgcaggtgaatgtgatgtctgagaacatcctgaccggggccaagaagctgaccaacaaggccaccctgtggtacgtgcccctgagcctgaagaatgtggacaaggtgctggaggtgccccctgtggtgtacagccggcaggagcaggaggaggagggcaggaagagatatgaggcccagaagctggagaggatggagaccaagtggagaaatggagacatcgtgcagcctgtgctgaaccctgagcccaacacagtgtcctacagccagagcagcctcatccacctggtgggccccagcgactgcaccctgcacggctttgtgcatggaggagtgaccatgaagctgatggatgaggtggccggcatcgtggccgcccggcactgcaagaccaacatcgtgacagcctctgtggatgccatcaacttccatgacaagatcaggaagggctgtgtgatcaccatcagcggccgcatgaccttcaccagcaacaagtccatggagattgaggtgctggtggatgctgaccctgtggtggacagcagccagaagcgctaccgggccgccagcgccttcttcacctacgtgtccctgagccaggagggccgcagcctgcctgtgccccagctggtgcctgagacagaagatgagaagaagagatttgaggagggcaagggccgctacctgcagatgaaggccaagaggcagggccatgctgagccccagccctag

SEQ ID NO: 142557 - DNA, 1308 bp, synthetic construct
  misc_feature 1..1308: note = Description of Artificial Sequence: Synthetic coding sequence
  source 1..1308: mol_type = other DNA
atggccgcccccctggtgctggtgctggtggtggccgtgacagtgcgggccgccctcttccgcagcagcctggccgagttcatcagcgagcgggtggaggtggtgagccccctgagctcctggaagagggtggtggagggcctgagcctgctggacctgggcgtgagcccctacagcggggctgtgttccacgagacccccctcatcatctacctgttccacttcctgattgattatgcagagctggtgttcatgatcacagatgccctgacagccatcgccctgtactttgccatccaggacttcaacaaggtggtgttcaagaagcagaagctgctgctggagctggaccagtatgccccagatgtggccgagctgatccgcacccccatggagatgagatacatccccctgaaggtggccctcttctacctgctgaacccctacaccatcctgagctgtgtggccaagagcacctgtgccatcaacaacaccctgattgccttcttcatcctgaccaccatcaagggcagcgccttcctgagcgccatcttcctggccctggccacctaccagagcctgtaccccctgaccctgtttgtgcccggcctgctgtacctgctgcagaggcagtacatccctgtgaagatgaagagcaaggccttctggatcttctcctgggagtatgccatgatgtatgtgggcagcctggtggtgatcatctgcctgtccttcttcctgctgagctcctgggacttcatcccagctgtgtatggcttcatcctgtctgtgcctgacctgacccccaacatcggcctcttctggtacttctttgctgagatgtttgagcacttcagcctcttctttgtgtgtgtgttccagatcaacgtgttcttctacaccatccccctggccatcaagctgaaggagcaccccatcttcttcatgttcatccagattgctgtgattgccatcttcaagagctaccccaccgtgggagatgtggccctgtacatggccttcttccctgtgtggaaccacctgtaccgcttcctgaggaacatctttgtgctgacctgcatcatcatcgtgtgcagcctgctcttccctgtgctgtggcacctgtggatctatgccggcagcgccaacagcaacttcttctacgccatcaccctgaccttcaacgtgggccagatcctgctgatcagtgactacttctacgccttcctgcggcgggagtactacctgacccacggcctgtacctgacagccaaggatggaacagaggccatgctggtgctgaagtag

SEQ ID NO: 142558 - DNA, 342 bp, synthetic construct
  misc_feature 1..342: note = Description of Artificial Sequence: Synthetic coding sequence
  source 1..342: mol_type = other DNA
atgagcagcccccaggccccagaagatggccagggctgtggggacagaggagaccccccaggggacctgcggtctgtgctggtgaccaccgtgctgaacctggagcccctggatgaagatctcttccggggccgccactactgggtgcctgccaagaggctgtttggaggccagatcgtgggccaggccctggtggccgccgccaagtctgtgtctgaagatgtgcacgtgcacagcctgcactgctactttgtgcgggcagagcagatgcccagctgtgtgctgcggcgcagccctgctgagaagagcctgtggaccttcaccgtgtgtgacctgtactag

SEQ ID NO: 142559 - DNA, 1320 bp, synthetic construct
  misc_feature 1..1320: note = Description of Artificial Sequence: Synthetic coding sequence
  source 1..1320: mol_type = other DNA
atgaggcgggccgccctgcggctgtgtgccctgggcaagggccagctgaccccaggccggggcctgacccagggcccccagaaccccaagaagcagggcatcttccacatccacgaggtgcgggacaagctgcgggagatcgtgggcgccagcaccaactggagggaccacgtgaaggccatggaggagaggaagctgctgcacagcttcctggccaagagccaggacggcctgccccccaggaggatgaaggacagctacatcgaggtgctgctgcccctgggcagcgagcctgagctgcgggagaagtacctgactgtgcagaacacagtgcgcttcggccgcatcctggaggacctggacagcctgggcgtgctgatctgctacatgcacaacaagatccacagcgccaagatgagccccctgagcatcgtgacagccctggtggacaagattgacatgtgcaagaagagcctgagccctgagcaggacatcaagttcagcggccacgtgtcctgggtgggcaagacctccatggaggtgaagatgcagatgttccagctgcatggagatgagttctgccctgtgctggatgccacctttgtgatggtggcccgggacagtgaaaataaaggacctgcctttgtgaaccccctcatccctgagagccctgaggaggaggagctgttccggcagggcgagctgaacaagggcagaagaattgccttcagcagcaccagcctgctgaagatggcccccagcgctgaggagaggaccaccatccacgagatgttcctgagcaccctggaccccaagaccatctccttccgcagccgggtgctgcccagcaatgctgtgtggatggagaacagcaagctgaagagcctggagatctgccacccccaggagaggaacatcttcaaccgcatctttggaggcttcctgatgaggaaggcctatgagctggcctgggccacagcctgcagctttggaggcagccggccctttgtggtggccgtggatgacatcatgttccagaagcctgtggaggtgggcagcctgctcttcctgagcagccaggtgtgcttcacccagaacaactacatccaggtgcgggtgcacagcgaggtggccagcctgcaggagaagcagcacaccaccaccaacgtgttccacttcaccttcatgtctgagaaggaggtgcccctggtgttccccaagacctatggagagagcatgctgtacctggatggccagaggcacttcaacagcatgagcggccctgccaccctgaggaaggactacctggtggagccctag

SEQ ID NO: 142560 - DNA, 1140 bp, synthetic construct
  misc_feature 1..1140: note = Description of Artificial Sequence: Synthetic coding sequence
  source 1..1140: mol_type = other DNA
atggaggagaggaagctgctgcacagcttcctggccaagagccaggacggcctgccccccaggaggatgaaggacagctacatcgaggtgctgctgcccctgggcagcgagcctgagctgcgggagaagtacctgactgtgcagaacacagtgcgcttcggccgcatcctggaggacctggacagcctgggcgtgctgatctgctacatgcacaacaagatccacagcgccaagatgagccccctgagcatcgtgacagccctggtggacaagattgacatgtgcaagaagagcctgagccctgagcaggacatcaagttcagcggccacgtgtcctgggtgggcaagacctccatggaggtgaagatgcagatgttccagctgcatggagatgagttctgccctgtgctggatgccacctttgtgatggtggcccgggacagtgaaaataaaggacctgcctttgtgaaccccctcatccctgagagccctgaggaggaggagctgttccggcagggcgagctgaacaagggcagaagaattgccttcagcagcaccagcctgctgaagatggcccccagcgctgaggagaggaccaccatccacgagatgttcctgagcaccctggaccccaagaccatctccttccgcagccgggtgctgcccagcaatgctgtgtggatggagaacagcaagctgaagagcctggagatctgccacccccaggagaggaacatcttcaaccgcatctttggaggcttcctgatgaggaaggcctatgagctggcctgggccacagcctgcagctttggaggcagccggccctttgtggtggccgtggatgacatcatgttccagaagcctgtggaggtgggcagcctgctcttcctgagcagccaggtgtgcttcacccagaacaactacatccaggtgcgggtgcacagcgaggtggccagcctgcaggagaagcagcacaccaccaccaacgtgttccacttcaccttcatgtctgagaaggaggtgcccctggtgttccccaagacctatggagagagcatgctgtacctggatggccagaggcacttcaacagcatgagcggccctgccaccctgaggaaggactacctggtggagccctag

SEQ ID NO: 142561 - DNA, 1347 bp, synthetic construct
  misc_feature 1..1347: note = Description of Artificial Sequence: Synthetic coding sequence
  source 1..1347: mol_type = other DNA
atgaggcgggccgccctgcggctgtgtgccctgggcaagggccagctgaccccaggccggggcctgacccagggcccccagaaccccaagaagcagggcatcttccacatccacgaggcctgcagcagcatccacgtgaaccacgtgcgggacaagctgcgggagatcgtgggcgccagcaccaactggagggaccacgtgaaggccatggaggagaggaagctgctgcacagcttcctggccaagagccaggacggcctgccccccaggaggatgaaggacagctacatcgaggtgctgctgcccctgggcagcgagcctgagctgcgggagaagtacctgactgtgcagaacacagtgcgcttcggccgcatcctggaggacctggacagcctgggcgtgctgatctgctacatgcacaacaagatccacagcgccaagatgagccccctgagcatcgtgacagccctggtggacaagattgacatgtgcaagaagagcctgagccctgagcaggacatcaagttcagcggccacgtgtcctgggtgggcaagacctccatggaggtgaagatgcagatgttccagctgcatggagatgagttctgccctgtgctggatgccacctttgtgatggtggcccgggacagcgagaacaagggccctgcctttgtgaaccccctcatccctgagagccctgaggaggaggagctgttccggcagggcgagctgaacaagggccgccgcatcgccttcagcagcaccagcctgctgaagatggcccccagcgctgaggagaggaccaccatccacgagatgttcctgagcaccctggaccccaagaccatctccttccgcagccgggtgctgcccagcaatgctgtgtggatggagaacagcaagctgaagagcctggagatctgccacccccaggagaggaacatcttcaaccgcatctttggaggcttcctgatgaggaaggcctatgagctggcctgggccacagcctgcagctttggaggcagccggccctttgtggtggccgtggatgacatcatgttccagaagcctgtggaggtgggcagcctgctcttcctgagcagccaggtgtgcttcacccagaacaactacatccaggtgcgggtgcacagcgaggtggccagcctgcaggagaagcagcacaccaccaccaacgtgttccacttcaccttcatgtctgagaaggaggtgcccctggtgttccccaagacctacggggagagcatgctgtacctggatggccagaggcacttcaacagcatgagcggccctgccaccctgaggaaggactacctggtggagccctag

SEQ ID NO: 142562 - DNA, 1269 bp, synthetic construct
  misc_feature 1..1269: note = Description of Artificial Sequence: Synthetic coding sequence
  source 1..1269: mol_type = other DNA
atgaccgtcttcttcaagaccctgaggaaccactggaagaagaccacagctggcctgtgcctgctgacctggggcggccactggctgtatggcaagcactgtgacaacctgctgcggcgggccgcctgccaggaggcccaggtgtttggaaaccagctgatccccccaaatgcccaggtgaagaaggccaccgtcttcctgaacccagctgcctgcaagggcaaggcccggaccctgtttgagaagaatgctgcccccatcctgcacctgagcggcatggatgtgaccatcgtgaagacagattatgagggccaggccaagaagctgctggagctgatggagaacacagatgtgatcatcgtggccggaggagatggcaccctgcaggaggtggtgactggagtgctgcggaggacagatgaggccaccttcagcaagatccccatcggcttcatccccctgggggagaccagcagcctgagccacaccctgtttgctgagagcggcaacaaggtgcagcacatcacagatgccaccctggccatcgtgaagggggagaccgtgcccctggatgtgctgcagatcaagggggagaaggagcagcctgtgtttgccatgacaggcctgcgctggggcagcttcagagatgctggggtgaaggtgtccaagtactggtacctgggccccctgaagatcaaggccgcccacttcttcagcaccctgaaggagtggccccagacccaccaggccagcatctcctacacaggccccacagagcggcccccaaatgaacctgaggagacccctgtgcagaggcccagcctgtaccgccgcatcctgcggcggctggccagctactgggcccagccccaggatgccctgagccaggaggtgtccccagaggtgtggaaggatgtgcagctgagcaccatcgagctgagcatcaccaccaggaacaaccagctggaccccaccagcaaggaggacttcctgaacatctgcattgaaccagacaccatcagcaagggggacttcatcaccatcggcagcaggaaggtgaggaaccccaagctgcacgtggagggcacagagtgcctgcaggccagccagtgcaccctgctgatccctgagggcgccggcggcagcttcagcattgattctgaggagtatgaggccatgcctgtggaggtgaagctgctgcccaggaagctgcagttcttctgtgaccccaggaagcgggagcagatgctgaccagccccacccagtag

SEQ ID NO: 142563 - DNA, 198 bp, synthetic construct
  misc_feature 1..198: note = Description of Artificial Sequence: Synthetic coding sequence
  source 1..198: mol_type = other DNA
atgaccgtcttcttcaagaccctgaggaaccactggaagaagaccacagctggcctgtgcctgctgacctggggcggccactggctgtatggcaagcactgtgacaacctgctgcggcgggccgcctgccaggaggcccagcactaccaggatgagagccgctgggagcccaccctgagcaggaccccaggcagctag

SEQ ID NO: 142564 - DNA, 198 bp, synthetic construct; identical to SEQ ID NO: 142563
  misc_feature 1..198: note = Description of Artificial Sequence: Synthetic coding sequence
  source 1..198: mol_type = other DNA

SEQ ID NO: 142565 - DNA, 735 bp, synthetic construct
  misc_feature 1..735: note = Description of Artificial Sequence: Synthetic coding sequence
  source 1..735: mol_type = other DNA
atgaccgtcttcttcaagaccctgaggaaccactggaagaagaccacagctggcctgtgcctgctgacctggggcggccactggctgtatggcaagcactgtgacaacctgctgcggcgggccgcctgccaggaggcccaggtgtttggaaaccagctgatccccccaaatgcccaggtgaagaaggccaccgtcttcctgaacccagctgcctgcaagggcaccctgtttgagaagaatgctgcccccatcctgcacctgagcggcatggatgtgaccatcgtgaagacagattatgagggccaggccaagaagctgctggagctgatggagaacacagatgtgatcatcgtggccggaggagatggcaccctgcaggaggtggtgactggagtgctgcggaggacagatgaggccaccttcagcaagatccccatcggcttcatccccctgggggagaccagcagcctgagccacaccctgtttgctgagagcggcaacaaggtgcagcacatcacagatgccaccctggccatcgtgaagggggagaccgtgcccctggatgtgctgcagatcaagggggagaaggagcagcctgtgtttgccatgacaggcctgcgctggggcagcttcagagatgctggggtgaaggtgtccaagtactggtacctgggccccctgaagatcaaggccgcccacttcttcagcaccctgaagcccttccccaagaggtag

SEQ ID NO: 142566 - DNA, 1728 bp, synthetic construct
  misc_feature 1..1728: note = Description of Artificial Sequence: Synthetic coding sequence
  source 1..1728: mol_type = other DNA
atgcagagcccctggaagatcctgactgtggcccccctcttcctgctgctgagcctgcagagcagcgccagccctgccaatgatgaccagagccggcccagcctgagcaatggccacacctgtgtgggctgtgtgctggtggtgtctgtgattgagcagctggcccaggtgcacaacagcacagtgcaggcctccatggagcggctgtgcagctacctgcctgagaagctgttcctgaagaccacctgctacctggtgattgacaagtttggaagtgacatcatcaagctgctgtctgctgacatgaatgctgatgtggtgtgccacaccctggagttctgcaagcagaacacaggccagcccctgtgccacctgtaccccctgcccaaggagacctggaagttcaccctgcagaaggcccggcagatcgtgaagaagagccccatcctgaagtacagccgcagcggcagtgacatctgcagcctgcctgtgctggccaagatctgccagaagatcaagctggccatggagcagagcgtgcccttcaaggatgtggacagcgacaagtacagcgtcttccccaccctgcggggctaccactggaggggccgggactgcaatgacagtgatgagagcgtgtacccaggaagaagacccaacaactgggatgtgcaccaggacagcaactgcaatggcatctggggcgtggaccccaaggatggagtgccctatgagaagaagttctgtgagggcagccagccccggggcatcatcctgctgggggacagcgctggggcccacttccacatcagccctgagtggatcacagccagccagatgagcctgaacagcttcatcaacctgcccacagccctgaccaatgagctggactggccccagctgagcggggccaccggcttcctggacagcacagtgggcatcaaggagaagagcatctacctgcggctgtggaagaggaaccactgcaaccaccgggactaccagaacatcagcagaaatggagccagcagcaggaacctgaagaagttcatcgagagcctgagcaggaacaaggtgctggactacccagccatcgtcatctatgccatgattggaaatgatgtgtgcagcggcaagagtgaccctgtgcctgccatgaccaccccagagaagctgtacagcaatgtgatgcagaccctgaagcacctgaacagccacctgcccaacggcagccacgtgatcctgtatggcctgcctgatggcaccttcctgtgggacaacctgcacaaccgctaccaccccctgggccagctgaacaaggacatgacctacgcccagctgtacagcttcctgaactgcctgcaggtgagcccctgccacggctggatgagcagcaacaagaccctgcggaccctgaccagcgagagagctgagcagctgagcaacaccctgaagaagattgctgccagcgagaagttcaccaacttcaacctcttctacatggactttgccttccacgagatcatccaggagtggcagaagaggggcggccagccctggcagctgattgagcctgtggatggcttccaccccaatgaggtggccctgctgctgctggccgaccacttctggaagaaggtgcagctgcagtggccccagatcctgggcaaggagaaccccttcaacccccagatcaagcaggtgtttggagaccagggcggccactag

SEQ ID NO: 142567 - DNA, 1632 bp, synthetic construct
  misc_feature 1..1632: note = Description of Artificial Sequence: Synthetic coding sequence
  source 1..1632: mol_type = other DNA
atgcagagcccctggaagatcctgactgtggcccccctcttcctgctgctgagcctgcagagcagcgccagccctgccaatgatgaccagagccggcccagcctgagcaatggccacacctgtgtggagaagctgttcctgaagaccacctgctacctggtgattgacaagtttggaagtgacatcatcaagctgctgtctgctgacatgaatgctgatgtggtgtgccacaccctggagttctgcaagcagaacacaggccagcccctgtgccacctgtaccccctgcccaaggagacctggaagttcaccctgcagaaggcccggcagatcgtgaagaagagccccatcctgaagtacagccgcagcggcagtgacatctgcagcctgcctgtgctggccaagatctgccagaagatcaagctggccatggagcagagcgtgcccttcaaggatgtggacagcgacaagtacagcgtcttccccaccctgcggggctaccactggaggggccgggactgcaatgacagtgatgagagcgtgtacccaggaagaagacccaacaactgggatgtgcaccaggacagcaactgcaatggcatctggggcgtggaccccaaggatggagtgccctatgagaagaagttctgtgagggcagccagccccggggcatcatcctgctgggggacagcgctggggcccacttccacatcagccctgagtggatcacagccagccagatgagcctgaacagcttcatcaacctgcccacagccctgaccaatgagctggactggccccagctgagcggggccaccggcttcctggacagcacagtgggcatcaaggagaagagcatctacctgcggctgtggaagaggaaccactgcaaccaccgggactaccagaacatcagcagaaatggagccagcagcaggaacctgaagaagttcatcgagagcctgagcaggaacaaggtgctggactacccagccatcgtcatctatgccatgattggaaatgatgtgtgcagcggcaagagtgaccctgtgcctgccatgaccaccccagagaagctgtacagcaatgtgatgcagaccctgaagcacctgaacagccacctgcccaacggcagccacgtgatcctgtatggcctgcctgatggcaccttcctgtgggacaacctgcacaaccgctaccaccccctgggccagctgaacaaggacatgacctacgcccagctgtacagcttcctgaactgcctgcaggtgagcccctgccacggctggatgagcagcaacaagaccctgcggaccctgaccagcgagagagctgagcagctgagcaacaccctgaagaagattgctgccagcgagaagttcaccaacttcaacctcttctacatggactttgccttccacgagatcatccaggagtggcagaagaggggcggccagccctggcagctgattgagcctgtggatggcttccaccccaatgaggtggccctgctgctgctggccgaccacttctggaagaaggtgcagctgcagtggccccagatcctgggcaaggagaaccccttcaacccccagatcaagcaggtgtttggagaccagggcggccactag

SEQ ID NO: 142568 - DNA, 894 bp, synthetic construct
  misc_feature 1..894: note = Description of Artificial Sequence: Synthetic coding sequence
  source 1..894: mol_type = other DNA
atgaagctgaagaacagcttcatcaacctgcccacagccctgaccaatgagctggactggccccagctgagcggggccaccggcttcctggacagcacagtgggcatcaaggagaagagcatctacctgcggctgtggaagaggaaccactgcaaccaccgggactaccagaacatcagcagaaatggagccagcagcaggaacctgaagaagttcatcgagagcctgagcaggaacaaggtgctggactacccagccatcgtcatctatgccatgattggaaatgatgtgtgcagcggcaagagtgaccctgtgcctgccatgaccaccccagagaagctgtacagcaatgtgatgcagaccctgaagcacctgaacagccacctgcccaacggcagccacgtgatcctgtatggcctgcctgatggcaccttcctgtgggacaacctgcacaaccgctaccaccccctgggccagctgaacaaggacatgacctacgcccagctgtacagcttcctgaactgcctgcaggtgagcccctgccacggctggatgagcagcaacaagaccctgcggaccctgaccagcgagagagctgagcagctgagcaacaccctgaagaagattgctgccagcgagaagttcaccaacttcaacctcttctacatggactttgccttccacgagatcatccaggagtggcagaagaggggcggccagccctggcagctgattgagcctgtggatggcttccaccccaatgaggtggccctgctgctgctggccgaccacttctggaagaaggtgcagctgcagtggccccagatcctgggcaaggagaaccccttcaacccccagatcaagcaggtgtttggagaccagggcggccactag

SEQ ID NO: 142569 - DNA, 2061 bp, synthetic construct
  misc_feature 1..2061: note = Description of Artificial Sequence: Synthetic coding sequence
  source 1..2061: mol_type = other DNA
atgcagagcccctggaagatcctgactgtggcccccctcttcctgctgctgagcctgcagagcagcgccagccctgccaatgatgaccagagccggcccagcctgagcaatggccacacctgtgtgggctgtgtgctggtggtgtctgtgattgagcagctggcccaggtgcacaacagcacagtgcaggcctccatggagcggctgtgcagctacctgcctgagaagctgttcctgaagaccacctgctacctggtgattgacaagtttggaagtgacatcatcaagctgctgtctgctgacatgaatgctgatgtggtgtgccacaccctggagttctgcaagcagaacacaggccagcccctgtgccacctgtaccccctgcccaaggagacctggaagttcaccctgcagaaggcccggcagatcgtgaagaagagccccatcctgaagtacagccgcagcggcagtgacatctgcagcctgcctgtgctggccaagatctgccagaagatcaagctggccatggagcagagcgtgcccttcaaggatgtggacagcgacaagtacagcgtcttccccaccctgcggggctaccactggaggggccgggactgcaatgacagtgatgagagcgtgtacccaggaagaagacccaacaactgggatgtgcaccaggacagcaactgcaatggcatctggggcgtggaccccaaggatggagtgccctatgagaagaagttctgtgagggcagccagccccggggcatcatcctgctgggggacagcgctggggcccacttccacatcagccctgagtggatcacagccagccagatgagcctgaacagcttcatcaacctgcccacagccctgaccaatgagctggactggccccagctgagcggggccaccggcttcctggacagcacagtgggcatcaaggagaagagcatctacctgcggctgtggaagaggaaccactgcaaccaccgggactaccagaacatcagcagaaatggagccagcagcaggaacctgaagaagttcatcgagagcctgagcaggaacaaggtgctggactacccagccatcgtcatctatgccatgattggaaatgatgtgtgcagcggcaagagtgaccctgtgcctgccatgaccaccccagagaagctgtacagcaatgtgatgcagaccctgaagcacctgaacagccacctgcccaacggcagccacgtgatcctgtatggcctgcctgatggcaccttcctgtgggacaacctgcacaaccgctaccaccccctgggccagctgaacaaggacatgacctacgcccagctgtacagcttcctgaactgcctgcaggtgagcccctgccacggctggatgagcagcaacaagaccctgcggaccctgaccagcgagagagctgagcagctgagcaacaccctgaagaagattgctgccagcgagaagttcaccaacttcaacctcttctacatggactttgccttccacgagatcatccaggagtggcagaagaggggcggccagccctggcagctgattgagcctgtggatggcttccaccccaatgaaaggaagagcatcctgctgaagggcatcctgatgaccagccagaccctggacaaccaggagtggacccagctgacctcctggatcaagggcaacctgacctgtgacagcaggacccgggagtggctgtgctgctgctggaggatcatcagcggcaagcgctgcagcagcagcggccccaagtcctgggagcggcgcatccgcagcaccccccggctgaaccgctgcctggagaccaaggccggcacagagcccctgcgctccatgcacccctggggcgcccagggcggccggggcctgggcaagctgatcccccagctgtggggcctgcccaggcaccggcccaagggcctcttcttcagcagcatcttcaagtgcctgagcctgaatgaggagcacatctggaccaccgtgcagtgctgcgtgctgcccggctctgtgaccctgcccctcttcctgaagtag

SEQ ID NO: 142570 - DNA, 1992 bp, synthetic construct
  misc_feature 1..1992: note = Description of Artificial Sequence: Synthetic coding sequence
  source 1..1992: mol_type = other DNA
atgcagagcccctggaagatcctgactgtggcccccctcttcctgctgctgagcctgcagagcagcgccagccctgccaatgatgaccagagccggcccagcctgagcaatggccacacctgtgtgggctgtgtgctggtggtgtctgtgattgagcagctggcccaggtgcacaacagcacagtgcaggcctccatggagcggctgtgcagctacctgcctgagaagctgttcctgaagaccacctgctacctggtgattgacaagtttggaagtgacatcatcaagctgctgtctgctgacatgaatgctgatgtggtgtgccacaccctggagttctgcaagcagaacacaggccagcccctgtgccacctgtaccccctgcccaaggagacctggaagttcaccctgcagaaggcccggcagatcgtgaagaagagccccatcctgaagtacagccgcagcggcagtgacatctgcagcctgcctgtgctggccaagatctgccagaagatcaagctggccatggagcagagcgtgcccttcaaggatgtggacagcgacaagtacagcgtcttccccaccctgcggggctaccactggaggggccgggactgcaatgacagtgatgagagcgtgtacccaggaagaagacccaacaactgggatgtgcaccaggacagcaactgcaatggcatctggggcgtggaccccaaggatggagtgccctatgagaagaagttctgtgagggcagccagccccggggcatcatcctgctgggggacagcgctggggcccacttccacatcagccctgagtggatcacagccagccagatgagcctgaacagcttcatcaacctgcccacagccctgaccaatgagctggactggccccagctgagcggggccaccggcttcctggacagcacagtgggcatcaaggagaagagcatctacctgcggctgtggaagaggaaccactgcaaccaccgggactaccagaacatcagcagaaatggagccagcagcaggaacctgaagaagttcatcgagagcctgagcaggaacaaggtgctggactacccagccatcgtcatctatgccatgattggaaatgatgtgtgcagcggcaagagtgaccctgtgcctgccatgaccaccccagagaagctgtacagcaatgtgatgcagaccctgaagcacctgaacagccacctgcccaacggcagccacgtgatcctgtatggcctgcctgatggcaccttcctgtgggacaacctgcacaaccgctaccaccccctgggccagctgaacaaggacatgacctacgcccagctgtacagcttcctgaactgcctgcaggtgagcccctgccacggctggatgagcagcaacaagaccctgcggaccctgaccagcgagagagctgagcagctgagcaacaccctgaagaagattgctgccagcgagaagttcaccaacttcaacctcttctacatggactttgccttccacgagatcatccaggagtggcagaagaggggcggccagccctggcagctgattgagcctgtggatggcttccaccccaatgaaaggaagagcatcctgctgaagggcatcctgatgaccagccagaccctggacaaccaggagtggacccagctgacctcctggatcaagggcaacctgacctgtgacagcaggacccgggagtggctgtgctgctgctggaggatcatcagcggcaagcgctgcagcagcagcggccccaagtcctgggagcggcgcatccgcagcaccccccggctgaaccgctgcctggagaccaaggccggcacagagcccctgcgctccatgcacccctggggcgcccagggcggccggggcctgggcaagctgatcccccagccctacggcggctgccacgtgacaggccccaaggacagcagcagcgctgccagcctgcagatgtccttcagccagtag

SEQ ID NO: 142571 - DNA, 300 bp, synthetic construct
  misc_feature 1..300: note = Description of Artificial Sequence: Synthetic coding sequence
  source 1..300: mol_type = other DNA
atggccgagggcaacaccctcatctctgtggactatgagatctttgggaaggtgcagggcgtcttcttcaggaagcacacccaggccgagggcaagaagctgggcctggtgggctgggtgcagaacacagaccggggcaccgtgcagggccagctgcagggccccatcagcaaggtgcgccacatgcaggagtggctggagacccggggcagccccaagagccacatcgacaaggccaacttcaacaatgagaaggtgatcctgaagctggactacagcgacttccagatcgtgaagtag

SEQ ID NO: 142572 - DNA, 168 bp, synthetic construct
  misc_feature 1..168: note = Description of Artificial Sequence: Synthetic coding sequence
  source 1..168: mol_type = other DNA
atggccgagggcaacaccctcatctctgtggactatgagatctttgggaaggtgcagggcgtcttcttcaggaagcacacccaggagatgacagtggagaacagaattgctgagacccacagcaagagctgtgtgcctgtgtcctttgccaccagctatgccggctag

SEQ ID NO: 142573 - DNA, 300 bp, synthetic construct; identical to SEQ ID NO: 142571
  misc_feature 1..300: note = Description of Artificial Sequence: Synthetic coding sequence
  source 1..300: mol_type = other DNA

SEQ ID NO: 142574 - DNA, 300 bp, synthetic construct
  misc_feature 1..300: note = Description of Artificial Sequence: Synthetic coding sequence
  source 1..300: mol_type = other DNA
atgagcacagcccagagcctgaagtctgtggactatgaggtgtttggccgggtgcagggcgtgtgcttcaggatgtacacagaagatgaggccaggaagattggagtggtgggctgggtgaagaacaccagcaaaggaacagtgacaggccaggtgcagggccctgaggacaaggtgaacagcatgaagtcctggctgagcaaggtgggcagccccagcagcagaattgacaggaccaacttcagcaatgagaagaccatcagcaagctggagtacagcaacttcagcatccgctactag

SEQ ID NO: 142575 - DNA, 294 bp, synthetic construct
  misc_feature 1..294: note = Description of Artificial Sequence: Synthetic coding sequence
  source 1..294: mol_type = other DNA
atgtgccccctgcccctggccgctgctgctgtggccgccccccgggcccccctgcggctgctgaacagaggcctggccgccgccatgagcacagcccagagcctgaagtctgtggactatgaggtgtttggccgggtgcagggcgtgtgcttcaggatgtacacagaagatgaggccaggaagattggagtggtgggctgggtgaagaacaccagcaaaggaacagtgacaggccaggtgcagggccctgaggacaaggtgaacagcatgctggagtgcagcggcctcatctag

SEQ ID NO: 142576 - DNA, 2247 bp, synthetic construct
  misc_feature 1..2247: note = Description of Artificial Sequence: Synthetic coding sequence
  source 1..2247: mol_type = other DNA
atggtgctgctgcgggtgctgatcctgctgctgtcctgggccgccggcatgggcggccagtatggcaaccccctgaacaagtacatccgccactatgagggcctgagctacaacgtggacagcctgcaccagaagcaccagagggccaagagagctgtgtcccatgaggaccagttcctgcggctggacttccacgcccacggccgccacttcaacctgaggatgaagagggacaccagcctcttcagtgatgagttcaaggtggagaccagcaacaaggtgctggactatgacaccagccacatctacacaggccacatctacggggaggagggcagcttcagccacggctctgtgattgatggccgctttgagggcttcatccagacccggggcggcaccttctacgtggagcctgctgagcgctacatcaaggacaggaccctgcccttccacagcgtcatctaccatgaagatgacatcaactacccccacaagtatggcccccagggcggctgtgccgaccacagcgtgtttgagaggatgaggaagtaccagatgactggagtggaggaggtgacccagatcccccaggaggagcacgccgccaacggccctgagctgctgaggaagaagaggaccaccagcgctgagaagaacacctgccagctgtacatccagacagaccacctgttcttcaagtactacggcacccgggaggccgtgattgcccagatcagcagccacgtgaaggccatcgacaccatctaccagaccacagacttcagcggcatccggaacatctccttcatggtgaagaggatccgcatcaacaccacagcagatgagaaggaccccaccaaccccttccgcttccccaacattggagtggagaagttcctggagctgaacagcgagcagaaccatgatgactactgcctggcctacgtgttcacagaccgggactttgatgatggagtgctgggcctggcctgggtgggcgcccccagcggcagcagcggcggcatctgtgagaagagcaagctgtacagtgatggcaagaagaagagcctgaacacaggcatcatcaccgtgcagaactacggcagccacgtgccccccaaggtgagccacatcacctttgcccacgaggtgggccacaactttggcagcccccatgattctggaacagagtgcaccccaggagagagcaagaacctgggccagaaggaaaatggaaactacatcatgtatgcccgggccaccagcggggacaagctgaacaacaacaagttcagcctgtgcagcatccggaacatcagccaggtgctggagaagaagaggaacaactgctttgtggagagcggccagcccatctgtggaaatggcatggtggagcagggcgaggagtgtgactgtggctacagcgaccagtgcaaggatgagtgctgctttgatgccaaccagcctgagggcaggaagtgcaagctgaagccaggcaagcagtgcagccccagccagggcccctgctgcacagcccagtgtgccttcaagagcaagtctgagaagtgcagagatgacagcgactgtgcccgggagggcatctgcaatggcttcaccgccctgtgcccagccagtgaccccaagcccaacttcacagactgcaacagacacacccaggtgtgcatcaatggccagtgtgccggcagcatctgtgagaagtatggcctggaggagtgcacctgtgccagcagtgatggcaaggatgacaaggagctgtgccacgtgtgctgcatgaagaagatggaccccagcacctgtgccagcacaggctctgtgcagtggagccgccacttcagcggccgcaccatcaccctgcagcccggcagcccctgcaatgacttccggggctactgtgatgtgttcatgcgctgccgcctggtggatgctgatggccccctggcccggctgaagaaggccatcttcagccctgagctgtatgagaacattgctgagtggatcgtggcccactggtgggccgtgctgctgatgggcatcgccctgatcatgctgatggccggcttcatcaagatctgcagcgtgcacacccccagcagcaaccccaagctgcccccacccaagcccctgcccggcaccctgaagagaagaagaccaccccagcccatccagcagccccagaggcagaggccccgggagagctaccagatgggccacatgagaagatag

SEQ ID NO: 142577 - DNA, 1344 bp, synthetic construct
  misc_feature 1..1344: note = Description of Artificial Sequence: Synthetic coding sequence
  source 1..1344: mol_type = other DNA
atggtgctgctgcgggtgctgatcctgctgctgtcctgggccgccggcatgggagaccgggactttgatgatggagtgctgggcctggcctgggtgggcgcccccagcggcagcagcggcggcatctgtgagaagagcaagctgtacagtgatggcaagaagaagagcctgaacacaggcatcatcaccgtgcagaactacggcagccacgtgccccccaaggtgagccacatcacctttgcccacgaggtgggccacaactttggcagcccccatgacagcggcacagaatgtaccccaggagagagcaagaacctgggccagaaggaaaatggaaactacatcatgtatgcccgggccaccagcggggacaagctgaacaacaacaagttcagcctgtgcagcatccggaacatcagccaggtgctggagaagaagaggaacaactgctttgtggagagcggccagcccatctgtggaaatggcatggtggagcagggcgaggagtgtgactgtggctacagcgaccagtgcaaggatgagtgctgctttgatgccaaccagcctgagggcaggaagtgcaagctgaagccaggcaagcagtgcagccccagccagggcccctgctgcacagcccagtgtgccttcaagagcaagtctgagaagtgcagagatgacagcgactgtgcccgggagggcatctgcaatggcttcaccgccctgtgcccagccagtgaccccaagcccaacttcacagactgcaacagacacacccaggtgtgcatcaatggccagtgtgccggcagcatctgtgagaagtatggcctggaggagtgcacctgtgccagcagtgatggcaaggatgacaaggagctgtgccacgtgtgctgcatgaagaagatggaccccagcacctgtgccagcactggatctgtgcagtggagccgccacttcagcggccgcaccatcaccctgcagcccggcagcccctgcaatgacttccggggctactgtgatgtgttcatgcgctgccgcctggtggatgctgatggccccctggcccggctgaagaaggccatcttcagccctgagctgtatgaaaatattgctgagtggatcgtggcccactggtgggccgtgctgctgatgggcatcgccctgatcatgctgatggccggcttcatcaagatctgcagcgtgcacacccccagcagcaaccccaagctgcccccacccaagcccctgcccggcaccctgaagagaagaagaccaccccagcccatccagcagccccagaggcagaggccccgggagagctaccagatgggccacatgagaagatag

SEQ ID NO: 142578 - DNA, 2310 bp, synthetic construct
  misc_feature 1..2310: note = Description of Artificial Sequence: Synthetic coding sequence
  source 1..2310: mol_type = other DNA
atgaggctgctgcggcgctgggcctttgctgccctgctgctgagcctgctgcccaccccaggcctgggcacccagggccctgctggggccctgcgctggggcggcctgccccagctgggcggccctggggcccctgaggtgacagagcccagccggctggtgcgggagagcagcggcggggaggtgaggaagcagcagctggacaccagggtgcggcaggagcccccaggcggcccccctgtgcacctggcccaggtgtcctttgtgatcccagccttcaacagcaacttcaccctggacctggagctgaaccaccacctgctgagcagccagtatgtggagcggcacttcagccgggagggcaccacccagcacagcactggagctggggaccactgctactaccagggcaagctgcggggcaacccccacagctttgctgccctgagcacctgccagggcctgcacggcgtcttcagtgatggcaacctgacctacatcgtggagccccaggaggtggccggcccctggggcgccccccagggccccctgccccacctgatctaccgcacccccctgctgcctgaccccctgggctgccgggagcccggctgcctgtttgctgtgcctgcccagagcgccccacccaaccggccccggctgcggaggaagaggcaggtgcggcggggccaccccaccgtgcacagcgagaccaagtatgtggagctgattgtcatcaatgaccaccagctgtttgagcagatgaggcagagcgtggtgctgaccagcaactttgccaagtctgtggtgaacctggctgatgtgatctacaaggagcagctgaacaccagaattgtgctggtggccatggagacctgggcagatggagacaagatccaggtgcaggatgacctgctggagaccctggcccggctgatggtgtaccgccgggagggcctgcctgagcccagtgatgccacccacctgttcagcggccgcaccttccagagcaccagcagcggggccgcctacgtgggcggcatctgcagcctgagccatggaggcggcgtgaatgaatatggcaacatgggcgccatggctgtgaccctggcccagaccctgggccagaacctgggcatgatgtggaacaagcacaggagcagcgctggggactgcaagtgcccagacatctggctgggctgcatcatggaggacaccggcttctacctgcccaggaagttcagccgctgcagcattgatgagtacaaccagttcctgcaggagggcggcggcagctgcctcttcaacaagcccctgaagctgctggaccccccagaatgtggaaatggatttgtggaggccggggaggagtgtgactgtggctctgtgcaggagtgcagcagagctgggggcaactgctgcaagaagtgcaccctgacccatgatgccatgtgcagtgatggcctgtgctgccgccgctgcaagtatgagccccggggcgtgtcctgccgggaggccgtgaatgaatgtgacattgctgagacctgcacaggagacagcagccagtgcccccccaacctgcacaagctggatggctactactgtgaccacgagcagggccgctgctatggaggccgctgcaagacccgggaccggcagtgccaggtgctgtggggccatgctgctgctgaccgcttctgctatgagaagctgaatgtggagggcacagagcggggcagctgtggcaggaagggcagcggctgggtgcagtgcagcaagcaggatgtgctgtgtggcttcctgctgtgtgtgaacatcagcggggccccccggctgggggacctggtgggggacatcagctctgtgaccttctaccaccagggcaaggagctggactgccggggcggccacgtgcagctggctgatggcagtgacctgtcctatgtggaggatggaacagcctgtggccccaacatgctgtgcctggaccaccgctgcctgcctgccagcgccttcaacttcagcacctgccccggcagcggggagcggcgcatctgcagccaccacggcgtgtgcagcaatgaaggcaagtgcatctgccagcctgactggacaggcaaggactgcagcatccacaaccccctgcccaccagccccccaactggagaaacagagcgctacaagggccccagcggcaccaacatcatcatcggcagcattgctggagctgtgctggtggccgccatcgtgctgggcggcaccggctggggcttcaagaacatccggcggggccgcagcggcggggcctag

SEQ ID NO: 142579 - DNA, 1572 bp, synthetic construct
  misc_feature 1..1572: note = Description of Artificial Sequence: Synthetic coding sequence
  source 1..1572: mol_type = other DNA
tgctggggcagcggccacctgctgagcagccagtatgtggagcggcacttcagccgggagggcaccacccagcacagcactggagctggggaccactgctactaccagggcaagctgcggggcaacccccacagctttgctgccctgagcacctgccagggcctgcacggcgtcttcagtgatggcaacctgacctacatcgtggagccccaggaggtggccggcccctggggcgccccccagggccccctgccccacctgatctaccgcacccccctgctgcctgaccccctgggctgccgggagcccggctgcctgtttgctgtgcctgcccagagcgccccacccaaccggccccggctgcggaggaagaggcaggtgcggcggggccaccccaccgtgcacagcgagaccaagtatgtggagctgattgtcatcaatgaccaccagctgtttgagcagatgaggcagagcgtggtgctgaccagcaactttgccaagtctgtggtgaacctggctgatgtgatctacaaggagcagctgaacaccagaattgtgctggtggccatggagacctgggcagatggagacaagatccaggtgcaggatgacctgctggagaccctggcccggctgatggtgtaccgccgggagggcctgcctgagcccagtgatgccacccacctgttcagcggccgcaccttccagagcaccagcagcggggccgcctacgtgggcggcatctgcagcctgagccatggaggcggcgtgaatgaatatggcaacatgggcgccatggctgtgaccctggcccagaccctgggccagaacctgggcatgatgtggaacaagcacaggagcagcgctggggactgcaagtgcccagacatctggctgggctgcatcatggaggacaccggcttctacctgcccaggaagttcagccgctgcagcattgatgagtacaaccagttcctgcaggagggcggcggcagctgcctcttcaacaagcccctgaagctgctggaccccccagaatgtggaaatggatttgtggaggccggggaggagtgtgactgtggctctgtgcaggagtgcagcagagctgggggcaactgctgcaagaagtgcaccctgacccatgatgccatgtgcagtgatggcctgtgctgccgccgctgcaagtatgagccccggggcgtgtcctgccgggaggccgtgaatgaatgtgacattgctgagacctgcacaggagacagcagccagtgcccccccaacctgcacaagctggatggctactactgtgaccacgagcagggccgctgctatggaggccgctgcaagacccgggaccggcagtgccaggtgctgtggggccatgctgctgctgaccgcttctgctatgagaagctgaatgtggagggcacagagcggggcagctgtggcaggaagggcagcggctgggtgcagtgcagcaagcagccccagcagggccgggctgtgtggctgccccccctgtgccagcacctgtggagcagcagcgcccggggccctgggggccgccaccagtag

SEQ ID NO: 142580 - DNA, 1710 bp, synthetic construct
  misc_feature 1..1710: note = Description of Artificial Sequence: Synthetic coding sequence
  source 1..1710: mol_type = other DNA
atgcagggcacccggctgcctgtgtgctgtgcctgccctgtgggcagcagcaagccagctgaggccgagaaggagaaggtgcggcggggccaccccaccgtgcacagcgagaccaagtatgtggagctgattgtcatcaatgaccaccagctgtttgagcagatgaggcagagcgtggtgctgaccagcaactttgccaagtctgtggtgaacctggctgatgtgatctacaaggagcagctgaacaccagaattgtgctggtggccatggagacctgggcagatggagacaagatccaggtgcaggatgacctgctggagaccctggcccggctgatggtgtaccgccgggagggcctgcctgagcccagtgatgccacccacctgttcagcggccgcaccttccagagcaccagcagcggggccgcctacgtgggcggcatctgcagcctgagccatggaggcggcgtgaatgaatatggcaacatgggcgccatggctgtgaccctggcccagaccctgggccagaacctgggcatgatgtggaacaagcacaggagcagcgctggggactgcaagtgcccagacatctggctgggctgcatcatggaggacaccggcttctacctgcccaggaagttcagccgctgcagcattgatgagtacaaccagttcctgcaggagggcggcggcagctgcctcttcaacaagcccctgaagctgctggaccccccagaatgtggaaatggatttgtggaggccggggaggagtgtgactgtggctctgtgcaggagtgcagcagagctgggggcaactgctgcaagaagtgcaccctgacccatgatgccatgtgcagtgatggcctgtgctgccgccgctgcaagtatgagccccggggcgtgtcctgccgggaggccgtgaatgaatgtgacattgctgagacctgcacaggagacagcagccagtgcccccccaacctgcacaagctggatggctactactgtgaccacgagcagggccgctgctatggaggccgctgcaagacccgggaccggcagtgccaggtgctgtggggccatgctgctgctgaccgcttctgctatgagaagctgaatgtggagggcacagagcggggcagctgtggcaggaagggcagcggctgggtgcagtgcagcaagcaggatgtgctgtgtggcttcctgctgtgtgtgaacatcagcggggccccccggctgggggacctggtgggggacatcagctctgtgaccttctaccaccagggcaaggagctggactgccggggcggccacgtgcagctggctgatggcagtgacctgtcctatgtggaggatggaacagcctgtggccccaacatgctgtgcctggaccaccgctgcctgcctgccagcgccttcaacttcagcacctgccccggcagcggggagcggcgcatctgcagccaccacggcgtgtgcagcaatgaaggcaagtgcatctgccagcctgactggacaggcaaggactgcagcatccacaaccccctgcccaccagccccccaactggagaaacagagcgctacaagggccccagcggcaccaacatcatcatcggcagcattgctggagctgtgctggtggccgccatcgtgctgggcggcaccggctggggcttcaagaacatccggcggggccgcagcggcggggcctag

SEQ ID NO: 142581 - DNA, 2217 bp, synthetic construct
  misc_feature 1..2217: note = Description of Artificial Sequence: Synthetic coding sequence
  source 1..2217: mol_type = other DNA
atggccgcccggcccctgcctgtgtccccagcccgggccctgctgctggccctggccggggccctgctggccccctgtgaggcccggggcgtgtccctgtggaaccagggccgggcagatgaggtggtgtctgcctctgtgggcagcggggacctgtggatccctgtgaagagctttgacagcaagaaccaccctgaggtgctgaacatccggctgcagcgggagagcaaggagctgatcatcaacctggagagaaatgaaggcctcatcgccagcagcttcacagagacccactacctgcaggacggcacagatgtgtccctggccaggaactacaccgtcatcctgggccactgctactaccacggccacgtgcggggctacagcgacagcgctgtgtccctgagcacctgcagcggcctgcggggcctgattgtgtttgaaaatgaaagctatgtgctggagcccatgaagagcgccaccaaccgctacaagctgtttcctgccaagaagctgaagtctgtgcggggcagctgtggcagccaccacaacacccccaacctggccgccaagaatgtgtttcctccacccagccagacctgggcccggcggcacaagcgggagaccctgaaggccaccaagtatgtggagctggtgattgtggccgacaaccgggagttccagaggcagggcaaggacctggagaaggtgaagcagaggctcatcgagatcgccaaccacgtggacaagttctaccggcccctgaacatcagaattgtgctggtgggcgtggaggtgtggaatgacatggacaagtgcagcgtgtcccaggaccccttcaccagcctgcacgagttcctggactggaggaagatgaagctgctgcccaggaagagccatgacaatgcccagctggtgtctggagtgtacttccagggcaccaccatcggcatggcccccatcatgtccatgtgcacagctgaccagagcggcggcatcgtgatggaccacagcgacaaccccctgggcgctgctgtgaccctggcccacgagctgggccacaactttggcatgaaccacgacaccctggaccggggctgcagctgccagatggctgtggagaagggcggctgcatcatgaatgccagcacaggctaccccttccccatggtgttcagcagctgcagcaggaaggacctggagaccagcctggagaagggcatgggcgtgtgcctcttcaacctgcctgaggtgcgggagagctttggaggccagaagtgtggcaacagatttgtggaggagggggaggagtgtgactgtggggagcctgaggagtgcatgaaccgctgctgcaatgccaccacctgcaccctgaagccagatgctgtgtgtgcccacggcctgtgctgtgaggactgccagctgaagccagctggaacagcctgccgggacagcagcaacagctgtgacctgcctgagttctgcaccggggccagcccccactgcccagccaacgtgtacctgcatgatggccacagctgccaggatgtggatggctactgctacaacggcatctgccagacccatgagcagcagtgtgtgaccctgtggggccctggggccaagccagcccctggcatctgctttgagcgggtgaacagcgctggggacccctacggcaactgtgggaaggtgtccaagagcagctttgccaagtgtgagatgagagatgccaagtgtgggaagatccagtgccagggcggggccagcaggcctgtgattggcaccaatgctgtgtccattgagaccaacatccccctgcagcagggcggccgcatcctgtgccggggcacccacgtgtacctgggagatgacatgccagaccccggcctggtgctggccggcaccaagtgtgctgatggcaagatctgcctgaaccggcagtgccagaacatctctgtgtttggagtgcatgaatgtgccatgcagtgccacggccggggcgtgtgcaacaacaggaagaactgccactgtgaggcccactgggccccacccttctgtgacaagtttggatttggaggcagcacagacagcggccccatccggcaggccgaggcccggcaggaggccgctgagagcaaccgggagcggggccagggccaggagcctgtgggcagccaggagcacgccagcacagccagcctgaccctcatctag

SEQ ID NO: 142582 - DNA, 2730 bp, synthetic construct
  misc_feature 1..2730: note = Description of Artificial Sequence: Synthetic coding sequence
  source 1..2730: mol_type = other DNA
atggccgcccggcccctgcctgtgtccccagcccgggccctgctgctggccctggccggggccctgctggccccctgtgaggcccggggcgtgtccctgtggaaccagggccgggcagatgaggtggtgtctgcctctgtgggcagcggggacctgtggatccctgtgaagagctttgacagcaagaaccaccctgaggtgctgaacatccggctgcagcgggagagcaaggagctgatcatcaacctggagagaaatgaaggcctcatcgccagcagcttcacagagacccactacctgcaggacggcacagatgtgtccctggccaggaactacaccgtcatcctgggccactgctactaccacggccacgtgcggggctacagcgacagcgctgtgtccctgagcacctgcagcggcctgcggggcctgattgtgtttgaaaatgaaagctatgtgctggagcccatgaagagcgccaccaaccgctacaagctgtttcctgccaagaagctgaagtctgtgcggggcagctgtggcagccaccacaacacccccaacctggccgccaagaatgtgtttcctccacccagccagacctgggcccggcggcacaagcgggagaccctgaaggccaccaagtatgtggagctggtgattgtggccgacaaccgggagttccagaggcagggcaaggacctggagaaggtgaagcagaggctcatcgagatcgccaaccacgtggacaagttctaccggcccctgaacatcagaattgtgctggtgggcgtggaggtgtggaatgacatggacaagtgcagcgtgtcccaggaccccttcaccagcctgcacgagttcctggactggaggaagatgaagctgctgcccaggaagagccatgacaatgcccagctggtgtctggagtgtacttccagggcaccaccatcggcatggcccccatcatgtccatgtgcacagctgaccagagcggcggcatcgtgatggaccacagcgacaaccccctgggcgctgctgtgaccctggcccacgagctgggccacaactttggcatgaaccacgacaccctggaccggggctgcagctgccagatggctgtggagaagggcggctgcatcatgaatgccagcacaggctaccccttccccatggtgttcagcagctgcagcaggaaggacctggagaccagcctggagaagggcatgggcgtgtgcctcttcaacctgcctgaggtgcgggagagctttggaggccagaagtgtggcaacagatttgtggaggagggggaggagtgtgactgtggggagcctgaggagtgcatgaaccgctgctgcaatgccaccacctgcaccctgaagccagatgctgtgtgtgcccacggcctgtgctgtgaggactgccagctgaagccagctggaacagcctgccgggacagcagcaacagctgtgacctgcctgagttctgcaccggggccagcccccactgcccagccaacgtgtacctgcatgatggccacagctgccaggatgtggatggctactgctacaacggcatctgccagacccatgagcagcagtgtgtgaccctgtggggccctggggccaagccagcccctggcatctgctttgagcgggtgaacagcgctggggacccctacggcaactgtgggaaggtgtccaagagcagctttgccaagtgtgagatgagagatgccaagtgtgggaagatccagtgccagggcggggccagcaggcctgtgattggcaccaatgctgtgtccattgagaccaacatccccctgcagcagggcggccgcatcctgtgccggggcacccacgtgtacctgggagatgacatgccagaccccggcctggtgctggccggcaccaagtgtgctgatggcaagatctgcctgaaccggcagtgccagaacatctctgtgtttggagtgcatgaatgtgccatgcagtgccacggccggggcgtgtgcaacaacaggaagaactgccactgtgaggcccactgggccccacccttctgtgacaagtttggatttggaggcagcacagacagcggccccatccggcaggccgacaaccagggcctgaccatcggcatcctggtgaccatcctgtgcctgctggccgccggctttgtggtgtacctgaagaggaagaccctcatccggctgctcttcaccaacaagaagaccaccatcgagaagctgcgctgtgtgcggcccagcaggcctccccggggcttccagccctgccaggcccacctgggccacctgggcaagggcctgatgaggaagcccccagacagctacccacccaaggacaacccccggcggctgctgcagtgccagaatgtggacatcagccggcccctgaatggcctgaatgtgccccagccccagagcacccagagggtgctgccccccctgcaccgggccccccgggcccccagcgtgcctgcccggcccctgcctgccaagccagccctgcggcaggcccagggcacctgcaagcccaaccccccccagaagcccctgcctgctgaccccctggcccggaccacccggctgacccacgccctggcccggaccccaggccagtgggagaccggcctgcggctggcccccctgcggcctgccccccagtacccccaccaggtgcccaggagcacccacacagcctacatcaagtag

SEQ ID NO: 142583 - DNA, 837 bp, synthetic construct
  misc_feature 1..837: note = Description of Artificial Sequence: Synthetic coding sequence
  source 1..837: mol_type = other DNA
atggccgcccggcccctgcctgtgtccccagcccgggccctgctgctggccctggccggggccctgctggccccctgtgaggcccggggcgtgtccctgtggaaccagggccgggcagatgaggtggtgtctgcctctgtgggcagcggggacctgtggatccctgtgaagagctttgacagcaagaaccaccctgaggtgctgaacatccggctgcagcgggagagcaaggagctgatcatcaacctggagagaaatgaaggcctcatcgccagcagcttcacagagacccactacctgcaggacggcacagatgtgtccctggccaggaactacacaggccactgctactaccacggccacgtgcggggctacagcgacagcgctgtgtccctgagcacctgcagcggcctgcggggcctcatcgtgtttgaaaatgaaagctatgtgctggagcccatgaagagcgccaccaaccgctacaagctgtttcctgccaagaagctgaagtctgtgcggggcagctgtggcagccaccacaacacccccaacctggccgccaagaatgtgttccccccacccagccagacctgggcccggcggcacaagcgggagaccctgaaggccaccaagtatgtggagctggtgattgtggccgacaaccgggagttccagaggcagggcaaggacctggagaaggtgaagcagaggctgattgaaattgccaaccacgtggacaagttctaccggcccctgaacatccgcatcgtgctggtgggcgtggaggtgtggaatgacatggacaagtgcagcgtgtcccaggaccccttcacctag

SEQ ID NO: 142584 - DNA, 2445 bp, synthetic construct
  misc_feature 1..2445: note = Description of Artificial Sequence: Synthetic coding sequence
  source 1..2445: mol_type = other DNA
atgaggctggccctgctgtgggccctgggcctgctgggcgccggcagccccctgcccagctggcccctgcccaacatcggcggcacagaggagcagcaggccgagagcgagaaggccccccgggagcccctggagccccaggtgctgcaggatgacctgcccatcagcctgaagaaggtgctgcagaccagcctgcctgagcccctgcgcatcaagctggagctggatggagacagccacatcctggagctgctgcagaaccgggagctggtgcccggccggcccaccctggtgtggtaccagccagatggcaccagggtggtgtctgagggccacaccctggagaactgctgctaccagggccgggtgcggggctacgccggctcctgggtgtccatctgcacctgcagcggcctgcggggcctggtggtgctgaccccagagaggagctacaccctggagcagggccctggggacctgcagggcccccccatcatcagccgcatccaggacctgcacctgcccggccacacctgtgccctgtcctggagggagagcgtgcacacccagaagcccccagagcaccccctgggccagaggcacatcagaagaagaagagatgtggtgacagagaccaagacagtggagctggtgattgtggccgaccacagcgaggcccagaagtacagagacttccagcacctgctgaacagaaccctggaggtggccctgctgctggacaccttcttccggcccctgaatgtgcgggtggccctggtgggcctggaggcctggacccagagggacctggtggagatcagccccaacccagctgtgaccctggagaacttcctgcactggaggcgggcccacctgctgccccggctgccccatgacagcgcccagctggtgacaggcaccagcttcagcggccccaccgtgggcatggccatccagaacagcatctgcagcccagacttcagcggcggcgtgaacatggaccacagcaccagcatcctgggcgtggccagcagcatcgcccacgagctgggccacagcctgggcctggaccatgacctgcccggcaacagctgcccctgccccggccctgccccagccaagacctgcatcatggaggccagcacagacttcctgcccggcctgaacttcagcaactgcagcagaagagccctggagaaggccctgctggatggcatgggcagctgcctgtttgagcggctgcccagcctgccccccatggccgccttctgtggcaacatgtttgtggagcctggagagcagtgtgactgtggcttcctggatgactgtgtggacccctgctgtgacagcctgacctgccagctgcggcctggggcccagtgtgccagtgatggcccctgctgccagaactgccagctgcggcccagcggctggcagtgccggcccaccaggggggactgtgacctgcctgagttctgccctggggacagcagccagtgccccccagatgtgtccctgggagatggagagccctgtgccggcggccaggccgtgtgcatgcacggccgctgtgccagctatgcccagcagtgccagagcctgtggggccctggggcccagcctgctgcccccctgtgcctgcagacagccaacaccagaggaaatgccttcggcagctgtggcaggaaccccagcggcagctatgtgtcctgcaccccaagagatgccatctgtggccagctgcagtgccagacaggccgcacccagcccctgctgggcagcatccgggacctgctgtgggagaccattgatgtgaatggaacagagctgaactgctcctgggtgcacctggacctgggcagtgatgtggcccagcccctgctgaccctgcctggaacagcctgtggccctggcctggtgtgcatcgaccaccgctgccagagggtggacctgctgggcgcccaggagtgccgcagcaagtgccacggccacggcgtgtgtgacagcaacagacactgctactgtgaggagggctgggcccccccagactgcaccacccagctgaaggccaccagcagcctgaccaccggcctgctgctgagcctgctggtgctgctggtgctggtgatgctgggcgccagctactggtaccgggcccggctgcaccagaggctgtgccagctgaagggccccacctgccagtacagagctgcccagagcggccccagcgagcggcccggccccccccagagggccctgctggcccggggcaccaagagccagggccctgccaagcccccaccacccaggaagcccctgcctgctgacccccagggccgctgccccagcggggacctgcccggccctggagctggcatcccccccctggtggtgcccagcaggcctgcccctcctccacccaccgtgagcagcctgtacctgtag

SEQ ID NO: 142585 - DNA, 2520 bp, synthetic construct
  misc_feature 1..2520: note = Description of Artificial Sequence: Synthetic coding sequence
  source 1..2520: mol_type = other DNA
atgaggctggccctgctgtgggccctgggcctgctgggcgccggcagccccctgcccagctggcccctgcccaacatcggcggcacagaggagcagcaggccgagagcgagaaggccccccgggagcccctggagccccaggtgctgcaggatgacctgcccatcagcctgaagaaggtgctgcagaccagcctgcctgagcccctgcgcatcaagctggagctggatggagacagccacatcctggagctgctgcagaaccgggagctggtgcccggccggcccaccctggtgtggtaccagccagatggcaccagggtggtgtctgagggccacaccctggagaactgctgctaccagggccgggtgcggggctacgccggctcctgggtgtccatctgcacctgcagcggcctgcggggcctggtggtgctgaccccagagaggagctacaccctggagcagggccctggggacctgcagggcccccccatcatcagccgcatccaggacctgcacctgcccggccacacctgtgccctgtcctggagggagagcgtgcacacccagaagcccccagagcaccccctgggccagaggcacatcagaagaagaagagatgtggtgacagagaccaagacagtggagctggtgattgtggccgaccacagcgaggcccagaagtacagagacttccagcacctgctgaacagaaccctggaggtggccctgctgctggacaccttcttccggcccctgaatgtgcgggtggccctggtgggcctggaggcctggacccagagggacctggtggagatcagccccaacccagctgtgaccctggagaacttcctgcactggaggcgggcccacctgctgccccggctgccccatgacagcgcccagctggtgacaggcaccagcttcagcggccccaccgtgggcatggccatccagaacagcatctgcagcccagacttcagcggcggcgtgaacatggaccacagcaccagcatcctgggcgtggccagcagcatcgcccacgagctgggccacagcctgggcctggaccatgacctgcccggcaacagctgcccctgccccggccctgccccagccaagacctgcatcatggaggccagcacagacttcctgcccggcctgaacttcagcaactgcagcagaagagccctggagaaggccctgctggatggcatgggcagctgcctgtttgagcggctgcccagcctgccccccatggccgccttctgtggcaacatgtttgtggagcctggagagcagtgtgactgtggcttcctggatgactgtgtggacccctgctgtgacagcctgacctgccagctgcggcctggggcccagtgtgccagtgatggcccctgctgccagaactgccagctgcggcccagcggctggcagtgccggcccaccaggggggactgtgacctgcctgagttctgccctggggacagcagccagtgccccccagatgtgtccctgggagatggagagccctgtgccggcggccaggccgtgtgcatgcacggccgctgtgccagctatgcccagcagtgccagagcctgtggggccctggggcccagcctgctgcccccctgtgcctgcagacagccaacaccagaggaaatgccttcggcagctgtggcaggaaccccagcggcagctatgtgtcctgcaccccaagagatgccatctgtggccagctgcagtgccagacaggccgcacccagcccctgctgggcagcatccgggacctgctgtgggagaccattgatgtgaatggaacagagctgaactgctcctgggtgcacctggacctgggcagtgatgtggcccagcccctgctgaccctgcctggaacagcctgtggccctggcctggtgtgcatcgaccaccgctgccagagggtggacctgctgggcgcccaggagtgccgcagcaagtgccacggccacggcgtgtgtgacagcaacagacactgctactgtgaggagggctgggcccccccagactgcaccacccagctgaaggccaccagcagcctgaccaccggcctgctgctgagcctgctggtgctgctggtgctggtgatgctgggcgccagctactggtaccgggcccggctgcaccagaggctgtgccagctgaagggccccacctgccagtacagagctgcccagagcggccccagcgagcggcccggccccccccagagggccctgctggcccggggcaccaagcaggccagcgccctgtccttccctgccccacccagccggcccctgcccccagaccctgtgtccaagaggctgcagagccagggccctgccaagcccccaccacccaggaagcccctgcctgctgacccccagggccgctgccccagcggggacctgcccggccctggggccggcatcccccccctggtggtgcccagcaggcctgcccctcctccacccaccgtgagcagcctgtacctgtag

SEQ ID NO: 142586 - DNA, 2592 bp, synthetic construct
  misc_feature 1..2592: note = Description of Artificial Sequence: Synthetic coding sequence
  source 1..2592: mol_type = other DNA
atgaggctggccctgctgtgggccctgggcctgctgggcgccggcagccccctgcccagctggcccctgcccaacatcggcggcacagaggagcagcaggccgagagcgagaaggccccccgggagcccctggagccccaggtgctgcaggatgacctgcccatcagcctgaagaaggtgctgcagaccagcctgcctgagcccctgcgcatcaagctggagctggatggagacagccacatcctggagctgctgcagaaccgggagctggtgcccggccggcccaccctggtgtggtaccagccagatggcaccagggtggtgtctgagggccacaccctggagaactgctgctaccagggccgggtgcggggctacgccggctcctgggtgtccatctgcacctgcagcggcctgcggggcctggtggtgctgaccccagagaggagctacaccctggagcagggccctggggacctgcagggcccccccatcatcagccgcatccaggacctgcacctgcccggccacacctgtgccctgtcctggagggagagcgtgcacacccagaagcccccagagcaccccctgggccagaggcacatcagaagaagaagagatgtggtgacagagaccaagacagtggagctggtgattgtggccgaccacagcgaggcccagaagtacagagacttccagcacctgctgaacagaaccctggaggtggccctgctgctggacaccttcttccggcccctgaatgtgcgggtggccctggtgggcctggaggcctggacccagagggacctggtggagatcagccccaacccagctgtgaccctggagaacttcctgcactggaggcgggcccacctgctgccccggctgccccatgacagcgcccagctggtgacaggcaccagcttcagcggccccaccgtgggcatggccatccagaacagcatctgcagcccagacttcagcggcggcgtgaacatggaccacagcaccagcatcctgggcgtggccagcagcatcgcccacgagctgggccacagcctgggcctggaccatgacctgcccggcaacagctgcccctgccccggccctgccccagccaagacctgcatcatggaggccagcacagacttcctgcccggcctgaacttcagcaactgcagcagaagagccctggagaaggccctgctggatggcatgggcagctgcctgtttgagcggctgcccagcctgccccccatggccgccttctgtggcaacatgtttgtggagcctggagagcagtgtgactgtggcttcctggatgactgtgtggacccctgctgtgacagcctgacctgccagctgcggcctggggcccagtgtgccagtgatggcccctgctgccagaactgccagctgcggcccagcggctggcagtgccggcccaccaggggggactgtgacctgcctgagttctgccctggggacagcagccagtgccccccagatgtgtccctgggagatggagagccctgtgccggcggccaggccgtgtgcatgcacggccgctgtgccagctatgcccagcagtgccagagcctgtggggccctggggcccagcctgctgcccccctgtgcctgcagacagccaacaccagaggaaatgccttcggcagctgtggcaggaaccccagcggcagctatgtgtcctgcaccccaagagatgccatctgtggccagctgcagtgccagacaggccgcacccagcccctgctgggcagcatccgggacctgctgtgggagaccattgatgtgaatggaacagagctgaactgctcctgggtgcacctggacctgggcagtgatgtggcccagcccctgctgaccctgcctggaacagcctgtggccctggcctggtgtgcatcgaccaccgctgccagagggtggacctgctgggcgcccaggagtgccgcagcaagtgccacggccacggcgtgtgtgacagcaacagacactgctactgtgaggagggctgggcccccccagactgcaccacccagctgaaggccaccagcagcctgaccaccggcctgctgctgagcctgctggtgctgctggtgctggtgatgctgggcgccagctactggtaccgggcccggctgcaccagaggctgtgccagctgaagggccccacctgccagtacagagctgcccagagcggccccagcgagcggcccggccccccccagagggccctgctggcccggggcaccaagcaggccagcgccctgtccttccctgccccacccagccggcccctgcccccagaccctgtgtccaagaggctgcaggccgagctggccgaccggcccaacccccccacccggcccctgcctgctgaccctgtggtgcgcagccccaagagccagggccctgccaagcccccaccacccaggaagcccctgcctgctgacccccagggccgctgccccagcggggacctgcccggccctggggccggcatcccccccctggtggtgcccagcaggcctgcccctcctccacccaccgtgagcagcctgtacctgtag

SEQ ID NO: 142587 - DNA, 2517 bp, synthetic construct
  misc_feature 1..2517: note = Description of Artificial Sequence: Synthetic coding sequence
  source 1..2517: mol_type = other DNA
atgaggctggccctgctgtgggccctgggcctgctgggcgccggcagccccctgcccagctggcccctgcccaacatcggcggcacagaggagcagcaggccgagagcgagaaggccccccgggagcccctggagccccaggtgctgcaggatgacctgcccatcagcctgaagaaggtgctgcagaccagcctgcctgagcccctgcgcatcaagctggagctggatggagacagccacatcctggagctgctgcagaaccgggagctggtgcccggccggcccaccctggtgtggtaccagccagatggcaccagggtggtgtctgagggccacaccctggagaactgctgctaccagggccgggtgcggggctacgccggctcctgggtgtccatctgcacctgcagcggcctgcggggcctggtggtgctgaccccagagaggagctacaccctggagcagggccctggggacctgcagggcccccccatcatcagccgcatccaggacctgcacctgcccggccacacctgtgccctgtcctggagggagagcgtgcacacccagaagcccccagagcaccccctgggccagaggcacatcagaagaagaagagatgtggtgacagagaccaagacagtggagctggtgattgtggccgaccacagcgaggcccagaagtacagagacttccagcacctgctgaacagaaccctggaggtggccctgctgctggacaccttcttccggcccctgaatgtgcgggtggccctggtgggcctggaggcctggacccagagggacctggtggagatcagccccaacccagctgtgaccctggagaacttcctgcactggaggcgggcccacctgctgccccggctgccccatgacagcgcccagctggtgacaggcaccagcttcagcggccccaccgtgggcatggccatccagaacagcatctgcagcccagacttcagcggcggcgtgaacatggaccacagcaccagcatcctgggcgtggccagcagcatcgcccacgagctgggccacagcctgggcctggaccatgacctgcccggcaacagctgcccctgccccggccctgccccagccaagacctgcatcatggaggccagcacagacttcctgcccggcctgaacttcagcaactgcagcagaagagccctggagaaggccctgctggatggcatgggcagctgcctgtttgagcggctgcccagcctgccccccatggccgccttctgtggcaacatgtttgtggagcctggagagcagtgtgactgtggcttcctggatgactgtgtggacccctgctgtgacagcctgacctgccagctgcggcctggggcccagtgtgccagtgatggcccctgctgccagaactgccagctgcggcccagcggctggcagtgccggcccaccaggggggactgtgacctgcctgagttctgccctggggacagcagccagtgccccccagatgtgtccctgggagatggagagccctgtgccggcggccaggccgtgtgcatgcacggccgctgtgccagctatgcccagcagtgccagagcctgtggggccctggggcccagcctgctgcccccctgtgcctgcagacagccaacaccagaggaaatgccttcggcagctgtggcaggaaccccagcggcagctatgtgtcctgcaccccaagagatgccatctgtggccagctgcagtgccagacaggccgcacccagcccctgctgggcagcatccgggacctgctgtgggagaccattgatgtgaatggaacagagctgaactgctcctgggtgcacctggacctgggcagtgatgtggcccagcccctgctgaccctgcctggaacagcctgtggccctggcctggtgtgcatcgaccaccgctgccagagggtggacctgctgggcgcccaggagtgccgcagcaagtgccacggccacggcgtgtgtgacagcaacagacactgctactgtgaggagggctgggcccccccagactgcaccacccagctgaaggccaccagcagcctgaccaccggcctgctgctgagcctgctggtgctgctggtgctggtgatgctgggcgccagctactggtaccgggcccggctgcaccagaggctgtgccagctgaagggccccacctgccagtacagagctgcccagagcggccccagcgagcggcccggccccccccagagggccctgctggcccggggcaccaaggccgagctggccgaccggcccaacccccccacccggcccctgcctgctgaccctgtggtgcgcagccccaagagccagggccctgccaagcccccaccacccaggaagcccctgcctgctgacccccagggccgctgccccagcggggacctgcccggccctggagctggcatcccccccctggtggtgcccagcaggcctgcccctcctccacccaccgtgagcagcctgtacctgtag

SEQ ID NO: 142588 - DNA, 2319 bp, synthetic construct
  misc_feature 1..2319: note = Description of Artificial Sequence: Synthetic coding sequence
  source 1..2319: mol_type = other DNA
atgaggctggccctgctgtgggccctgggcctgctgggcgccggcagccccctgcccagctggcccctgcccaacatcggcggcacagaggagcagcaggccgagagcgagaaggccccccgggagcccctggagccccaggtgctgcaggatgacctgcccatcagcctgaagaaggtgctgcagaccagcctgcctgagcccctgcgcatcaagctggagctggatggagacagccacatcctggagctgctgcagaaccgggagctggtgcccggccggcccaccctggtgtggtaccagccagatggcaccagggtggtgtctgagggccacaccctggagaactgctgctaccagggccgggtgcggggctacgccggctcctgggtgtccatctgcacctgcagcggcctgcggggcctggtggtgctgaccccagagaggagctacaccctggagcagggccctggggacctgcagggcccccccatcatcagccgcatccaggacctgcacctgcccggccacacctgtgccctgtcctggagggagagcgtgcacacccagaagcccccagagcaccccctgggccagaggcacatcagaagaagaagagatgtggtgacagagaccaagacagtggagctggtgattgtggccgaccacagcgaggcccagaagtacagagacttccagcacctgctgaacagaaccctggaggtggccctgctgctggacaccttcttccggcccctgaatgtgcgggtggccctggtgggcctggaggcctggacccagagggacctggtggagatcagccccaacccagctgtgaccctggagaacttcctgcactggaggcgggcccacctgctgccccggctgccccatgacagcgcccagctggtgacaggcaccagcttcagcggccccaccgtgggcatggccatccagaacagcatctgcagcccagacttcagcggcggcgtgaacatggaccacagcaccagcatcctgggcgtggccagcagcatcgcccacgagctgggccacagcctgggcctggaccatgacctgcccggcaacagctgcccctgccccggccctgccccagccaagacctgcatcatggaggccagcacagacttcctgcccggcctgaacttcagcaactgcagcagaagagccctggagaaggccctgctggatggcatgggcagctgcctgtttgagcggctgcccagcctgccccccatggccgccttctgtggcaacatgtttgtggagcctggagagcagtgtgactgtggcttcctggatgactgtgtggacccctgctgtgacagcctgacctgccagctgcggcctggggcccagtgtgccagtgatggcccctgctgccagaactgccagctgcggcccagcggctggcagtgccggcccaccaggggggactgtgacctgcctgagttctgccctggggacagcagccagtgccccccagatgtgtccctgggagatggagagccctgtgccggcggccaggccgtgtgcatgcacggccgctgtgccagctatgcccagcagtgccagagcctgtggggccctggggcccagcctgctgcccccctgtgcctgcagacagccaacaccagaggaaatgccttcggcagctgtggcaggaaccccagcggcagctatgtgtcctgcaccccaagagatgccatctgtggccagctgcagtgccagacaggccgcacccagcccctgctgggcagcatccgggacctgctgtgggagaccattgatgtgaatggaacagagctgaactgctcctgggtgcacctggacctgggcagtgatgtggcccagcccctgctgaccctgcctggaacagcctgtggccctggcctggtgtgcatcgaccaccgctgccagagggtggacctgctgggcgcccaggagtgccgcagcaagtgccacggccacggcgtgtgtgacagcaacagacactgctactgtgaggagggctgggcccccccagactgcaccacccagctgaaggccaccagcagcctgaccaccggcctgctgctgagcctgctggtgctgctggtgctggtgatgctgggcgccagctactggtaccgggcccggctgcaccagaggctgtgccagctgaagggccccacctgccagtacagcctgcggggccagcccagcccccacccccagggcagccactgcctgcccaccccccgggccggggcccaccgggtgacctgcccagcccagggcctggagagccggccctag

SEQ ID NO: 142589 - DNA, 1563 bp, synthetic construct
  misc_feature 1..1563: note = Description of Artificial Sequence: Synthetic coding sequence
  source 1..1563: mol_type = other DNA
atgaggctggccctgctgtgggccctgggcctgctgggcgccggcagccccctgcccagctggcccctgcccaacatcggcggcacagaggagcagcaggccgagagcgagaaggccccccgggagcccctggagccccaggtgctgcaggatgacctgcccatcagcctgaagaaggtgctgcagaccagcctgcctgagcccctgcgcatcaagctggagctggatggagacagccacatcctggagctgctgcagaacagaagcttcctgcccggcctgaacttcagcaactgcagcagaagagccctggagaaggccctgctggatggcatgggcagctgcctgtttgagcggctgcccagcctgccccccatggccgccttctgtggcaacatgtttgtggagcctggagagcagtgtgactgtggcttcctggatgactgtgtggacccctgctgtgacagcctgacctgccagctgcggcctggggcccagtgtgccagtgatggcccctgctgccagaactgccagctgcggcccagcggctggcagtgccggcccaccaggggggactgtgacctgcctgagttctgccctggggacagcagccagtgccccccagatgtgtccctgggagatggagagccctgtgccggcggccaggccgtgtgcatgcacggccgctgtgccagctatgcccagcagtgccagagcctgtggggccctggggcccagcctgctgcccccctgtgcctgcagacagccaacaccagaggaaatgccttcggcagctgtggcaggaaccccagcggcagctatgtgtcctgcaccccaagagatgccatctgtggccagctgcagtgccagacaggccgcacccagcccctgctgggcagcatccgggacctgctgtgggagaccattgatgtgaatggaacagagctgaactgctcctgggtgcacctggacctgggcagtgatgtggcccagcccctgctgaccctgcctggaacagcctgtggccctggcctggtgtgcatcgaccaccgctgccagagggtggacctgctgggcgcccaggagtgccgcagcaagtgccacggccacggcgtgtgtgacagcaacagacactgctactgtgaggagggctgggcccccccagactgcaccacccagctgaaggccaccagcagcctgaccaccggcctgctgctgagcctgctggtgctgctggtgctggtgatgctgggcgccagctactggtaccgggcccggctgcaccagaggctgtgccagctgaagggccccacctgccagtacagagctgcccagagcggccccagcgagcggcccggccccccccagagggccctgctggcccggggcaccaagagccagggccctgccaagcccccaccacccaggaagcccctgcctgctgacccccagggccgctgccccagcggggacctgcccggccctggagctggcatcccccccctggtggtgcccagcaggcctgcccctcctccacccaccgtgagcagcctgtacctgtag

SEQ ID NO: 142590 - DNA, 2589 bp, synthetic construct
  misc_feature 1..2589: note = Description of Artificial Sequence: Synthetic coding sequence
  source 1..2589: mol_type = other DNA
atgaggctggccctgctgtgggccctgggcctgctgggcgccggcagccccctgcccagctggcccctgcccaacatcggcggcacagaggagcagcaggccgagagcgagaaggccccccgggagcccctggagccccaggtgctgcaggatgacctgcccatcagcctgaagaaggtgctgcagaccagcctgcctgagcccctgcgcatcaagctggagctggatggagacagccacatcctggagctgctgcagaaccgggagctggtgcccggccggcccaccctggtgtggtaccagccagatggcaccagggtggtgtctgagggccacaccctggagaactgctgctaccagggccgggtgcggggctacgccggctcctgggtgtccatctgcacctgcagcggcctgcggggcctggtggtgctgaccccagagaggagctacaccctggagcagggccctggggacctgcagggcccccccatcatcagccgcatccaggacctgcacctgcccggccacacctgtgccctgtcctggagggagagcgtgcacacccagaagcccccagagcaccccctgggccagaggcacatcagaagaagaagagatgtggtgacagagaccaagacagtggagctggtgattgtggccgaccacagcgaggcccagaagtacagagacttccagcacctgctgaacagaaccctggaggtggccctgctgctggacaccttcttccggcccctgaatgtgcgggtggccctggtgggcctggaggcctggacccagagggacctggtggagatcagccccaacccagctgtgaccctggagaacttcctgcactggaggcgggcccacctgctgccccggctgccccatgacagcgcccagctggtgacaggcaccagcttcagcggccccaccgtgggcatggccatccagaacagcatctgcagcccagacttcagcggcggcgtgaacatggaccacagcaccagcatcctgggcgtggccagcagcatcgcccacgagctgggccacagcctgggcctggaccatgacctgcccggcaacagctgcccctgccccggccctgccccagccaagacctgcatcatggaggccagcacagacttcctgcccggcctgaacttcagcaactgcagcagaagagccctggagaaggccctgctggatggcatgggcagctgcctgtttgagcggctgcccagcctgccccccatggccgccttctgtggcaacatgtttgtggagcctggagagcagtgtgactgtggcttcctggatgactgtgtggacccctgctgtgacagcctgacctgccagctgcggcctggggcccagtgtgccagtgatggcccctgctgccagaactgccagctgcggcccagcggctggcagtgccggcccaccaggggggactgtgacctgcctgagttctgccctggggacagcagccagtgccccccagatgtgtccctgggagatggagagccctgtgccggcggccaggccgtgtgcatgcacggccgctgtgccagctatgcccagcagtgccagagcctgtggggccctggggcccagcctgctgcccccctgtgcctgcagacagccaacaccagaggaaatgccttcggcagctgtggcaggaaccccagcggcagctatgtgtcctgcaccccaagagatgccatctgtggccagctgcagtgccagacaggccgcacccagcccctgctgggcagcatccgggacctgctgtgggagaccattgatgtgaatggaacagagctgaactgctcctgggtgcacctggacctgggcagtgatgtggcccagcccctgctgaccctgcctggaacagcctgtggccctggcctggtgtgcatcgaccaccgctgccagagggtggacctgctgggcgcccaggagtgccgcagcaagtgccacggccacggcgtgtgtgacagcaacagacactgctactgtgaggagggctgggcccccccagactgcaccacccagctgaaggccaccagcagcctgaccaccggcctgctgctgagcctgctggtgctgctggtgctggtgatgctgggcgccagctactggtaccgggcccggctgcaccagaggctgtgccagctgaagggccccacctgccagtacagagctgcccagagcggccccagcgagcggcccggccccccccagagggccctgctggcccggggcaccaaggccagcgccctgtccttccctgccccacccagccggcccctgcccccagaccctgtgtccaagaggctgcaggccgagctggccgaccggcccaacccccccacccggcccctgcctgctgaccctgtggtgcgcagccccaagagccagggccctgccaagcccccaccacccaggaagcccctgcctgctgacccccagggccgctgccccagcggggacctgcccggccctggagctggcatcccccccctggtggtgcccagcaggcctgcccctcctccacccaccgtgagcagcctgtacctgtag

SEQ ID NO: 142591 - DNA, 2391 bp, synthetic construct
  misc_feature 1..2391: note = Description of Artificial Sequence: Synthetic coding sequence
  source 1..2391: mol_type = other DNA
atgaggctggccctgctgtgggccctgggcctgctgggcgccggcagccccctgcccagctggcccctgcccaacatcggcggcacagaggagcagcaggccgagagcgagaaggccccccgggagcccctggagccccaggtgctgcaggatgacctgcccatcagcctgaagaaggtgctgcagaccagcctgcctgagcccctgcgcatcaagctggagctggatggagacagccacatcctggagctgctgcagaaccgggagctggtgcccggccggcccaccctggtgtggtaccagccagatggcaccagggtggtgtctgagggccacaccctggagaactgctgctaccagggccgggtgcggggctacgccggctcctgggtgtccatctgcacctgcagcggcctgcggggcctggtggtgctgaccccagagaggagctacaccctggagcagggccctggggacctgcagggcccccccatcatcagccgcatccaggacctgcacctgcccggccacacctgtgccctgtcctggagggagagcgtgcacacccagaagcccccagagcaccccctgggccagaggcacatcagaagaagaagagatgtggtgacagagaccaagacagtggagctggtgattgtggccgaccacagcgaggcccagaagtacagagacttccagcacctgctgaacagaaccctggaggtggccctgctgctggacaccttcttccggcccctgaatgtgcgggtggccctggtgggcctggaggcctggacccagagggacctggtggagatcagccccaacccagctgtgaccctggagaacttcctgcactggaggcgggcccacctgctgccccggctgccccatgacagcgcccagctggtgacaggcaccagcttcagcggccccaccgtgggcatggccatccagaacagcatctgcagcccagacttcagcggcggcgtgaacatggaccacagcaccagcatcctgggcgtggccagcagcatcgcccacgagctgggccacagcctgggcctggaccatgacctgcccggcaacagctgcccctgccccggccctgccccagccaagacctgcatcatggaggccagcacagacttcctgcccggcctgaacttcagcaactgcagcagaagagccctggagaaggccctgctggatggcatgggcagctgcctgtttgagcggctgcccagcctgccccccatggccgccttctgtggcaacatgtttgtggagcctggagagcagtgtgactgtggcttcctggatgactgtgtggacccctgctgtgacagcctgacctgccagctgcggcctggggcccagtgtgccagtgatggcccctgctgccagaactgccagctgcggcccagcggctggcagtgccggcccaccaggggggactgtgacctgcctgagttctgccctggggacagcagccagtgccccccagatgtgtccctgggagatggagagccctgtgccggcggccaggccgtgtgcatgcacggccgctgtgccagctatgcccagcagtgccagagcctgtggggccctggggcccagcctgctgcccccctgtgcctgcagacagccaacaccagaggaaatgccttcggcagctgtggcaggaaccccagcggcagctatgtgtcctgcaccccaagagatgccatctgtggccagctgcagtgccagacaggccgcacccagcccctgctgggcagcatccgggacctgctgtgggagaccattgatgtgaatggaacagagctgaactgctcctgggtgcacctggacctgggcagtgatgtggcccagcccctgctgaccctgcctggaacagcctgtggccctggcctggtgtgcatcgaccaccgctgccagagggtggacctgctgggcgcccaggagtgccgcagcaagtgccacggccacggcgtgtgtgacagcaacagacactgctactgtgaggagggctgggcccccccagactgcaccacccagctgaaggccaccagcagcctgaccaccggcctgctgctgagcctgctggtgctgctggtgctggtgatgctgggcgccagctactggtaccgggcccggctgcaccagaggctgtgccagctgaagggccccacctgccagtaccgcctggtgctgagcgccagccggccccccctgcccggccgctgccgcctgaccctgtgcccccgggacagcagcctgcggggccagcccagcccccacccccagggcagccactgcctgcccaccccccgggccggggcccaccgggtgacctgcccagcccagggcctggagagccggccctag

SEQ ID NO: 142592 - DNA, 2475 bp, synthetic construct
  misc_feature 1..2475: note = Description of Artificial Sequence: Synthetic coding sequence
  source 1..2475: mol_type = other DNA
atgaggctggccctgctgtgggccctgggcctgctgggcgccggcagccccctgcccagctggcccctgcccaacatcgtgctgtcctggggcgtgctgggccctgctgggggcacagaggagcagcaggccgagagcgagaaggccccccgggagcccctggagccccaggtgctgcaggatgacctgcccatcagcctgaagaaggtgctgcagaccagcctgcctgagcccctgcgcatcaagctggagctggatggagacagccacatcctggagctgctgcagaaccgggagctggtgcccggccggcccaccctggtgtggtaccagccagatggcaccagggtggtgtctgagggccacaccctggagaactgctgctaccagggccgggtgcggggctacgccggctcctgggtgtccatctgcacctgcagcggcctgcggggcctggtggtgctgaccccagagaggagctacaccctggagcagggccctggggacctgcagggcccccccatcatcagccgcatccaggacctgcacctgcccggccacacctgtgccctgtcctggagggagagcgtgcacacccagaagcccccagagcaccccctgggccagaggcacatcagaagaagaagagatgtggtgacagagaccaagacagtggagctggtgattgtggccgaccacagcgaggcccagaagtacagagacttccagcacctgctgaacagaaccctggaggtggccctgctgctggacaccttcttccggcccctgaatgtgcgggtggccctggtgggcctggaggcctggacccagagggacctggtggagatcagccccaacccagctgtgaccctggagaacttcctgcactggaggcgggcccacctgctgccccggctgccccatgacagcgcccagctggtgacaggcaccagcttcagcggccccaccgtgggcatggccatccagaacagcatctgcagcccagacttcagcggcggcgtgaacatggaccacagcaccagcatcctgggcgtggccagcagcatcgcccacgagctgggccacagcctgggcctggaccatgacctgcccggcaacagctgcccctgccccggccctgccccagccaagacctgcatcatggaggccagcacagacttcctgcccggcctgaacttcagcaactgcagcagaagagccctggagaaggccctgctggatggcatgggcagctgcctgtttgagcggctgcccagcctgccccccatggccgccttctgtggcaacatgtttgtggagcctggagagcagtgtgactgtggcttcctggatgactgtgtggacccctgctgtgacagcctgacctgccagctgcggcctggggcccagtgtgccagtgatggcccctgctgccagaactgccagctgcggcccagcggctggcagtgccggcccaccaggggggactgtgacctgcctgagttctgccctggggacagcagccagtgccccccagatgtgtccctgggagatggagagccctgtgccggcggccaggccgtgtgcatgcacggccgctgtgccagctatgcccagcagtgccagagcctgtggggccctggggcccagcctgctgcccccctgtgcctgcagacagccaacaccagaggaaatgccttcggcagctgtggcaggaaccccagcggcagctatgtgtcctgcaccccaagagatgccatctgtggccagctgcagtgccagacaggccgcacccagcccctgctgggcagcatccgggacctgctgtgggagaccattgatgtgaatggaacagagctgaactgctcctgggtgcacctggacctgggcagtgatgtggcccagcccctgctgaccctgcctggaacagcctgtggccctggcctggtgtgcatcgaccaccgctgccagagggtggacctgctgggcgcccaggagtgccgcagcaagtgccacggccacggcgtgtgtgacagcaacagacactgctactgtgaggagggctgggcccccccagactgcaccacccagctgaaggccaccagcagcctgaccaccggcctgctgctgagcctgctggtgctgctggtgctggtgatgctgggcgccagctactggtaccgggcccggctgcaccagaggctgtgccagctgaagggccccacctgccagtacagagctgcccagagcggccccagcgagcggcccggccccccccagagggccctgctggcccggggcaccaagagccagggccctgccaagcccccaccacccaggaagcccctgcctgctgacccccagggccgctgccccagcggggacctgcccggccctggagctggcatcccccccctggtggtgcccagcaggcctgcccctcctccacccaccgtgagcagcctgtacctgtag

SEQ ID NO: 142593 - DNA, 2757 bp, synthetic construct
  misc_feature 1..2757: note = Description of Artificial Sequence: Synthetic coding sequence
  source 1..2757: mol_type = other DNA
atgcctgggggcgctggggccgcccggctgtgcctgctggcctttgccctgcagcccctgcggccccgggccgcccgggagcccggctggacccggggcagcgaggagggcagccccaagctgcagcacgagctgatcatcccccagtggaagaccagcgagagccctgtgcgggagaagcaccccctgaaggccgagctgcgggtgatggccgagggccgggagctgatcctggacctggagaagaatgagcagctgtttgcccccagctacacagagacccactacaccagcagcggcaacccccagaccaccaccaggaagctggaggaccactgcttctaccacggcaccgtgcgggagacagagctgagctctgtgaccctgagcacctgccggggcatccggggcctcatcaccgtgagcagcaacctgtcctatgtgattgagcccctgcctgacagcaagggccagcacctgatctacagaagtgagcacctgaagcccccacctggcaactgtggctttgagcacagcaagcccaccacccgggactgggccctgcagttcacccagcagaccaagaagaggcccaggaggatgaagcgggaggacctgaacagcatgaagtatgtggagctgtacctggtggccgactacctggagttccagaagaacagaagagaccaggatgccaccaagcacaagctgattgagatcgccaactacgtggacaagttctaccgcagcctgaacatcagaattgccctggtgggcctggaggtgtggacccacggcaacatgtgtgaggtgtctgagaacccctacagcaccctgtggagcttcctgtcctggaggaggaagctgctggcccagaagtaccatgacaatgcccagctgatcaccggcatgtccttccacggcaccaccatcggcctggcccccctgatggccatgtgcagcgtgtaccagagcggaggagtgaacatggaccacagtgaaaatgccatcggcgtggccgccaccatggcccacgagatgggccacaactttggcatgacccatgattctgctgactgctgcagcgccagcgctgctgatggcggctgcatcatggccgccgccaccggccaccccttccccaaggtgttcaacggctgcaacagaagagagctggaccgctacctgcagagcggcggcggcatgtgcctgagcaacatgccagacaccaggatgctgtatggaggaagaagatgtggaaatggctacctggaggatggagaagaatgtgactgtggggaggaggaggagtgcaacaacccctgctgcaatgccagcaactgcaccctgcggcctggagcagaatgtgcccacggcagctgctgccaccagtgcaagctgctggcccctggcaccctgtgccgggagcaggcccggcagtgtgacctgcctgagttctgcaccgggaagagcccccactgccccaccaacttctaccagatggatggcaccccctgtgagggcggccaggcctactgctacaacggcatgtgcctgacctaccaggagcagtgccagcagctgtggggccctggggcccggcctgccccagacctgtgctttgagaaggtgaatgtggccggggacacctttggaaactgtgggaaggacatgaatggagagcacaggaagtgcaacatgagagatgccaagtgtgggaagatccagtgccagagcagcgaggcccggcccctggagagcaatgctgtgcccatcgacaccaccatcatcatgaatggccggcagatccagtgccggggcacccacgtgtaccggggccctgaggaggagggggacatgctggaccccggcctggtgatgacaggcaccaagtgtggctacaaccacatctgctttgagggccagtgcaggaacaccagcttctttgaaacagagggctgtgggaagaagtgcaatggacatggagtgtgcaacaacaaccagaactgccactgcctgcccggctgggccccacccttctgcaacaccccaggccacggcggcagcattgacagcggccccatgcctcctgagagcgtgggccctgtggtggccggcgtgctggtggccatcctggtgctggccgtgctgatgctgatgtactactgctgccggcagaacaacaagctgggccagctgaagcccagcgccctgcccagcaagctgcggcagcagttcagctgccccttccgggtgtcccagaacagcggcaccggccacgccaaccccaccttcaagctgcagaccccccagggcaagaggaaggtgatcaacaccccagagatcctgaggaagcccagccagcccccacccaggcctcctccagactacctgcggggcggcagccccccagcccccctgcctgcccacctgagccgggccgccaggaacagccctggccctggcagccagattgaaagaacagagagcagccggcggcccccacccagccggcccatccccccagcccccaactgcatcgtgtcccaggacttcagccggcccaggcctccccagaaggccctgcctgccaaccctgtgcccggccgccgcagcctgcccaggcctgggggcgccagccccctgcggcccccaggagctggcccccagcagagccggcccctggccgccctggcccccaagtttcctgagtaccgcagccagagagctgggggcatgatcagcagcaagatctag

SEQ ID NO: 142594 - DNA, 2763 bp, synthetic construct
  misc_feature 1..2763: note = Description of Artificial Sequence: Synthetic coding sequence
  source 1..2763: mol_type = other DNA
atgcctgggggcgctggggccgcccggctgtgcctgctggcctttgccctgcagcccctgcggccccgggccgcccgggagcccggctggaccatcagccggggcagcgaggagggcagccccaagctgcagcacgagctgatcatcccccagtggaagaccagcgagagccctgtgcgggagaagcaccccctgaaggccgagctgcgggtgatggccgagggccgggagctgatcctggacctggagaagaatgagcagctgtttgcccccagctacacagagacccactacaccagcagcggcaacccccagaccaccaccaggaagctggaggaccactgcttctaccacggcaccgtgcgggagacagagctgagctctgtgaccctgagcacctgccggggcatccggggcctcatcaccgtgagcagcaacctgtcctatgtgattgagcccctgcctgacagcaagggccagcacctgatctacagaagtgagcacctgaagcccccacctggcaactgtggctttgagcacagcaagcccaccacccgggactgggccctgcagttcacccagcagaccaagaagaggcccaggaggatgaagcgggaggacctgaacagcatgaagtatgtggagctgtacctggtggccgactacctggagttccagaagaacagaagagaccaggatgccaccaagcacaagctgattgagatcgccaactacgtggacaagttctaccgcagcctgaacatcagaattgccctggtgggcctggaggtgtggacccacggcaacatgtgtgaggtgtctgagaacccctacagcaccctgtggagcttcctgtcctggaggaggaagctgctggcccagaagtaccatgacaatgcccagctgatcaccggcatgtccttccacggcaccaccatcggcctggcccccctgatggccatgtgcagcgtgtaccagagcggaggagtgaacatggaccacagtgaaaatgccatcggcgtggccgccaccatggcccacgagatgggccacaactttggcatgacccatgattctgctgactgctgcagcgccagcgctgctgatggcggctgcatcatggccgccgccaccggccaccccttccccaaggtgttcaacggctgcaacagaagagagctggaccgctacctgcagagcggcggcggcatgtgcctgagcaacatgccagacaccaggatgctgtatggaggaagaagatgtggaaatggctacctggaggatggagaagaatgtgactgtggggaggaggaggagtgcaacaacccctgctgcaatgccagcaactgcaccctgcggcctggagcagaatgtgcccacggcagctgctgccaccagtgcaagctgctggcccctggcaccctgtgccgggagcaggcccggcagtgtgacctgcctgagttctgcaccgggaagagcccccactgccccaccaacttctaccagatggatggcaccccctgtgagggcggccaggcctactgctacaacggcatgtgcctgacctaccaggagcagtgccagcagctgtggggccctggggcccggcctgccccagacctgtgctttgagaaggtgaatgtggccggggacacctttggaaactgtgggaaggacatgaatggagagcacaggaagtgcaacatgagagatgccaagtgtgggaagatccagtgccagagcagcgaggcccggcccctggagagcaatgctgtgcccatcgacaccaccatcatcatgaatggccggcagatccagtgccggggcacccacgtgtaccggggccctgaggaggagggggacatgctggaccccggcctggtgatgacaggcaccaagtgtggctacaaccacatctgctttgagggccagtgcaggaacaccagcttctttgaaacagagggctgtgggaagaagtgcaatggacatggagtgtgcaacaacaaccagaactgccactgcctgcccggctgggccccacccttctgcaacaccccaggccacggcggcagcattgacagcggccccatgcctcctgagagcgtgggccctgtggtggccggcgtgctggtggccatcctggtgctggccgtgctgatgctgatgtactactgctgccggcagaacaacaagctgggccagctgaagcccagcgccctgcccagcaagctgcggcagcagttcagctgccccttccgggtgtcccagaacagcggcaccggccacgccaaccccaccttcaagctgcagaccccccagggcaagaggaaggtgatcaacaccccagagatcctgaggaagcccagccagcccccacccaggcctcctccagactacctgcggggcggcagccccccagcccccctgcctgcccacctgagccgggccgccaggaacagccctggccctggcagccagattgaaagaacagagagcagccggcggcccccacccagccggcccatccccccagcccccaactgcatcgtgtcccaggacttcagccggcccaggcctccccagaaggccctgcctgccaaccctgtgcccggccgccgcagcctgcccaggcctgggggcgccagccccctgcggcccccaggagctggcccccagcagagccggcccctggccgccctggcccccaagtttcctgagtaccgcagccagagagctgggggcatgatcagcagcaagatctag

SEQ ID NO: 142595 - DNA, 1917 bp, synthetic construct
  misc_feature 1..1917: note = Description of Artificial Sequence: Synthetic coding sequence
  source 1..1917: mol_type = other DNA
atgtgtgaggtgtctgagaacccctacagcaccctgtggagcttcctgtcctggaggaggaagctgctggcccagaagtaccatgacaatgcccagctgatcaccggcatgtccttccacggcaccaccatcggcctggcccccctgatggccatgtgcagcgtgtaccagagcggcggcgtgaacatggaccacagtgaaaatgccatcggcgtggccgccaccatggcccacgagatgggccacaactttggcatgacccatgacagcgctgactgctgcagcgccagcgctgctgatggcggctgcatcatggctgctgccaccggccaccccttccccaaggtgttcaacggctgcaacagaagagagctggaccgctacctgcagagcggcggcggcatgtgcctgagcaacatgccagacaccaggatgctgtatggaggccgccgctgtggaaatggctacctggaggatggagaggagtgtgactgtggggaggaggaggagtgcaacaacccctgctgcaatgccagcaactgcaccctgcggcctggagcagaatgtgcccacggcagctgctgccaccagtgcaagctgctggcccctggcaccctgtgccgggagcaggcccggcagtgtgacctgcctgagttctgcaccgggaagagcccccactgccccaccaacttctaccagatggatggcaccccctgtgagggcggccaggcctactgctacaacggcatgtgcctgacctaccaggagcagtgccagcagctgtggggccctggggcccggcctgccccagacctgtgctttgagaaggtgaatgtggccggggacaccttcggcaactgtgggaaggacatgaatggagagcacaggaagtgcaacatgagagatgccaagtgtgggaagatccagtgccagagcagcgaggcccggcccctggagagcaatgctgtgcccatcgacaccaccatcatcatgaatggccggcagatccagtgccggggcacccacgtgtaccggggccctgaggaggagggggacatgctggaccccggcctggtgatgacaggcaccaagtgtggctacaaccacatctgctttgagggccagtgcaggaacaccagcttctttgaaacagagggctgcggcaagaagtgcaatggccacggcgtgtgcaacaacaaccagaactgccactgcctgcccggctgggccccacccttctgcaacaccccaggccatggaggcagcattgattctggccccatgcctcctgagagcgtgggccctgtggtggccggcgtgctggtggccatcctggtgctggccgtgctgatgctgatgtactactgctgccggcagaacaacaagctgggccagctgaagcccagcgccctgcccagcaagctgcggcagcagttcagctgccccttccgggtgtcccagaacagcggcactggacatgccaaccccaccttcaagctgcagaccccccagggcaagaggaaggtgatcaacaccccagagatcctgaggaagcccagccagcccccaccccggcccccaccagactacctgcggggcggcagccccccagcccccctgcctgcccacctgagcagagctgccaggaacagccctggccctggcagccagatcgagaggacagagagcagcagaagacctccacccagccggcccatccccccagcccccaactgcatcgtgtcccagaagtgcctgctgcccccagccatgatcctgcgggccccccagcccagcggcaccgtggtgtgcctggtgatctccttcaacatggccttctaccgctccatgaggatcagaattgagcccggcatcaagaccaagctgctggtgctgctggtgtggaagcagttctag

SEQ ID NO: 142596 - DNA, 2868 bp, synthetic construct
  misc_feature 1..2868: note = Description of Artificial Sequence: Synthetic coding sequence
  source 1..2868: mol_type = other DNA
atgcctgggggcgctggggccgcccggctgtgcctgctggcctttgccctgcagcccctgcggccccgggccgcccgggagcccggctggacccggggcagcgaggagggcagccccaagctgcagcacgagctgatcatcccccagtggaagaccagcgagagccctgtgcgggagaagcaccccctgaaggccgagctgcgggtgatggccgagggccgggagctgatcctggacctggagaagaatgagcagctgtttgcccccagctacacagagacccactacaccagcagcggcaacccccagaccaccaccaggaagctggaggaccactgcttctaccacggcaccgtgcgggagacagagctgagctctgtgaccctgagcacctgccggggcatccggggcctcatcaccgtgagcagcaacctgtcctatgtgattgagcccctgcctgacagcaagggccagcacctgatctacagaagtgagcacctgaagcccccacctggcaactgtggctttgagcacagcaagcccaccacccgggactgggccctgcagttcacccagcagaccaagaagaggcccaggaggatgaagcgggaggacctgaacagcatgaagtatgtggagctgtacctggtggccgactacctggagttccagaagaacagaagagaccaggatgccaccaagcacaagctgattgagatcgccaactacgtggacaagttctaccgcagcctgaacatcagaattgccctggtgggcctggaggtgtggacccacggcaacatgtgtgaggtgtctgagaacccctacagcaccctgtggagcttcctgtcctggaggaggaagctgctggcccagaagtaccatgacaatgcccagctgatcaccggcatgtccttccacggcaccaccatcggcctggcccccctgatggccatgtgcagcgtgtaccagagcggaggagtgaacatggaccacagtgaaaatgccatcggcgtggccgccaccatggcccacgagatgggccacaactttggcatgacccatgattctgctgactgctgcagcgccagcgctgctgatggcggctgcatcatggccgccgccaccggccaccccttccccaaggtgttcaacggctgcaacagaagagagctggaccgctacctgcagagcggcggcggcatgtgcctgagcaacatgccagacaccaggatgctgtatggaggaagaagatgtggaaatggctacctggaggatggagaagaatgtgactgtggggaggaggaggagtgcaacaacccctgctgcaatgccagcaactgcaccctgcggcctggagcagaatgtgcccacggcagctgctgccaccagtgcaagctgctggcccctggcaccctgtgccgggagcaggcccggcagtgtgacctgcctgagttctgcaccgggaagagcccccactgccccaccaacttctaccagatggatggcaccccctgtgagggcggccaggcctactgctacaacggcatgtgcctgacctaccaggagcagtgccagcagctgtggggccctggggcccggcctgccccagacctgtgctttgagaaggtgaatgtggccggggacacctttggaaactgtgggaaggacatgaatggagagcacaggaagtgcaacatgagagatgccaagtgtgggaagatccagtgccagagcagcgaggcccggcccctggagagcaatgctgtgcccatcgacaccaccatcatcatgaatggccggcagatccagtgccggggcacccacgtgtaccggggccctgaggaggagggggacatgctggaccccggcctggtgatgacaggcaccaagtgtggctacaaccacatctgctttgagggccagtgcaggaacaccagcttctttgaaacagagggctgtgggaagaagtgcaatggacatggagtgtgcaacaacaaccagaactgccactgcctgcccggctgggccccacccttctgcaacaccccaggccacggcggcagcattgacagcggccccatgcctcctgagagcgtgggccctgtggtggccggcgtgctggtggccatcctggtgctggccgtgctgatgctgatgtactactgctgccggcagaacaacaagctgggccagctgaagcccagcgccctgcccagcaagctgcggcagcagttcagctgccccttccgggtgtcccagaacagcggcaccggccacgccaaccccaccttcaagctgcagaccccccagggcaagaggaaggtgatcaacaccccagagatcctgaggaagcccagccagcccccacccaggcctcctccagactacctgcggggcggcagccccccagcccccctgcctgcccacctgagccgggccgccaggaacagccctggccctggcagccagattgaaagaacagagagcagccggcggcccccacccagccggcccatccccccagcccccaactgcatcgtgtcccaggacttcagccggcccaggcctccccagaaggccctgcctgccaaccctgtgcccggccgccgcagcctgcccaggcctgggggcgccagccccctgcggcccccaggagctggcccccagcagagccggcccctggccgccctggcccccaaggtgagcccccgggaggccctgaaggtgaaggccggcacccggggcctgcagggcggccgctgccgggtggagaagaccaagcagttcatgctgctggtggtgtggacagagctgcctgagcagaagccccgggccaagcacagctgcttcctggtgcctgcctag

SEQ ID NO: 142597 - DNA, 2208 bp, synthetic construct
  misc_feature 1..2208: note = Description of Artificial Sequence: Synthetic coding sequence
  source 1..2208: mol_type = other DNA
atgtggagggtgctcttcctgctgagcggcctgggcggcctgaggatggacagcaactttgacagcctgcctgtgcagatcaccgtgcctgagaagatccgcagcatcatcaaggagggcatcgagagccaggccagctacaagatcgtgattgagggcaagccctacacagtgaacctgatgcagaagaacttcctgccccacaacttccgggtgtacagctacagcggcaccggcatcatgaagcccctggaccaggacttccagaacttctgccactaccagggctacatcgagggctaccccaagtctgtggtgatggtgtccacctgcaccggcctgcggggcgtgctgcagtttgaaaatgtgtcctatggaattgagcccctggagagctctgtgggctttgagcacgtgatctaccaggtgaagcacaagaaggcagatgtgtccctgtacaatgagaaggacatcgagagccgggacctgtccttcaagctgcagagcgtggagccccagcaggactttgccaagtacatcgagatgcacgtgattgtggagaagcagctgtacaaccacatgggcagtgacaccaccgtggtggcccagaaggtgttccagctgattggcctgaccaatgccatctttgtgtccttcaacatcaccatcatcctgagcagcctggagctgtggattgatgagaacaagatcgccaccaccggggaggccaatgagctgctgcacaccttcctgcgctggaagaccagctacctggtgctgcggccccatgatgtggccttcctgctggtgtaccgggagaagagcaactacgtgggcgccaccttccagggcaagatgtgtgatgccaactatgctgggggcgtggtgctgcaccccaggaccatcagcctggagagcctggccgtcatcctggcccagctgctgagcctgtccatgggcatcacctatgatgacatcaacaagtgccagtgcagcggggctgtgtgcatcatgaaccctgaggccatccacttcagcggcgtgaagatcttcagcaactgcagctttgaagattttgcccacttcatcagcaagcagaagagccagtgcctgcacaaccagccccggctggaccccttcttcaagcagcaggccgtgtgtggaaatgccaagctggaggccggggaggagtgtgactgtggcacagagcaggactgtgccctgattggagagacctgctgtgacatcgccacctgccgcttcaaggccggcagcaactgtgccgagggcccctgctgtgagaactgcctcttcatgagcaaggagaggatgtgccggcccagctttgaagaatgtgacctgcctgagtactgcaatggcagcagcgccagctgcccagagaaccactacgtgcagacaggccacccctgtggcctgaaccagtggatctgcattgatggagtgtgcatgtctggggacaagcagtgcacagacaccttcggcaaggaggtggagtttggccccagcgagtgctacagccacctgaacagcaagacagatgtgtctggcaactgtggcatcagtgacagcggctacacccagtgtgaggccgacaacctgcagtgtgggaagctgatctgcaagtatgtgggcaagttcctgctgcagatcccccgggccaccatcatctatgccaacatcagcggccacctgtgcatcgctgtggagtttgccagtgaccacgccgacagccagaagatgtggatcaaggatggcaccagctgtggcagcaacaaggtgtgcaggaaccagagatgtgtgagcagcagctacctgggctatgactgcaccacagacaagtgcaatgacagaggagtgtgcaacaacaagaagcactgccactgcagcgccagctacctgcccccagactgcagcgtgcagagcgacctgtggccaggcggcagcattgacagcggcaacttcccccctgtggccatcccagcccggctgcctgagcggcgctacatcgagaacatctaccacagcaagcccatgcgctggcccttcttcctgttcatccccttcttcatcatcttctgtgtgctgattgccatcatggtgaaggtgaacttccagaggaagaagtggaggacagaggactacagcagtgatgagcagcctgagagcgagagcgagcccaagggctag

SEQ ID NO: 142598 - DNA, 2151 bp, synthetic construct
  misc_feature 1..2151: note = Description of Artificial Sequence: Synthetic coding sequence
  source 1..2151: mol_type = other DNA
atgtggagggtgctcttcctgctgagcggcctgggcggcctgaggatggacagcaactttgacagcctgcctgtgcagatcaccgtgcctgagaagatccgcagcatcatcaaggagggcatcgagagccaggccagctacaagatcgtgattgagggcaagccctacacagtgaacctgatgcagaagaacttcctgccccacaacttccgggtgtacagctacagcggcaccggcatcatgaagcccctggaccaggacttccagaacttctgccactaccagggctacatcgagggctaccccaagtctgtggtgatggtgtccacctgcaccggcctgcggggcgtgctgcagtttgaaaatgtgtcctatggaattgagcccctggagagctctgtgggctttgagcacgtgatctaccaggtgaagcacaagaaggcagatgtgtccctgtacaatgagaaggacatcgagagccgggacctgtccttcaagctgcagagcgtggagtacaaccacatgggcagtgacaccaccgtggtggcccagaaggtgttccagctgattggcctgaccaatgccatctttgtgtccttcaacatcaccatcatcctgagcagcctggagctgtggattgatgagaacaagatcgccaccactggagaggccaatgagctgctgcacaccttcctgcgctggaagaccagctacctggtgctgcggccccatgatgtggccttcctgctggtgtaccgggagaagagcaactacgtgggcgccaccttccagggcaagatgtgtgatgccaactatgctgggggcgtggtgctgcaccccaggaccatcagcctggagagcctggccgtcatcctggcccagctgctgagcctgtccatgggcatcacctatgatgacatcaacaagtgccagtgcagcggggctgtgtgcatcatgaaccctgaggccatccacttctctggagtgaagatcttcagcaactgcagctttgaggactttgcccacttcatcagcaagcagaagagccagtgcctgcacaaccagccccggctggaccccttcttcaagcagcaggccgtgtgtggaaatgccaagctggaggccggggaggagtgtgactgtggcacagagcaggactgtgccctgattggagagacctgctgtgacatcgccacctgccgcttcaaggccggcagcaactgtgccgagggcccctgctgtgagaactgcctcttcatgagcaaggagaggatgtgccggcccagctttgaggagtgtgacctgcctgagtactgcaatggcagcagcgccagctgcccagagaaccactacgtgcagacaggccacccctgtggcctgaaccagtggatctgcattgatggagtgtgcatgtctggggacaagcagtgcacagacaccttcggcaaggaggtggagtttggccccagcgagtgctacagccacctgaacagcaagacagatgtgtctggcaactgtggcatcagtgacagcggctacacccagtgtgaggccgacaacctgcagtgtgggaagctgatctgcaagtatgtgggcaagttcctgctgcagatcccccgggccaccatcatctatgccaacatcagcggccacctgtgcatcgctgtggagtttgccagtgaccatgctgacagccagaagatgtggatcaaggatggcaccagctgtggcagcaacaaggtgtgcaggaaccagagatgtgtgagcagcagctacctgggctatgactgcaccacagacaagtgcaatgaccggggcgtgtgcaacaacaagaagcactgccactgcagcgccagctacctgcccccagactgcagcgtgcagagcgacctgtggccaggcggcagcattgattctggcaacttcccccctgtggccatcccagcccggctgcctgagcggcgctacatcgagaacatctaccacagcaagcccatgcgctggcccttcttcctgttcatccccttcttcatcatcttctgtgtgctgattgccatcatggtgaaggtgaacttccagaggaagaagtggaggacagaggactacagcagtgatgagcagcctgagagcgagagcgagcccaagggctag

SEQ ID NO: 142599 - DNA, 2331 bp, synthetic construct
  misc_feature 1..2331: note = Description of Artificial Sequence: Synthetic coding sequence
  source 1..2331: mol_type = other DNA
atggtgcagctgcaccaggacacagacccccagatccccaagggccagccctgcaccctgaacagcagcgagggcggggcccggcctgctgtgccccacaccctcttcagcagcgccctggaccgctggctgcacaatgacagcttcatcatggctgtgggggagcccctggtgcacatccgggtgaccctgctgctgctgtggtttggcatgttcctgagcatcagcggccacagccaggcccggcccagccagtacttcaccagccctgaggtggtgatccccctgaaggtgatcagccggggccgcggggccaaggcccctggctggctgagctacagcctgcgctttggaggccagcgctacatcgtgcacatgagggtgaacaagctgctgtttgctgcccacctgcccgtcttcacctacacagagcagcacgccctgctgcaggaccagcccttcatccaggatgactgctactaccacggctacgtggagggcgtgcctgagagcctggtggccctgagcacctgcagcggcggcttcctgggcatgctgcagatcaatgacctggtgtatgagatcaagcccatctctgtgtctgccacctttgagcacctggtgtacaagattgacagtgatgacacccagtttcctcccatgagatgtggcctgacagaggagaagatcgcccaccagatggagctgcagctgagctacaacttcaccctgaagcagagcagctttgtgggctggtggacccaccagagatttgtggagctggtggtggtggtggacaacatccgctacctgttcagccagagcaatgccaccaccgtgcagcacgaggtgttcaacgtggtgaacatcgtggacagcttctaccaccccctggaggtggatgtgatcctgactggaattgacatctggacagccagcaaccccctgcccaccagcggggacctggacaacgtgctggaggacttcagcatctggaagaactacaacctgaacaaccggctgcagcatgatgtggcccacctgttcatcaaggacacccagggcatgaagctgggcgtggcctacgtgaagggcatctgccagaaccccttcaacacaggagtggatgtgtttgaggacaaccggctggtggtgtttgccatcaccctgggccacgagctgggccacaacctgggcatgcagcacgacacccagtggtgtgtgtgtgagctgcagtggtgcatcatgcacgcctacaggaaggtgaccaccaagttcagcaactgcagctatgcccagtactgggacagcaccatcagcagcggcctgtgcatccagcccccaccctacccaggcaacatcttccggctgaagtactgcggcaacctggtggtggaggagggggaggagtgtgactgtggcaccatccggcagtgtgccaaggacccctgctgcctgctgaactgcaccctgcaccctggagctgcctgtgccttcggcatctgctgcaaggactgcaagttcctgcccagcggcaccctgtgccggcagcaggtgggagaatgtgacctgcctgagtggtgcaatggcaccagccaccagtgcccagatgatgtgtatgtgcaggacggcatcagctgcaatgtgaatgccttctgctatgagaagacctgcaacaaccacgacatccagtgcaaggagatcttcggccaggatgcccggagcgccagccagagctgctaccaggagatcaacacccagggcaacagatttggccactgcggcatcgtgggcaccacctacgtgaagtgctggaccccagacatcatgtgtggccgggtgcagtgtgaaaatgtgggcgtcatccccaacctgattgagcacagcacagtgcagcagttccacctgaatgacaccacctgctggggcacagactaccacctgggcatggccatcccagacattggagaggtgaaggatggcaccgtgtgtggccctgagaagatctgcatcaggaagaagtgtgcctccatggtgcacctgagccaggcctgccagcccaagacctgcaacatgaggggcatctgcaacaacaagcagcactgccactgcaaccacgagtgggccccaccctactgcaaggacaagggctacggcggcagcgctgacagcggccccccacccaagaacaacatggagggcctgaatgtgatgggcaagctgcgctacctgagcctgctgtgcctgctgcccctggtggccttcctgctcttctgcctgcacgtgctcttcaagaagaggaccaagagcaaggaggatgaggagggctag

SEQ ID NO: 142600 - DNA, 2169 bp, synthetic construct
  misc_feature 1..2169: note = Description of Artificial Sequence: Synthetic coding sequence
  source 1..2169: mol_type = other DNA
atggctgtggatggcaccctggtgtacatccgggtgaccctgctgctgctgtggctgggcgtcttcctgagcatcagcggctactgccaggccggccccagccagcacttcaccagccctgaggtggtgatccccctgaaggtgatcagccggggccgcagcgccaaggcccctggctggctgagctacagcctgcgctttggaggccagaagcacgtggtgcacatgagggtgaagaagctgctggtgagccgccacctgcccgtcttcacctacacagatgaccgggccctgctggaggaccagctgttcatcccagatgactgctactaccacggctacgtggaggccgcccctgagagcctggtggtgttcagcgcctgctttggaggcttccggggcgtgctgaagatcagcggcctgacctatgaaattgagcccatccgccacagcgccacctttgagcacctggtgtacaagatcaacagcaatgagacccagtttcctgccatgagatgtggcctgacagagaaggaggtggcccggcagcagctggagtttgaggaggctgaaaattctgccctggagcccaagtctgctggggactggtggacccacgcctggttcctggagctggtggtggtggtgaaccacgacttcttcatctacagccagagcaacatcagcaaggtgcaggaggatgtgttcctggtggtgaacatcgtggacagcatgtacaagcagctgggcacctacatcatcctgattggcatcgagatctggaaccagggcaatgtgttccccatgaccagcattgagcaggtgctgaatgacttcagccagtggaagcagatcagcctgagccagctgcagcatgatgctgcccacatgttcatcaagaacagcctcatcagcatcctgggcctggcctacgtggccggcatctgccggccccccatcgactgtggggtggacaacttccagggcgacacctggagcctgtttgccaacacagtggcccacgagctgggccacaccctgggcatgcagcatgatgaggagttctgcttctgtggggagcggggctgcatcatgaacaccttccgggtgcctgctgagaagttcaccaactgcagctatgctgacttcatgaagaccaccctgaaccagggcagctgcctgcacaaccccccccggctgggggagatcttcatgctgaagagatgtggaaatggagtggtggagcgggaggagcagtgtgactgtggctctgtgcagcagtgtgagcaggatgcctgctgcctgctgaactgcaccctgcggcctggggccgcctgtgccttcggcctgtgctgcaaggactgcaagttcatgcccagcggggagctgtgccggcaggaggtgaatgaatgtgacctgcctgagtggtgcaatggcaccagccaccagtgcccagaggacagatatgtgcaggacggcatcccctgcagcgacagcgcctactgctaccagaagcgctgcaacaaccacgaccagcactgccgggagatctttgggaaggatgccaagagcgccagccagaactgctacaaggagatcaacagccagggcaaccgcttcggccactgcggcatcaatggcaccacctacctgaagtgccacatcagtgatgtgttctgtggccgggtgcagtgtgaaaatgtgcgggacatccccctgctgcaggaccacttcaccctgcagcacacccacatcaacggggtgacctgctggggcatcgactaccacctgaggatgaacatcagtgacatcggggaggtgaaggatggcaccgtgtgtggccctgggaagatctgcatccacaagaagtgtgtgtccctgtctgtgctgagccacgtgtgcctgcctgagacctgcaacatgaagggcatctgcaacaacaagcaccactgccactgcggctacggctggagccccccctactgccagcaccggggctatggaggcagcattgattctggccctgccagcgccaagaggggcgtcttcctgcccctgattgtcatccccagcctgtctgtgctgaccttcctgttcaccgtgggcctgctgatgtacctgcggcagtgcagcggccccaaggagaccaaggcccacagcagtggatag

SEQ ID NO: 142601 - DNA, 2721 bp, synthetic construct
  misc_feature 1..2721: note = Description of Artificial Sequence: Synthetic coding sequence
  source 1..2721: mol_type = other DNA
atgcaggccgctgtggccgtgtctgtgcccttcctgctgctgtgtgtgctgggcacctgccccccagcccgctgtggccaggccggagatgccagcctgatggagctggagaagaggaaagaaaatagatttgtggagcggcagagcatcgtgcccctgcggctcatctacagaagtggaggagaagatgagagcagacatgatgccctggacaccagggtgcggggggacctgggcggcccccagctgacccacgtggaccaggccagcttccaggtggatgccttcggcaccagcttcatcctggatgtggtgctgaaccacgacctgctgagcagcgagtacatcgagcggcacatcgagcacggcggcaagacagtggaggtgaagggcggggagcactgctactaccagggccacatccggggcaacccagacagctttgtggccctgagcacctgccacggcctgcacggcatgttttatgatggcaaccacacctacctgattgagcctgaggagaatgacaccacccaggaggacttccacttccacagcgtgtacaagagccggctgtttgagttcagcctggatgacctgcccagcgagttccagcaggtgaacatcacccccagcaagttcatcctgaagccccggcccaagaggagcaagaggcagctgcggcgctaccccagaaatgtggaggaggagaccaagtacatcgagctgatgattgtgaatgaccacctgatgttcaagaagcaccggctgtctgtggtgcacaccaacacctacgccaagtctgtggtgaacatggctgacctgatctacaaggaccagctgaagaccagaattgtgctggtggccatggagacctgggccacagacaacaagtttgccatcagcgagaaccccctcatcaccctgcgggagttcatgaagtaccgccgggacttcatcaaggagaagagtgatgctgtgcacctgttcagcggcagccagtttgagagcagccgcagcggggccgcctacatcggcggcatctgcagcctgctgaagggcggcggcgtgaatgaatttgggaagacagacctgatggctgtgaccctggcccagagcctggcccacaacatcggcatcatcagtgacaagaggaagctggccagcggagaatgtaaatgtgaggacacctggagcggctgcatcatgggagacaccggctactacctgcccaagaagttcacccagtgcaacatcgaggagtaccatgacttcctgaacagcggcggcggggcctgcctcttcaacaagcccagcaagctgctggaccccccagaatgtggaaatggcttcatcgagaccggggaggagtgtgactgtggcaccccagcagaatgtgtgctggagggcgctgagtgctgcaagaagtgcaccctgacccaggacagccagtgcagtgatggcctgtgctgcaagaagtgcaagttccagcccatgggcaccgtgtgccgggaggccgtgaatgactgtgacatccgggagacctgcagcggcaacagcagccagtgtgcccccaacatccacaagatggatggctacagctgtgatggagtgcagggcatctgctttggaggccgctgcaagacccgggaccggcagtgcaagtacatctggggccagaaggtgacagccagtgacaagtactgctatgagaagctgaacatcgagggcacagagaagggcaactgtgggaaggacaaggacacctggatccagtgcaacaagagagatgtgctgtgtggctacctgctgtgcaccaacatcggcaacatcccccggctgggggagctggatggagagatcaccagcaccctggtggtgcagcagggccgcaccctgaactgcagcggcggccacgtgaagctggaggaggatgtggacctgggctacgtggaggatggcaccccctgtggcccccagatgatgtgcctggagcaccgctgcctgcctgtggccagcttcaacttcagcacctgcctgagcagcaaggagggcaccatctgcagcggaaatggagtgtgcagcaatgagctgaagtgtgtgtgcaacagacactggattggaagtgactgcaacacctacttcccccacaatgatgatgccaagacaggcatcaccctgtctggaaatggagtggccggcaccaacatcatcatcggcatcatcgccggcaccatcctggtgctggccctgatcctgggcatcacagcctggggctacaagaactaccgggagcagaggcagctgccccagggcgactatgtgaagaagccaggagatggagacagcttctacagcgacatccccccaggagtgtccaccaacagcgccagcagcagcaagaagaggagcaatggcctgagccacagctggagcgagcgcatcccagacaccaagcacatcagtgacatctgtgaaaatggccggcccaggagcaacagctggcagggcaacctgggcggcaacaagaagaagatccggggcaagcgcttccggcccaggagcaacagcacagagaccctgagccctgccaagagccccagcagcagcacaggcagcatcgccagcagcaggaagtacccctaccccatgccacccctgcctgatgaggacaagaaggtgaaccggcagagcgcccggctgtgggagaccagcatctag

SEQ ID NO: 142602 - DNA, 2700 bp, synthetic construct
  misc_feature 1..2700: note = Description of Artificial Sequence: Synthetic coding sequence
  source 1..2700: mol_type = other DNA
atgcaggccgctgtggccgtgtctgtgcccttcctgctgctgtgtgtgctgggcacctgccccccagcccgctgtggccaggccggagatgccagcctgatggagctggagaagaggaaagaaaatagatttgtggagcggcagagcatcgtgcccctgcggctcatctacagaagtggaggagaagatgagagcagacatgatgccctggacaccagggtgcggggggacctgggcggcccccagctgacccacgtggaccaggccagcttccaggtggatgccttcggcaccagcttcatcctggatgtggtgctgaaccacgacctgctgagcagcgagtacatcgagcggcacatcgagcacggcggcaagacagtggaggtgaagggcggggagcactgctactaccagggccacatccggggcaacccagacagctttgtggccctgagcacctgccacggcctgcacggcatgttttatgatggcaaccacacctacctgattgagcctgaggagaatgacaccacccaggaggacttccacttccacagcgtgtacaagagccggctgtttgagttcagcctggatgacctgcccagcgagttccagcaggtgaacatcacccccagcaagttcatcctgaagccccggcccaagaggagcaagaggcagctgcggcgctaccccagaaatgtggaggaggagaccaagtacatcgagctgatgattgtgaatgaccacctgatgttcaagaagcaccggctgtctgtggtgcacaccaacacctacgccaagtctgtggtgaacatggctgacctgatctacaaggaccagctgaagaccagaattgtgctggtggccatggagacctgggccacagacaacaagtttgccatcagcgagaaccccctcatcaccctgcgggagttcatgaagtaccgccgggacttcatcaaggagaagagtgatgctgtgcacctgttcagcggcagccagtttgagagcagccgcagcggggccgcctacatcggcggcatctgcagcctgctgaagggcggcggcgtgaatgaatttgggaagacagacctgatggctgtgaccctggcccagagcctggcccacaacatcggcatcatcagtgacaagaggaagctggccagcggagaatgtaaatgtgaggacacctggagcggctgcatcatgggagacaccggctactacctgcccaagaagttcacccagtgcaacatcgaggagtaccatgacttcctgaacagcggcggcggggcctgcctcttcaacaagcccagcaagctgctggaccccccagaatgtggaaatggcttcatcgagaccggggaggagtgtgactgtggcaccccagcagaatgtgtgctggagggcgctgagtgctgcaagaagtgcaccctgacccaggacagccagtgcagtgatggcctgtgctgcaagaagtgcaagttccagcccatgggcaccgtgtgccgggaggccgtgaatgactgtgacatccgggagacctgcagcggcaacagcagccagtgtgcccccaacatccacaagatggatggctacagctgtgatggagtgcagggcatctgctttggaggccgctgcaagacccgggaccggcagtgcaagtacatctggggccagaaggtgacagccagtgacaagtactgctatgagaagctgaacatcgagggcacagagaagggcaactgtgggaaggacaaggacacctggatccagtgcaacaagagagatgtgctgtgtggctacctgctgtgcaccaacatcggcaacatcccccggctgggggagctggatggagagatcaccagcaccctggtggtgcagcagggccgcaccctgaactgcagcggcggccacgtgaagctggaggaggatgtggacctgggctacgtggaggatggcaccccctgtggcccccagatgatgtgcctggagcaccgctgcctgcctgtggccagcttcaacttcagcacctgcctgagcagcaaggagggcaccatctgcagcggaaatggagtgtgcagcaatgagctgaagtgtgtgtgcaacagacactggattggaagtgactgcaacacctacttcccccacaatgatgatgccaagacaggcatcaccctgtctggaaatggagtggccggcaccaacatcatcatcggcatcatcgccggcaccatcctggtgctggccctgatcctgggcatcacagcctggggctacaacaacatcttcaacttccgcagcaatggcctgagccacagctggagcgagcgcatcccagacaccaagcacatcagtgacatctgtgaaaatggccggcccaggagcaacagctggcagggcaacctgggcggcaacaagaagaagatccggggcaagcgcttccggcccaggagcaacagcacagagtacctgaacccctggttcaagagggactacaacgtggccaagtgggtggaggatgtgaacaagaacacagagggcccctacttccgcaccctgagccctgccaagagccccagcagcagcacaggcagcatcgccagcagcaggaagtacccctaccccatgccacccctgcctgatgaggacaagaaggtgaaccggcagagcgcccggctgtgggagaccagcatctag

SEQ ID NO: 142603 - DNA, 2580 bp, synthetic construct
  misc_feature 1..2580: note = Description of Artificial Sequence: Synthetic coding sequence
  source 1..2580: mol_type = other DNA
atgcaggccgctgtggccgtgtctgtgcccttcctgctgctgtgtgtgctgggcacctgccccccagcccgctgtggccaggccggagatgccagcctgatggagctggagaagaggaaagaaaatagatttgtggagcggcagagcatcgtgcccctgcggctcatctacagaagtggaggagaagatgagagcagacatgatgccctggacaccagggtgcggggggacctgggcggcccccagctgacccacgtggaccaggccagcttccaggtggatgccttcggcaccagcttcatcctggatgtggtgctgaaccacgacctgctgagcagcgagtacatcgagcggcacatcgagcacggcggcaagacagtggaggtgaagggcggggagcactgctactaccagggccacatccggggcaacccagacagctttgtggccctgagcacctgccacggcctgcacggcatgttttatgatggcaaccacacctacctgattgagcctgaggagaatgacaccacccaggaggacttccacttccacagcgtgtacaagagccggctgtttgagttcagcctggatgacctgcccagcgagttccagcaggtgaacatcacccccagcaagttcatcctgaagccccggcccaagaggagcaagaggcagctgcggcgctaccccagaaatgtggaggaggagaccaagtacatcgagctgatgattgtgaatgaccacctgatgttcaagaagcaccggctgtctgtggtgcacaccaacacctacgccaagtctgtggtgaacatggctgacctgatctacaaggaccagctgaagaccagaattgtgctggtggccatggagacctgggccacagacaacaagtttgccatcagcgagaaccccctcatcaccctgcgggagttcatgaagtaccgccgggacttcatcaaggagaagagtgatgctgtgcacctgttcagcggcagccagtttgagagcagccgcagcggggccgcctacatcggcggcatctgcagcctgctgaagggcggcggcgtgaatgaatttgggaagacagacctgatggctgtgaccctggcccagagcctggcccacaacatcggcatcatcagtgacaagaggaagctggccagcggagaatgtaaatgtgaggacacctggagcggctgcatcatgggagacaccggctactacctgcccaagaagttcacccagtgcaacatcgaggagtaccatgacttcctgaacagcggcggcggggcctgcctcttcaacaagcccagcaagctgctggaccccccagaatgtggaaatggcttcatcgagaccggggaggagtgtgactgtggcaccccagcagaatgtgtgctggagggcgctgagtgctgcaagaagtgcaccctgacccaggacagccagtgcagtgatggcctgtgctgcaagaagtgcaagttccagcccatgggcaccgtgtgccgggaggccgtgaatgactgtgacatccgggagacctgcagcggcaacagcagccagtgtgcccccaacatccacaagatggatggctacagctgtgatggagtgcagggcatctgctttggaggccgctgcaagacccgggaccggcagtgcaagtacatctggggccagaaggtgacagccagtgacaagtactgctatgagaagctgaacatcgagggcacagagaagggcaactgtgggaaggacaaggacacctggatccagtgcaacaagagagatgtgctgtgtggctacctgctgtgcaccaacatcggcaacatcccccggctgggggagctggatggagagatcaccagcaccctggtggtgcagcagggccgcaccctgaactgcagcggcggccacgtgaagctggaggaggatgtggacctgggctacgtggaggatggcaccccctgtggcccccagatgatgtgcctggagcaccgctgcctgcctgtggccagcttcaacttcagcacctgcctgagcagcaaggagggcaccatctgcagcggaaatggagtgtgcagcaatgagctgaagtgtgtgtgcaacagacactggattggaagtgactgcaacacctacttcccccacaatgatgatgccaagacaggcatcaccctgtctggaaatggagtggccggcaccaacatcatcatcggcatcatcgccggcaccatcctggtgctggccctgatcctgggcatcacagcctggggctacaagaactaccgggagcagaggcagctgccccagggcgactatgtgaagaagccaggagatggagacagcttctacagcgacatccccccaggagtgtccaccaacagcgccagcagcagcaagaagaggagcaatggcctgagccacagctggagcgagcgcatcccagacaccaagcacatcagtgacatctgtgaaaatggccggcccaggagcaacagctggcagggcaacctgggcggcaacaagaagaagatccggggcaagcgcttccggcccaggagcaacagcacagaatag

SEQ ID NO: 142604 - DNA, 2613 bp, synthetic construct
  misc_feature 1..2613: note = Description of Artificial Sequence: Synthetic coding sequence
  source 1..2613: mol_type = other DNA
atgcaggccgctgtggccgtgtctgtgcccttcctgctgctgtgtgtgctgggcacctgccccccagcccgctgtggccaggccggagatgccagcctgatggagctggagaagaggaaagaaaatagatttgtggagcggcagagcatcgtgcccctgcggctcatctacagaagtggaggagaagatgagagcagacatgatgccctggacaccagggtgcggggggacctgggcggcccccagctgacccacgtggaccaggccagcttccaggtggatgccttcggcaccagcttcatcctggatgtggtgctgaaccacgacctgctgagcagcgagtacatcgagcggcacatcgagcacggcggcaagacagtggaggtgaagggcggggagcactgctactaccagggccacatccggggcaacccagacagctttgtggccctgagcacctgccacggcctgcacggcatgttttatgatggcaaccacacctacctgattgagcctgaggagaatgacaccacccaggaggacttccacttccacagcgtgtacaagagccggctgtttgagttcagcctggatgacctgcccagcgagttccagcaggtgaacatcacccccagcaagttcatcctgaagccccggcccaagaggagcaagaggcagctgcggcgctaccccagaaatgtggaggaggagaccaagtacatcgagctgatgattgtgaatgaccacctgatgttcaagaagcaccggctgtctgtggtgcacaccaacacctacgccaagtctgtggtgaacatggctgacctgatctacaaggaccagctgaagaccagaattgtgctggtggccatggagacctgggccacagacaacaagtttgccatcagcgagaaccccctcatcaccctgcgggagttcatgaagtaccgccgggacttcatcaaggagaagagtgatgctgtgcacctgttcagcggcagccagtttgagagcagccgcagcggggccgcctacatcggcggcatctgcagcctgctgaagggcggcggcgtgaatgaatttgggaagacagacctgatggctgtgaccctggcccagagcctggcccacaacatcggcatcatcagtgacaagaggaagctggccagcggagaatgtaaatgtgaggacacctggagcggctgcatcatgggagacaccggctactacctgcccaagaagttcacccagtgcaacatcgaggagtaccatgacttcctgaacagcggcggcggggcctgcctcttcaacaagcccagcaagctgctggaccccccagaatgtggaaatggcttcatcgagaccggggaggagtgtgactgtggcaccccagcagaatgtgtgctggagggcgctgagtgctgcaagaagtgcaccctgacccaggacagccagtgcagtgatggcctgtgctgcaagaagtgcaagttccagcccatgggcaccgtgtgccgggaggccgtgaatgactgtgacatccgggagacctgcagcggcaacagcagccagtgtgcccccaacatccacaagatggatggctacagctgtgatggagtgcagggcatctgctttggaggccgctgcaagacccgggaccggcagtgcaagtacatctggggccagaaggtgacagccagtgacaagtactgctatgagaagctgaacatcgagggcacagagaagggcaactgtgggaaggacaaggacacctggatccagtgcaacaagagagatgtgctgtgtggctacctgctgtgcaccaacatcggcaacatcccccggctgggggagctggatggagagatcaccagcaccctggtggtgcagcagggccgcaccctgaactgcagcggcggccacgtgaagctggaggaggatgtggacctgggctacgtggaggatggcaccccctgtggcccccagatgatgtgcctggagcaccgctgcctgcctgtggccagcttcaacttcagcacctgcctgagcagcaaggagggcaccatctgcagcggaaatggagtgtgcagcaatgagctgaagtgtgtgtgcaacagacactggattggaagtgactgcaacacctacttcccccacaatgatgatgccaagacaggcatcaccctgtctggaaatggagtggccggcaccaacatcatcatcggcatcatcgccggcaccatcctggtgctggccctgatcctgggcatcacagcctggggctacaagaactaccgggagcagaggagcaatggcctgagccacagctggagcgagcgcatcccagacaccaagcacatcagtgacatctgtgaaaatggccggcccaggagcaacagctggcagggcaacctgggcggcaacaagaagaagatccggggcaagcgcttccggcccaggagcaacagcacagagaccctgagccctgccaagagccccagcagcagcacaggcagcatcgccagcagcaggaagtacccctaccccatgccacccctgcctgatgaggacaagaaggtgaaccggcagagcgcccggctgtgggagaccagcatctag

SEQ ID NO: 142605 - DNA, 2700 bp, synthetic construct
  misc_feature 1..2700: note = Description of Artificial Sequence: Synthetic coding sequence
  source 1..2700: mol_type = other DNA
atgcaggccgctgtggccgtgtctgtgcccttcctgctgctgtgtgtgctgggcacctgccccccagcccgctgtggccaggccggagatgccagcctgatggagctggagaagaggaaagaaaatagatttgtggagcggcagagcatcgtgcccctgcggctcatctacagaagtggaggagaagatgagagcagacatgatgccctggacaccagggtgcggggggacctgggcggcccccagctgacccacgtggaccaggccagcttccaggtggatgccttcggcaccagcttcatcctggatgtggtgctgaaccacgacctgctgagcagcgagtacatcgagcggcacatcgagcacggcggcaagacagtggaggtgaagggcggggagcactgctactaccagggccacatccggggcaacccagacagctttgtggccctgagcacctgccacggcctgcacggcatgttttatgatggcaaccacacctacctgattgagcctgaggagaatgacaccacccaggaggacttccacttccacagcgtgtacaagagccggctgtttgagttcagcctggatgacctgcccagcgagttccagcaggtgaacatcacccccagcaagttcatcctgaagccccggcccaagaggagcaagaggcagctgcggcgctaccccagaaatgtggaggaggagaccaagtacatcgagctgatgattgtgaatgaccacctgatgttcaagaagcaccggctgtctgtggtgcacaccaacacctacgccaagtctgtggtgaacatggctgacctgatctacaaggaccagctgaagaccagaattgtgctggtggccatggagacctgggccacagacaacaagtttgccatcagcgagaaccccctcatcaccctgcgggagttcatgaagtaccgccgggacttcatcaaggagaagagtgatgctgtgcacctgttcagcggcagccagtttgagagcagccgcagcggggccgcctacatcggcggcatctgcagcctgctgaagggcggcggcgtgaatgaatttgggaagacagacctgatggctgtgaccctggcccagagcctggcccacaacatcggcatcatcagtgacaagaggaagctggccagcggagaatgtaaatgtgaggacacctggagcggctgcatcatgggagacaccggctactacctgcccaagaagttcacccagtgcaacatcgaggagtaccatgacttcctgaacagcggcggcggggcctgcctcttcaacaagcccagcaagctgctggaccccccagaatgtggaaatggcttcatcgagaccggggaggagtgtgactgtggcaccccagcagaatgtgtgctggagggcgctgagtgctgcaagaagtgcaccctgacccaggacagccagtgcagtgatggcctgtgctgcaagaagtgcaagttccagcccatgggcaccgtgtgccgggaggccgtgaatgactgtgacatccgggagacctgcagcggcaacagcagccagtgtgcccccaacatccacaagatggatggctacagctgtgatggagtgcagggcatctgctttggaggccgctgcaagacccgggaccggcagtgcaagtacatctggggccagaaggtgacagccagtgacaagtactgctatgagaagctgaacatcgagggcacagagaagggcaactgtgggaaggacaaggacacctggatccagtgcaacaagagagatgtgctgtgtggctacctgctgtgcaccaacatcggcaacatcccccggctgggggagctggatggagagatcaccagcaccctggtggtgcagcagggccgcaccctgaactgcagcggcggccacgtgaagctggaggaggatgtggacctgggctacgtggaggatggcaccccctgtggcccccagatgatgtgcctggagcaccgctgcctgcctgtggccagcttcaacttcagcacctgcctgagcagcaaggagggcaccatctgcagcggaaatggagtgtgcagcaatgagctgaagtgtgtgtgcaacagacactggattggaagtgactgcaacacctacttcccccacaatgatgatgccaagacaggcatcaccctgtctggaaatggagtggccggcaccaacatcatcatcggcatcatcgccggcaccatcctggtgctggccctgatcctgggcatcacagcctggggctacaagaactaccgggagcagaggagcaatggcctgagccacagctggagcgagcgcatcccagacaccaagcacatcagtgacatctgtgaaaatggccggcccaggagcaacagctggcagggcaacctgggcggcaacaagaagaagatccggggcaagcgcttccggcccaggagcaacagcacagagtacctgaacccctggttcaagagggactacaacgtggccaagtgggtggaggatgtgaacaagaacacagagggcccctacttccgcaccctgagccctgccaagagccccagcagcagcacaggcagcatcgccagcagcaggaagtacccctaccccatgccacccctgcctgatgaggacaagaaggtgaaccggcagagcgcccggctgtgggagaccagcatctag

SEQ ID NO: 142606 - DNA, 2328 bp, synthetic construct
  misc_feature 1..2328: note = Description of Artificial Sequence: Synthetic coding sequence
  source 1..2328: mol_type = other DNA
atgctgcagggcctgctgcctgtgtccctgctgctgtctgtggccgtgtctgccatcaaggagctgcccggggtgaagaagtatgaggtggtgtaccccatccggctgcaccccctgcacaagcgggaggccaaggagcctgagcagcaggagcagtttgaaacagagctgaagtacaagatgaccatcaacgggaagattgctgtgctgtacctgaagaagaacaagaacctgctggcccctggctacacagagacctactacaacagcacaggcaaggagatcaccaccagcccccagatcatggatgactgctactaccagggccacatcctgaatgagaaggtgtctgatgccagcatcagcacctgccggggcctgcggggctacttcagccagggcgaccagcgctacttcatcgagcccctgagccccatccacagagatggccaggagcacgccctcttcaagtacaacccagatgagaagaactatgacagcacctgtggcatggatggagtgctgtgggcccatgacctgcagcagaacatcgccctgcctgccaccaagctggtgaagctgaaggacaggaaggtgcaggagcacgagaagtacatcgagtactacctggtgctggacaacggggagttcaagcgctacaatgaaaaccaggatgagatcaggaagagggtgtttgagatggccaactacgtgaacatgctgtacaagaagctgaacacccacgtggccctggtgggcatggagatctggacagacaaggacaagatcaagatcaccccaaatgccagcttcaccctggagaacttcagcaagtggaggggctctgtgctgagcaggaggaagagacatgacatcgcccagctgatcacagccacagagctggccggcaccaccgtgggcctggccttcatgagcaccatgtgcagcccctacagcgtgggcgtggtgcaggaccacagcgacaacctgctgcgggtggccggcaccatggcccacgagatgggccacaactttggcatgtttcatgatgactacagctgcaagtgccccagcaccatctgtgtgatggacaaggccctgtccttctacatccccacagacttcagcagctgcagccggctgtcctatgacaagttctttgaggacaagctgagcaactgcctcttcaatgcccccctgcccacagacatcatcagcacccccatctgtggcaaccagctggtggagatgggagaggactgtgactgtggcaccagcgaggagtgcaccaacatctgctgtgatgccaagacctgcaagatcaaggccaccttccagtgtgccctgggggagtgctgtgagaagtgccagttcaagaaggccggcatggtgtgcaggcctgccaaggatgaatgtgacctgcctgagatgtgcaatggcaagagcggcaactgcccagatgaccgcttccaggtgaatggcttcccctgccaccacggcaagggccactgcctgatgggcacctgccccaccctgcaggagcagtgcacagagctgtggggccctggaacagaggtggccgacaagagctgctacaacagaaatgaaggaggcagcaaatatggctactgcagaagagtggatgacaccctcatcccctgcaaggccaatgacaccatgtgtgggaagctgttctgccagggcggcagtgacaacctgccctggaagggcagaattgtgaccttcctgacctgcaagacctttgatcctgaggacaccagccaggagatcggcatggtggccaacggcaccaagtgtggggacaacaaggtgtgcatcaatgcagaatgtgtggacatcgagaaggcctacaagagcaccaactgcagcagcaagtgcaagggccatgctgtgtgtgaccacgagctgcagtgccagtgtgaggagggctggatccccccagactgtgatgacagctctgtggtgttccacttcagcatcgtggtgggcgtgctcttccccatggccgtcatctttgtggtggtggccatggtgatccgccaccagagcagccgggagaagcagaagaaggaccagaggcccctgagcaccaccggcacccggccccacaagcagaagaggaagccccagatggtgaaggctgtgcagccccaggagatgagccagatgaagccccacgtgtatgacctgcctgtggagggcaatgagcccccagccagcttccacaaggacaccaatgccctgccccccaccgtcttcaaggacaaccctgtgtccacccccaaggacagcaaccccaaggcctag

SEQ ID NO: 142607 - DNA, 1452 bp, synthetic construct
  misc_feature 1..1452: note = Description of Artificial Sequence: Synthetic coding sequence
  source 1..1452: mol_type = other DNA
atggagatctggacagacaaggacaagatcaagatcaccccaaatgccagcttcaccctggagaacttcagcaagtggaggggctctgtgctgagcaggaggaagagacatgacatcgcccagctgatcacagccacagagctggccggcaccaccgtgggcctggccttcatgagcaccatgtgcagcccctacagcgtgggcgtggtgcaggaccacagcgacaacctgctgcgggtggccggcaccatggcccacgagatgggccacaactttggcatgtttcatgatgactacagctgcaagtgccccagcaccatctgtgtgatggacaaggccctgtccttctacatccccacagacttcagcagctgcagccggctgtcctatgacaagttctttgaggacaagctgagcaactgcctcttcaatgcccccctgcccacagacatcatcagcacccccatctgtggcaaccagctggtggagatgggagaggactgtgactgtggcaccagtgaagaatgtaccaacatctgctgtgatgccaagacctgcaagatcaaggccaccttccagtgtgccctgggggagtgctgtgagaagtgccagttcaagaaggccggcatggtgtgcaggcctgccaaggatgaatgtgacctgcctgagatgtgcaatggcaagagcggcaactgcccagatgaccgcttccaggtgaatggcttcccctgccaccacggcaagggccactgcctgatgggcacctgccccaccctgcaggagcagtgcacagagctgtggggccctggaacagaggtggccgacaagagctgctacaacagaaatgaaggaggcagcaaatatggctactgccggcgggtggatgacaccctcatcccctgcaaggccaatgacaccatgtgtgggaagctgttctgccagggcggcagtgacaacctgccctggaagggccgcatcgtgaccttcctgacctgcaagacctttgatcctgaggacaccagccaggagatcggcatggtggccaacggcaccaagtgtggggacaacaaggtgtgcatcaatgcagaatgtgtggacatcgagaaggcctacaagagcaccaactgcagcagcaaatgtaaaggacatgctgtgtgtgaccacgagctgcagtgccagtgtgaggagggctggatccccccagactgtgatgacagctctgtggtgttccggcggctgctgcactgcggctggggcgctgtgcccaatggaggccacttctgtggcggctgctacggcaacccagcccctgagctgcagaggaaggccgaggagaggtctgaggccaccatctaccactggcaccaggccacccagacagaggaggagaccccagatggcaagggctgcagcaccccaagagatgaaagtgatgaggccccctgtgtgtag

SEQ ID NO: 142608 - DNA, 1623 bp, synthetic construct
  misc_feature 1..1623: note = Description of Artificial Sequence: Synthetic coding sequence
  source 1..1623: mol_type = other DNA
atgctgcagggcctgctgcctgtgtccctgctgctgtctgtggccgtgtctgccatcaaggagctgcccggggtgaagaagtatgaggtggtgtaccccatccggctgcaccccctgcacaagcgggaggccaaggagcctgagcagcaggagcagtttgaaacagagctgaagtacaagatgaccatcaacgggaagattgctgtgctgtacctgaagaagaacaagaacctgctggcccctggctacacagagacctactacaacagcacaggcaaggagatcaccaccagcccccagatcatggatgactgctactaccagggccacatcctgaatgagaaggtgtctgatgccagcatcagcacctgccggggcctgcggggctacttcagccagggcgaccagcgctacttcatcgagcccctgagccccatccacagagatggccaggagcacgccctcttcaagtacaacccagatgagaagaactatgacagcacctgtggcatggatggagtgctgtgggcccatgacctgcagcagaacatcgccctgcctgccaccaagctggtgaagctgaaggacaggaaggtgcaggagcacgagaagtacatcgagtactacctggtgctggacaacggggagttcaagcgctacaatgaaaaccaggatgagatcaggaagagggtgtttgagatggccaactacgtgaacatgctgtacaagaagctgaacacccacgtggccctggtgggcatggagatctggacagacaaggacaagatcaagatcaccccaaatgccagcttcaccctggagaacttcagcaagtggaggggctctgtgctgagcaggaggaagagacatgacatcgcccagctgatcacagccacagagctggccggcaccaccgtgggcctggccttcatgagcaccatgtgcagcccctacagcgtgggcgtggtgcaggaccacagcgacaacctgctgcgggtggccggcaccatggcccacgagatgggccacaactttggcatgtttcatgatgactacagctgcaagtgccccagcaccatctgtgtgatggacaaggccctgtccttctacatccccacagacttcagcagctgcagccggctgtcctatgacaagttctttgaggacaagctgagcaactgcctcttcaatgcccccctgcccacagacatcatcagcacccccatctgtggcaaccagctggtggagatgggagaggactgtgactgtggcaccagcgaggagtgcaccaacatctgctgtgatgccaagacctgcaagatcaaggccaccttccagtgtgccctgggggagtgctgtgagaagtgccagttcaagaaggccggcatggtgtgcaggcctgccaaggatgaatgtgacctgcctgagatgtgcaatggcaagagcggcaactgcccagatgaccgcttccaggtgaatggcttcccctgccaccacggcaagggccactgcctgatgggcacctgccccaccctgcaggagcagtgcacagagctgtggggccctggccgccgcaccaaccccttcccctgtgcctgtgccaaggagaaccacttcagatag

SEQ ID NO: 142609 - DNA, 924 bp, synthetic construct
  misc_feature 1..924: note = Description of Artificial Sequence: Synthetic coding sequence
  source 1..924: mol_type = other DNA
atggccaactacgtgaacatgctgtacaagaagctgaacacccacgtggccctggtgggcatggagatctggacagacaaggacaagatcaagatcaccccaaatgccagcttcaccctggagaacttcagcaagtggaggggctctgtgctgagcaggaggaagagacatgacatcgcccagctgatcacagccacagagctggccggcaccaccgtgggcctggccttcatgagcaccatgtgcagcccctacagcgtgggcgtggtgcaggaccacagcgacaacctgctgcgggtggccggcaccatggcccacgagatgggccacaactttggcatgtttcatgatgactacagctgcaagtgccccagcaccatctgtgtgatggacaaggccctgtccttctacatccccacagacttcagcagctgcagccggctgtcctatgacaagttctttgaggacaagctgagcaactgcctcttcaatgcccccctgcccacagacatcatcagcacccccatctgtggcaaccagctggtggagatgggagaggactgtgactgtggcaccagtgaagaatgtaccaacatctgctgtgatgccaagacctgcaagatcaaggccaccttccagtgtgccctgggggagtgctgtgagaagtgccagttcaagaaggccggcatggtgtgcaggcctgccaaggatgaatgtgacctgcctgagatgtgcaatggcaagagcggcaactgcccagatgaccgcttccaggtgaatggcttcccctgccaccacggcaagggccactgcctgatgggcacctgccccaccctgcaggagcagtgcacagagctgtggggccctggaagaaggaccaaccccttcccctgtgcctgtgccaaggagaaccacttcagatag

SEQ ID NO: 142610 - DNA, 2463 bp, synthetic construct
  misc_feature 1..2463: note = Description of Artificial Sequence: Synthetic coding sequence
  source 1..2463: mol_type = other DNA
atgaagatgctgctgctgctgcactgcctgggcgtcttcctgagctgcagcggccacatccaggatgagcacccccagtaccacagccccccagatgtggtgattcctgtgcgcatcaccggcaccacccggggcatgaccccacctggctggctgagctacatcctgccctttggaggccagaagcacatcatccacatcaaggtgaagaagctgctcttcagcaagcacctgcctgtgttcacctacacagaccagggcgccatcctggaggaccagccctttgtgcagaacaactgctactaccacggctacgtggagggggaccctgagagcctggtgtccctgagcacctgcttcggcggcttccagggcatcctgcagatcaatgactttgcctatgagatcaagcccctggccttcagcaccacctttgagcacctggtgtacaagatggacagcgaggagaagcagttcagcaccatgaggagcggcttcatgcagaatgagatcacctgcaggatggagtttgaggagattgacaacagcacccagaagcagagcagctatgtgggctggtggatccacttcagaattgtggagatcgtggtggtgattgacaactacctgtacatccgctatgaaagaaatgacagcaagctgctggaggacctgtatgtgattgtgaacatcgtggacagcatcctggatgtgattggagtgaaggtgctgctgtttggcctggagatctggaccaacaagaacctgattgtggtggatgatgtgaggaagtctgtgcacctgtactgcaagtggaagtctgagaacatcacccccaggatgcagcacgacaccagccacctgttcaccaccctgggcctgcggggcctgagcggcatcggggccttccggggcatgtgcaccccccacaggagctgtgccatcgtgaccttcatgaacaagaccctgggcaccttcagcattgctgtggcccaccacctgggccacaacctgggcatgaaccatgatgaggacacctgccgctgcagccagccccgctgcatcatgcatgagggcaacccccccatcaccaagttcagcaactgcagctatggagacttctgggagtacacagtggagaggaccaagtgcctgctggagaccgtgcacaccaaggacatcttcaacgtgaagagatgtggaaatggagtggtggaggagggggaggagtgtgactgtggccccctgaagcactgtgccaaggacccctgctgcctgagcaactgcaccctgacagatggcagcacctgtgccttcggcctgtgctgcaaggactgcaagttcctgcccagcggcaaggtgtgcaggaaggaggtgaatgaatgtgacctgcctgagtggtgcaatggcaccagccacaagtgcccagatgacttctacgtggaggatggcatcccctgcaaggagcggggctactgctatgagaagagctgccacgacagaaatgagcagtgccgccgcatctttggagctggggccaacacagccagcgagacctgctacaaggagctgaacaccctgggggacagagtgggccactgcggcatcaagaatgccacctacatcaagtgcaacatcagtgatgtgcagtgtggccgcatccagtgtgaaaatgtgacagagatccccaacatgtctgaccacaccaccgtgcactgggcccgcttcaatgacatcatgtgctggagcacagactaccacctgggcatgaagggccctgacattggagaggtgaaggatggaacagaatgtggcatcgaccacatctgcatccaccgccactgtgtgcacatcaccatcctgaacagcaactgcagccctgccttctgcaacaagaggggcatctgcaacaacaagcaccactgccactgcaactacctgtgggacccccccaactgcctgatcaagggctacggcggctctgtggacagcggccccccacccaagaggaagaagaagaagaagttctgctacctgtgcatcctgctgctgattgtgctcttcatcctgctgtgctgcctgtaccgcctgtgcaagaagagcaagcccatcaagaagcagcaggatgtgcagacccccagcgccaaggaggaggagaagatccagaggcggccccatgagctgcccccccagagccagccctgggtgatgcccagccagagccagccccctgtgacccccagccagagccacccccaggtgatgcccagccagagccagccccctgtgacccccagccagagccagccccgggtgatgcccagccagagccagccccctgtgatgcccagccagagccacccccagctgacccccagccagagccagccccctgtgacccccagccagaggcagccccagctgatgcccagccagagccagccccctgtgacccccagctag

SEQ ID NO: 142611 - DNA, 2463 bp, synthetic construct; identical to SEQ ID NO: 142610
  misc_feature 1..2463: note = Description of Artificial Sequence: Synthetic coding sequence
  source 1..2463: mol_type = other DNA

SEQ ID NO: 142612 - DNA, 2463 bp, synthetic construct; identical to SEQ ID NO: 142610
  misc_feature 1..2463: note = Description of Artificial Sequence: Synthetic coding sequence
  source 1..2463: mol_type = other DNA

SEQ ID NO: 142613 - DNA, 135 bp, synthetic construct
  misc_feature 1..135: note = Description of Artificial Sequence: Synthetic coding sequence
  source 1..135: mol_type = other DNA
atgaagatgctgctgctgctgcactgcctgggcgtcttcctgagctgcagcggccacatccaggatgagcacccccagtaccacagccccccagatgtggtgattcctgtgcgcatcaccggcaccaccaggtag

SEQ ID NO: 142614 - DNA, 273 bp, synthetic construct
  misc_feature 1..273: note = Description of Artificial Sequence: Synthetic coding sequence
  source 1..273: mol_type = other DNA
atgaagatgctgctgctgctgcactgcctgggcgtcttcctgagctgcagcggccacatccaggatgagcacccccagtaccacagccccccagatgtggtgattcctgtgcgcatcaccggcaccacccggggcatgaccccacctggctggctgagctacatcctgccctttggaggccagaagcacatcatccacatcaaggtgaagaagctgctcttcagcaagcacctgcctgtgttcacctacacagaccagggcgccatcctgtag

SEQ ID NO: 142615 - DNA, 45 bp, synthetic construct
  misc_feature 1..45: note = Description of Artificial Sequence: Synthetic coding sequence
  source 1..45: mol_type = other DNA
atgaagatgctgctgctgctgcactgcctgggcgtcttcctgtag

SEQ ID NO: 142616 - DNA, 2463 bp, synthetic construct; identical to SEQ ID NO: 142610
  misc_feature 1..2463: note = Description of Artificial Sequence: Synthetic coding sequence
  source 1..2463: mol_type = other DNA

SEQ ID NO: 142617 - DNA, 2373 bp, synthetic construct
  misc_feature 1..2373: note = Description of Artificial Sequence: Synthetic coding sequence
  source 1..2373: mol_type = other DNA
atgaggtctgtgcagatcttcctgagccagtgccgcctgctgctgctgctggtgcccaccatgctgctgaagagcctgggggaggatgtgatcttccaccctgagggggagtttgacagctatgaggtgaccatccctgagaagctgtccttccggggggaggtgcagggcgtggtgtcccctgtgtcctacctgctgcagctgaagggcaagaagcacgtgctgcacctgtggcccaagaggctgctgctgcccaggcacctgcgggtcttctccttcacagagcacggggagctgctggaggaccacccctacatccccaaggactgcaactacatgggctctgtgaaggagagcctggacagcaaggccaccatcagcacctgcatgggcggcctgcggggcgtcttcaacattgatgccaagcactaccagatcgagcccctgaaggccagccccagctttgaacatgtggtgtacctgctgaagaaggagcagtttggaaaccaggtgtgtggcctgagtgatgatgaaattgagtggcagatggccccctatgagaacaaggcccggctgcgggacttccctggcagctacaagcaccccaagtacctggagctgatcctgctgtttgaccagagccgctacagatttgtgaacaacaacctgagccaggtgattcatgatgccatcctgctgaccggcatcatggacacctacttccaggatgtgaggatgaggatccacctgaaggccctggaggtgtggacagacttcaacaagatccgggtgggctacccagagctggccgaggtgctgggccgcttcgtcatctacaagaagtctgtgctgaatgcccggctgagcagtgactgggcccacctgtacctgcagaggaagtacaatgatgccctggcctggagctttgggaaggtgtgcagcctggagtatgccggctctgtgtccaccctgctggacaccaacatcctggccccagccacctggagcgcccacgagctgggccatgctgtgggcatgagccatgatgagcagtactgccagtgccggggccgcctgaactgcatcatgggcagcggccgcacaggcttcagcaactgcagctacatctccttcttcaagcacatcagcagcggggccacctgcctgaacaacatccctggcctgggctacgtgctgaagagatgtggcaacaagatcgtggaggacaatgaggagtgtgactgtggcagcacagaggagtgccagaaggaccgctgctgccagagcaactgcaagctgcagcccggggccaactgcagcatcggcctgtgctgccacgactgccgcttccggcccagcggctacgtgtgccggcaggagggcaatgaatgtgacctggccgagtactgtgatggcaacagcagcagctgccccaatgatgtgtacaagcaggacggcaccccctgcaagtatgagggccgctgcttcaggaagggctgccgcagccgctacatgcagtgccagagcatctttggaccagatgccatggaggcccccagtgaatgttatgatgctgtgaacctgattggagaccagtttggaaactgtgagatcaccggcatccggaacttcaagaagtgtgagagcgccaacagcatctgtggccgcctgcagtgcatcaacgtggagaccatcccagacctgcctgagcacaccaccatcatcagcacccacctgcaggccgagaacctgatgtgctggggcaccggctaccacctgtccatgaagcccatgggcatcccagacctgggcatgatcaatgatggcaccagctgtggggagggccgggtgtgcttcaagaagaactgtgtgaacagctctgtgctgcagtttgactgcctgcctgagaagtgcaacacccggggcgtgtgcaacaacaggaagaactgccactgcatgtatggctgggccccacccttctgtgaggaggtgggctacggcggcagcattgacagcggccccccaggcctgctgcggggggccatccccagcagcatctgggtggtgtccatcatcatgttccgcctcatcctgctgatcctgtctgtggtgtttgtgttcttccggcaggtgattggcaaccacctgaagcccaagcaggagaagatgcccctgagcaaggccaagacagagcaggaggagagcaagaccaagacagtgcaggaggagagcaagaccaagacaggccaggaggagagcgaggccaagacaggccaggaggagagcaaggccaagacaggccaggaggagagcaaggccaacatcgagagcaagaggcccaaggccaagtctgtgaagaagcagaagaagtag

SEQ ID NO: 142618 - DNA, 2346 bp, synthetic construct
  misc_feature 1..2346: note = Description of Artificial Sequence: Synthetic coding sequence
  source 1..2346: mol_type = other DNA
atgaggtctgtgcagatcttcctgagccagtgccgcctgctgctgctgctggtgcccaccatgctgctgaagagcctgggggaggatgtgatcttccaccctgagggggagtttgacagctatgaggtgaccatccctgagaagctgtccttccggggggaggtgcagggcgtggtgtcccctgtgtcctacctgctgcagctgaagggcaagaagcacgtgctgcacctgtggcccaagaggctgctgctgcccaggcacctgcgggtcttctccttcacagagcacggggagctgctggaggaccacccctacatccccaaggactgcaactacatgggctctgtgaaggagagcctggacagcaaggccaccatcagcacctgcatgggcggcctgcggggcgtcttcaacattgatgccaagcactaccagatcgagcccctgaaggccagccccagctttgaacatgtggtgtacctgctgaagaaggagcagtttggaaaccaggtgtgtggcctgagtgatgatgaaattgagtggcagatggccccctatgagaacaaggcccggctgcgggacttccctggcagctacaagcaccccaagtacctggagctgatcctgctgtttgaccagagccgctacagatttgtgaacaacaacctgagccaggtgattcatgatgccatcctgctgaccggcatcatggacacctacttccaggatgtgaggatgaggatccacctgaaggccctggaggtgtggacagacttcaacaagatccgggtgggctacccagagctggccgaggtgctgggccgcttcgtcatctacaagaagtctgtgctgaatgcccggctgagcagtgactgggcccacctgtacctgcagaggaagtacaatgatgccctggcctggagctttgggaaggtgtgcagcctggagtatgccggctctgtgtccaccctgctggacaccaacatcctggccccagccacctggagcgcccacgagctgggccatgctgtgggcatgagccatgatgagcagtactgccagtgccggggccgcctgaactgcatcatgggcagcggccgcacaggcttcagcaactgcagctacatctccttcttcaagcacatcagcagcggggccacctgcctgaacaacatccctggcctgggctacgtgctgaagagatgtggcaacaagatcgtggaggacaatgaggagtgtgactgtggcagcacagaggagtgccagaaggaccgctgctgccagagcaactgcaagctgcagcccggggccaactgcagcatcggcctgtgctgccacgactgccgcttccggcccagcggctacgtgtgccggcaggagggcaatgaatgtgacctggccgagtactgtgatggcaacagcagcagctgccccaatgatgtgtacaagcaggacggcaccccctgcaagtatgagggccgctgcttcaggaagggctgccgcagccgctacatgcagtgccagagcatctttggaccagatgccatggaggcccccagtgaatgttatgatgctgtgaacctgattggagaccagtttggaaactgtgagatcaccggcatccggaacttcaagaagtgtgagagcgccaacagcatctgtggccgcctgcagtgcatcaacgtggagaccatcccagacctgcctgagcacaccaccatcatcagcacccacctgcaggccgagaacctgatgtgctggggcaccggctaccacctgtccatgaagcccatgggcatcccagacctgggcatgatcaatgatggcaccagctgtggggagggccgggtgtgcttcaagaagaactgtgtgaacagctctgtgctgcagtttgactgcctgcctgagaagtgcaacacccggggcgtgtgcaacaacaggaagaactgccactgcatgtatggctgggccccacccttctgtgaggaggtgggctacggcggcagcattgacagcggccccccaggcctgctgcggggggccatccccagcagcatctgggtggtgtccatcatcatgttccgcctcatcctgctgatcctgtctgtggtgtttgtgttcttccggcaggtgattggcaaccacctgaagcccaagcaggagaagatgcccctgagcaaggccaagacagagcaggaggagagcaagaccaagacagtgcaggaggagagcaagaccaagacaggccaggaggagagcgaggccaagacaggccaggaggagagcaaggccaacatcgagagcaagaggcccaaggccaagtctgtgaagaagcagaagaagtag

SEQ ID NO: 142619 - DNA, 540 bp, synthetic construct
  misc_feature 1..540: note = Description of Artificial Sequence: Synthetic coding sequence
  source 1..540: mol_type = other DNA
atgggctggaggccccggcgggcccggggcacccccctgctgctgctgctgctgctgctgctgctgtggcctgtgcctggggccggcgtgctgcagggccacatccctggccagcctgtgaccccccactgggtgctggatggccagccctggaggacagtgtccctggaggagcctgtgtccaagccagacatgggcctggtggccctggaggccgagggccaggagctgctgctggagctggagaagaaccagctgctggcccctggctacatcgagacccactacggcccagatggccagcctgtggtgctggcccccaaccacacagtgcgctgcttccacggcctgtgggatgcccctcctgagggcagaagagaggcccggaggaccaggaagtacctggagctgtacatcgtggccgaccacaccctcttcctgaccaggcacaggaacctgaaccacaccaagcagaggctgctggaggtggccaactacgtggaccaggtggtgaacagcgctggagatgcccacggctag

SEQ ID NO: 142620 - DNA, 336 bp, synthetic construct
  misc_feature 1..336: note = Description of Artificial Sequence: Synthetic coding sequence
  source 1..336: mol_type = other DNA
atgggctggaggccccggcgggcccggggcacccccctgctgctgctgctgctgctgctgctgctgtggcctgtgcctggggccggcgtgctgcagggccacatccctggccagcctgtgaccccccactgggtgctggatggccagccctggaggacagtgtccctggaggagcctgtgtccaagccagacatgggcctggtggccctggaggccgagggccaggagctgctgctggagctggagaagaaccagctgctggcccctggctacatcgagacccactacggccctgcccaggagtgccgggacctgtgctgctttgcccacaactag

SEQ ID NO: 142621 - DNA, 2364 bp, synthetic construct
  misc_feature 1..2364: note = Description of Artificial Sequence: Synthetic coding sequence
  source 1..2364: mol_type = other DNA
atgggctggaggccccggcgggcccggggcacccccctgctgctgctgctgctgctgctgctgctgtggcctgtgcctggggccggcgtgctgcagggccacatccctggccagcctgtgaccccccactgggtgctggatggccagccctggaggacagtgtccctggaggagcctgtgtccaagccagacatgggcctggtggccctggaggccgagggccaggagctgctgctggagctggagaagaaccaccggctgctggcccctggctacatcgagacccactacggcccagatggccagcctgtggtgctggcccccaaccacacagaccactgccactaccagggccgggtgcggggcttcccagacagctgggtggtgctgtgcacctgcagcggcatgagcggcctcatcaccctgagcagaaatgccagctactacctgcggccctggccaccccggggcagcaaggacttcagcacccatgagatcttcaggatggagcagctgctgacctggaagggcacctgtggccaccgggaccccggcaacaaggccggcatgaccagcctgcccggcggcccccagagccggggccggcgggaggcccggaggaccaggaagtacctggagctgtacatcgtggccgaccacaccctcttcctgaccaggcacaggaacctgaaccacaccaagcagaggctgctggaggtggccaactacgtggaccagctgctgcggaccctggacatccaggtggccctgaccggcctggaggtgtggacagagcgggacaggagccgggtgacccaggatgccaatgccaccctgtgggccttcctgcagtggaggcggggcctgtgggcccagaggcctcatgattctgcccagctgctgaccggccgggccttccagggcgccaccgtgggcctggcccctgtggagggcatgtgcagagctgagagcagtggaggagtgtccacagaccacagcgagctgcccatcggggccgccgccaccatggcccatgaaattggccacagcctgggcctgagccatgaccctgatggctgctgcgtggaggccgctgctgagagcggcggctgtgtgatggctgctgccaccggccaccccttccccagggtcttcagcgcctgcagccggcggcagctgcgggccttcttcagaaaaggaggaggagcctgcctgagcaatgccccagaccccggcctgcctgtgcccccagccctgtgtggaaatggatttgtggaggccggggaggagtgtgactgtggccctggccaggagtgccgggacctgtgctgctttgcccacaactgcagcctgcggcctggggcccagtgtgcccatggagactgctgcgtgcgctgcctgctgaagccagctggggccctgtgccggcaggccatgggagactgtgacctgcctgagttctgcaccggcaccagcagccactgccccccagatgtgtacctgctggatggcagcccctgtgcccggggcagcggctactgctgggatggagcctgccccaccctggagcagcagtgccagcagctgtggggccctggcagccacccagcccctgaggcctgcttccaggtggtgaacagcgctggagatgcccacggcaactgtggccaggacagcgagggccacttcctgccctgtgccggcagagatgccctgtgtgggaagctgcagtgccagggcggcaagcccagcctgctggccccccacatggtgcctgtggacagcacagtgcacctggatggccaggaggtgacctgccgcggggccctggccctgcccagcgcccagctggacctgctgggcctgggcctggtggagcccggcacccagtgtggccccaggatggtgtgcaacagcaaccacaactgccactgtgcccctggctgggccccacccttctgtgacaagccaggctttggaggctccatggattctggccctgtgcaggctgaaaatcatgacaccttcctgctggccatgctgctgtctgtgctgctgcccctgctgcccggggccggcctggcctggtgctgctaccgcctgcccggggcccacctgcagcgctgctcctggggctgccggcgggaccctgcctgcagcggccccaaggatggcccccaccgggaccaccccctgggcggcgtgcaccccatggagctgggccccacagccaccggccagccctggcccctggaccctgagaacagccatgagcccagcagccaccctgagaagcccctgcctgctgtgtccccagacccccaggccgaccaggtgcagatgcccaggagctgcctgtggtag

SEQ ID NO: 142622 - DNA, 2442 bp, synthetic construct
  misc_feature 1..2442: note = Description of Artificial Sequence: Synthetic coding sequence
  source 1..2442: mol_type = other DNA
atgggctggaggccccggcgggcccggggcacccccctgctgctgctgctgctgctgctgctgctgtggcctgtgcctggggccggcgtgctgcagggccacatccctggccagcctgtgaccccccactgggtgctggatggccagccctggaggacagtgtccctggaggagcctgtgtccaagccagacatgggcctggtggccctggaggccgagggccaggagctgctgctggagctggagaagaaccaccggctgctggcccctggctacatcgagacccactacggcccagatggccagcctgtggtgctggcccccaaccacacagaccactgccactaccagggccgggtgcggggcttcccagacagctgggtggtgctgtgcacctgcagcggcatgagcggcctcatcaccctgagcagaaatgccagctactacctgcggccctggccaccccggggcagcaaggacttcagcacccatgagatcttcaggatggagcagctgctgacctggaagggcacctgtggccaccgggaccccggcaacaaggccggcatgaccagcctgcccggcggcccccagagccggggccggcgggaggcccggaggaccaggaagtacctggagctgtacatcgtggccgaccacaccctcttcctgaccaggcacaggaacctgaaccacaccaagcagaggctgctggaggtggccaactacgtggaccagctgctgcggaccctggacatccaggtggccctgaccggcctggaggtgtggacagagcgggacaggagccgggtgacccaggatgccaatgccaccctgtgggccttcctgcagtggaggcggggcctgtgggcccagaggcctcatgattctgcccagctgctgaccggccgggccttccagggcgccaccgtgggcctggcccctgtggagggcatgtgcagagctgagagcagtggaggagtgtccacagaccacagcgagctgcccatcggggccgccgccaccatggcccatgaaattggccacagcctgggcctgagccatgaccctgatggctgctgcgtggaggccgctgctgagagcggcggctgtgtgatggctgctgccaccggccaccccttccccagggtcttcagcgcctgcagccggcggcagctgcgggccttcttcagaaaaggaggaggagcctgcctgagcaatgccccagaccccggcctgcctgtgcccccagccctgtgtggaaatggatttgtggaggccggggaggagtgtgactgtggccctggccaggagtgccgggacctgtgctgctttgcccacaactgcagcctgcggcctggggcccagtgtgcccatggagactgctgcgtgcgctgcctgctgaagccagctggggccctgtgccggcaggccatgggagactgtgacctgcctgagttctgcaccggcaccagcagccactgccccccagatgtgtacctgctggatggcagcccctgtgcccggggcagcggctactgctgggatggagcctgccccaccctggagcagcagtgccagcagctgtggggccctggcagccacccagcccctgaggcctgcttccaggtggtgaacagcgctggagatgcccacggcaactgtggccaggacagcgagggccacttcctgccctgtgccggcagagatgccctgtgtgggaagctgcagtgccagggcggcaagcccagcctgctggccccccacatggtgcctgtggacagcacagtgcacctggatggccaggaggtgacctgccgcggggccctggccctgcccagcgcccagctggacctgctgggcctgggcctggtggagcccggcacccagtgtggccccaggatggtgtgccagagccgccgctgcaggaagaatgccttccaggagctgcagcgctgcctgacagcctgccacagccacggcgtgtgcaacagcaaccacaactgccactgtgcccctggctgggccccacccttctgtgacaagccaggctttggaggctccatggattctggccctgtgcaggctgaaaatcatgacaccttcctgctggccatgctgctgtctgtgctgctgcccctgctgcccggggccggcctggcctggtgctgctaccgcctgcccggggcccacctgcagcgctgctcctggggctgccggcgggaccctgcctgcagcggccccaaggatggcccccaccgggaccaccccctgggcggcgtgcaccccatggagctgggccccacagccaccggccagccctggcccctggaccctgagaacagccatgagcccagcagccaccctgagaagcccctgcctgctgtgtccccagacccccaggccgaccaggtgcagatgcccaggagctgcctgtggtag

SEQ ID NO: 142623 - DNA, 417 bp, synthetic construct
  misc_feature 1..417: note = Description of Artificial Sequence: Synthetic coding sequence
  source 1..417: mol_type = other DNA
atgggctggaggccccggcgggcccggggcacccccctgctgctgctgctgctgctgctgctgctgtggcctgtgcctggggccggcgtgctgcagggccacatccctggccagcctgtgaccccccactgggtgctggatggccagccctggaggacagtgtccctggaggagcctgtgtccaagccagacatgggcctggtggccctggaggccgagggccaggagctgctgctggagctggagaagaaccaccggctgctggcccctggctacatcgagacccactacggcccagatggccagcctgtggtgctggcccccaaccacacagtgcgctgcttccacggcctgtgggatgcccctcctgaggtgcccccccaccacagctacccctacagcagcctgcacagctag

SEQ ID NO: 142624 - DNA, 543 bp, synthetic construct
  misc_feature 1..543: note = Description of Artificial Sequence: Synthetic coding sequence
  source 1..543: mol_type = other DNA
atgggctggaggccccggcgggcccggggcacccccctgctgctgctgctgctgctgctgctgctgtggcctgtgcctggggccggcgtgctgcagggccacatccctggccagcctgtgaccccccactgggtgctggatggccagccctggaggacagtgtccctggaggagcctgtgtccaagccagacatgggcctggtggccctggaggccgagggccaggagctgctgctggagctggagaagaaccagctgctggcccctggctacatcgagacccactacggcccagatggccagcctgtggtgctggcccccaaccacacagtgcgctgcttccacggcctgtgggatgcccctcctgagggcagaagagaggcccggaggaccaggaagtacctggagctgtacatcgtggccgaccacaccctcttcctgaccaggcacaggaacctgaaccacaccaagcagaggctgctggaggtggccaactacgtggaccaggagtgccgggacctgtgctgctttgcccacaactag

SEQ ID NO: 142625 - DNA, 2439 bp, synthetic construct
  misc_feature 1..2439: note = Description of Artificial Sequence: Synthetic coding sequence
  source 1..2439: mol_type = other DNA
atgggctggaggccccggcgggcccggggcacccccctgctgctgctgctgctgctgctgctgctgtggcctgtgcctggggccggcgtgctgcagggccacatccctggccagcctgtgaccccccactgggtgctggatggccagccctggaggacagtgtccctggaggagcctgtgtccaagccagacatgggcctggtggccctggaggccgagggccaggagctgctgctggagctggagaagaaccaccggctgctggcccctggctacatcgagacccactacggcccagatggccagcctgtggtgctggcccccaaccacacagaccactgccactaccagggccgggtgcggggcttcccagacagctgggtggtgctgtgcacctgcagcggcatgagcggcctcatcaccctgagcagaaatgccagctactacctgcggccctggccaccccggggcagcaaggacttcagcacccatgagatcttcaggatggagcagctgctgacctggaagggcacctgtggccaccgggaccccggcaacaaggccggcatgaccagcctgcccggcggcccccagagccggggccggcgggaggcccggaggaccaggaagtacctggagctgtacatcgtggccgaccacaccctcttcctgaccaggcacaggaacctgaaccacaccaagcagaggctgctggaggtggccaactacgtggaccagctgctgcggaccctggacatccaggtggccctgaccggcctggaggtgtggacagagcgggacaggagccgggtgacccaggatgccaatgccaccctgtgggccttcctgcagtggaggcggggcctgtgggcccagaggcctcatgattctgcccagctgctgaccggccgggccttccagggcgccaccgtgggcctggcccctgtggagggcatgtgcagagctgagagcagtggaggagtgtccacagaccacagcgagctgcccatcggggccgccgccaccatggcccatgaaattggccacagcctgggcctgagccatgaccctgatggctgctgcgtggaggccgctgctgagagcggcggctgtgtgatggctgctgccaccggccaccccttccccagggtcttcagcgcctgcagccggcggcagctgcgggccttcttcagaaaaggaggaggagcctgcctgagcaatgccccagaccccggcctgcctgtgcccccagccctgtgtggaaatggatttgtggaggccggggaggagtgtgactgtggccctggccaggagtgccgggacctgtgctgctttgcccacaactgcagcctgcggcctggggcccagtgtgcccatggagactgctgcgtgcgctgcctgctgaagccagctggggccctgtgccggcaggccatgggagactgtgacctgcctgagttctgcaccggcaccagcagccactgccccccagatgtgtacctgctggatggcagcccctgtgcccggggcagcggctactgctgggatggagcctgccccaccctggagcagcagtgccagcagctgtggggccctggcagccacccagcccctgaggcctgcttccaggtggtgaacagcgctggagatgcccacggcaactgtggccaggacagcgagggccacttcctgccctgtgccggcagagatgccctgtgtgggaagctgcagtgccagggcggcaagcccagcctgctggccccccacatggtgcctgtggacagcacagtgcacctggatggccaggaggtgacctgccgcggggccctggccctgcccagcgcccagctggacctgctgggcctgggcctggtggagcccggcacccagtgtggccccaggatggtgtgccagagccgccgctgcaggaagaatgccttccaggagctgcagcgctgcctgacagcctgccacagccacggcgtgtgcaacagcaaccacaactgccactgtgcccctggctgggccccacccttctgtgacaagccaggctttggaggctccatggattctggccctgtgcaggctgaaaatcatgacaccttcctgctggccatgctgctgtctgtgctgctgcccctgctgcccggggccggcctggcctggtgctgctaccgcctgcccggggcccacctgcagcgctgctcctggggctgccggcgggaccctgcctgcagcggccccaaggatggcccccaccgggaccaccccctgggcggcgtgcaccccatggagctgggccccacagccaccggccagccctggcccctggaccctgagaacagccatgagcccagcagccaccctgagaagcccctgcctgctgtgtccccagacccccaggaccaggtgcagatgcccaggagctgcctgtggtag

SEQ ID NO: 142626 - DNA, 456 bp, synthetic construct
  misc_feature 1..456: note = Description of Artificial Sequence: Synthetic coding sequence
  source 1..456: mol_type = other DNA
atgggctggaggccccggcgggcccggggcacccccctgctgctgctgctgctgctgctgctgctgtggcctgtgcctggggccggcgtgctgcagggccacatccctggccagcctgtgaccccccactgggtgctggatggccagccctggaggacagtgtccctggaggagcctgtgtccaagccagacatgggcctggtggccctggaggccgagggccaggagctgctgctggagctggagaagaaccaggatgccctgtgtgggaagctgcagtgccagggcggcaagcccagcctgctggccccccacatggtgcctgtggacagcacagtgcacctggatggccaggaggtgacctgccgcggggccctggccctgcccagcgcccagctggacctgctgggcctgggcctggtggagcccggcacccagtgtggccccaggatgtag

SEQ ID NO: 142627 - DNA, 2079 bp, synthetic construct
  misc_feature 1..2079: note = Description of Artificial Sequence: Synthetic coding sequence
  source 1..2079: mol_type = other DNA
atgggctggaggccccggcgggcccggggcacccccctgctgctgctgctgctgctgctgctgctgtggcctgtgcctggggccggcgtgctgcagggccacatccctggccagcctgtgaccccccactgggtgctggatggccagccctggaggacagtgtccctggaggagcctgtgtccaagccagacatgggcctggtggccctggaggccgagggccaggagctgctgctggagctggagaagaaccaccggctgctggcccctggctacatcgagacccactacggcccagatggccagcctgtggtgctggcccccaaccacacagaccactgccactaccagggccgggtgcggggcttcccagacagctgggtggtgctgtgcacctgcagcggcatgagcggcctcatcaccctgagcagaaatgccagctactacctgcggccctggccaccccggggcagcaaggacttcagcacccatgagatcttcaggatggagcagctgctgacctggaagggcacctgtggccaccgggaccccggcaacaaggccggcatgaccagcctgcccggcggcccccagagccggggccggcgggaggcccggaggaccaggaagtacctggagctgtacatcgtggccgaccacaccctcttcctgaccaggcacaggaacctgaaccacaccaagcagaggctgctggaggtggccaactacgtggaccagctgctgcggaccctggacatccaggtggccctgaccggcctggaggtgtggacagagcgggacaggagccggcggcagctgcgggccttcttcagaaaaggaggaggagcctgcctgagcaatgccccagaccccggcctgcctgtgcccccagccctgtgtggaaatggatttgtggaggccggggaggagtgtgactgtggccctggccaggagtgccgggacctgtgctgctttgcccacaactgcagcctgcggcctggggcccagtgtgcccatggagactgctgcgtgcgctgcctgctgaagccagctggggccctgtgccggcaggccatgggagactgtgacctgcctgagttctgcaccggcaccagcagccactgccccccagatgtgtacctgctggatggcagcccctgtgcccggggcagcggctactgctgggatggagcctgccccaccctggagcagcagtgccagcagctgtggggccctggcagccacccagcccctgaggcctgcttccaggtggtgaacagcgctggagatgcccacggcaactgtggccaggacagcgagggccacttcctgccctgtgccggcagagatgccctgtgtgggaagctgcagtgccagggcggcaagcccagcctgctggccccccacatggtgcctgtggacagcacagtgcacctggatggccaggaggtgacctgccgcggggccctggccctgcccagcgcccagctggacctgctgggcctgggcctggtggagcccggcacccagtgtggccccaggatggtgtgccagagccgccgctgcaggaagaatgccttccaggagctgcagcgctgcctgacagcctgccacagccacggcgtgtgcaacagcaaccacaactgccactgtgcccctggctgggccccacccttctgtgacaagccaggctttggaggctccatggattctggccctgtgcaggctgaaaatcatgacaccttcctgctggccatgctgctgtctgtgctgctgcccctgctgcccggggccggcctggcctggtgctgctaccgcctgcccggggcccacctgcagcgctgctcctggggctgccggcgggaccctgcctgcagcggccccaaggatggcccccaccgggaccaccccctgggcggcgtgcaccccatggagctgggccccacagccaccggccagccctggcccctggaccctgagaacagccatgagcccagcagccaccctgagaagcccctgcctgctgtgtccccagacccccaggaccaggtgcagatgcccaggagctgcctgtggtag

SEQ ID NO: 142628 - DNA, 522 bp, synthetic construct
  misc_feature 1..522: note = Description of Artificial Sequence: Synthetic coding sequence
  source 1..522: mol_type = other DNA
atgggctggaggccccggcgggcccggggcacccccctgctgctgctgctgctgctgctgctgctgtggcctgtgcctggggccggcgtgctgcagggccacatccctggccagcctgtgaccccccactgggtgctggatggccagccctggaggacagtgtccctggaggagcctgtgtccaagccagacatgggcctggtggccctggaggccgagggccaggagctgctgctggagctggagaagaaccaccggctgctggcccctggctacatcgagacccactacggcccagatggccagcctgtggtgctggcccccaaccacacagtgcgctgcttccacggcctgtgggatgcccctcctgaggaccactgccactaccagggccgggtgcggggcttcccagacagctgggtggtgctgtgcacctgcagcggcatgagagctggggagaagagagctggccctggcagcacctggaactgcaccctgtggcagaccaccccctgcagctag

SEQ ID NO: 142629 - DNA, 291 bp, synthetic construct
  misc_feature 1..291: note = Description of Artificial Sequence: Synthetic coding sequence
  source 1..291: mol_type = other DNA
atgggctggaggccccggcgggcccggggcacccccctgctgctgctgctgctgctgctgctgctgtggcctgtgcctggggccggcgtgctgcagggccacatccctggccagcctgtgaccccccactgggtgctggatggccagccctggaggacagtgtccctggaggagcctgtgtccaagccagacatgggcctggtggccctggaggccgagggccaggagctgctgctggagctggagaagaaccagtttgccatcgccaccatcacagccaccgtgctgtag

SEQ ID NO: 142630 - DNA, 2265 bp, synthetic construct
  misc_feature 1..2265: note = Description of Artificial Sequence: Synthetic coding sequence
  source 1..2265: mol_type = other DNA
atgctgcccggctgcatcttcctgatgatcctgctgatcccccaggtgaaggagaagttcatcctgggcgtggagggccagcagctggtgcggcccaagaagctgcccctcatccagaagagggacaccggccacacccatgatgatgacatcctgaagacctatgaggaggagctgctgtatgagatcaagctgaacaggaagaccctggtgctgcacctgctgcggagccgggagttcctgggcagcaactacagcgagaccttctacagcatgaagggggaggccttcaccaggcacccccagatcatggaccactgcttctaccagggcagcatcgtgcatgaatatgattctgctgccagcatcagcacctgcaatggcctgcggggcttcttccgcatcaatgaccagcgctacctgattgagcctgtgaagtacagtgatgaaggagagcacctggtgttcaagtacaacctgcgggtgccctacggggccaactacagctgcacagagctgaacttcaccaggaagacagtgcctggggacaatgaaagtgaggaggacagcaagatcaagggcatccatgatgagaagtatgtggagctgttcatcgtggctgatgacacagtgtacagaagaaatggccacccccacaacaagctgaggaaccgcatctggggcatggtgaactttgtgaacatgatctacaagaccctgaacatccacgtgaccctggtgggcatcgagatctggacccatgaggacaagattgagctgtacagcaacatcgagaccaccctgctgcgcttctccttctggcaggagaagatcctgaagaccaggaaggactttgaccacgtggtgctgctgagcggcaagtggctgtacagccacgtgcagggcatctcctacccaggcggcatgtgcctgccctactacagcaccagcatcatcaaggacctgctgcctgacaccaacatcatcgccaacaggatggcccaccagctgggccacaacctgggcatgcagcatgatgagttcccctgcacctgccccagcgggaaatgtgtgatggacagtgatggcagcatcccagccctgaagttcagcaagtgcagccagaaccagtaccaccagtacctgaaggactacaagcccacctgcatgctgaacatccccttcccctacaacttccatgacttccagttctgtggcaacaagaagctggatgaaggagaagaatgtgactgtggccctgcccaggagtgcaccaacccctgctgtgatgcccacacctgtgtgctgaagccaggcttcacctgtgccgagggggagtgctgtgagagctgccagatcaagaaggccggcagcatctgcaggcctgccaaggatgaatgtgacttccctgagatgtgcaccggccacagccctgcctgccccaaggaccagttccgggtgaatggcttcccctgcaagaacagcgagggctactgcttcatgggcaaatgtcccacccgggaggaccagtgcagcgagctgtttgatgatgaggccatcgagagccatgacatctgctacaagatgaacaccaagggcaacaagtttggctactgcaagaacaaggaaaatcgcttcctgccctgtgaggagaaggatgtgcgctgtgggaagatctactgcaccggcggggagctgagcagcctgctgggggaggacaagacctaccacctgaaggacccccagaagaatgccaccgtgaagtgcaagaccatcttcctgtaccatgacagcacagacatcggcctggtggccagcggcaccaagtgtggggagggcatggtgtgcaacaacggggagtgcctgaacatggagaaggtgtacatcagcaccaactgccccagccagtgcaatgaaaatcctgtggatggccacggcctgcagtgccactgtgaggagggccaggcccctgtggcctgtgaggagaccctgcacgtgaccaacatcaccatcctggtggtggtgctggtgctggtgattgtgggcattggagtgctgatcctgctggtgcgctacaggaagtgcatcaagctgaagcaggtgcagagccccccaacagagaccctgggcgtggagaacaagggctactttggagatgagcagcagatcagaacagagcccatcctgcctgagatccacttcctgaacaagccagccagcaaggacagccggggcattgctgaccccaaccagagcgccaagtag

SEQ ID NO: 142631 - DNA, 1656 bp, synthetic construct
  misc_feature 1..1656: note = Description of Artificial Sequence: Synthetic coding sequence
  source 1..1656: mol_type = other DNA
gtgtgccccaggagctacttcctggagggccggggcagctacagcttcctgagcctcttcagcaccagccctgccccctacagaagaaatggccacccccacaacaagctgaggaaccgcatctggggcatggtgaactttgtgaacatgatctacaagaccctgaacatccacgtgaccctggtgggcatcgagatctggacccatgaggacaagattgagctgtacagcaacatcgagaccaccctgctgcgcttctccttctggcaggagaagatcctgaagaccaggaaggactttgaccacgtggtgctgctgagcggcaagtggctgtacagccacgtgcagggcatctcctacccaggcggcatgtgcctgccctactacagcaccagcatcatcaaggacctgctgcctgacaccaacatcatcgccaacaggatggcccaccagctgggccacaacctgggcatgcagcatgatgagttcccctgcacctgccccagcgggaaatgtgtgatggacagtgatggcagcatcccagccctgaagttcagcaagtgcagccagaaccagtaccaccagtacctgaaggactacaagcccacctgcatgctgaacatccccttcccctacaacttccatgacttccagttctgtggcaacaagaagctggatgaaggagaggagtgtgactgtggccctgcccaggagtgcaccaacccctgctgtgatgcccacacctgtgtgctgaagccaggcttcacctgtgccgagggggagtgctgtgagagctgccagatcaagaaggccggcagcatctgcaggcctgccaaggatgaatgtgacttccctgagatgtgcaccggccacagccctgcctgccccaaggaccagttccgggtgaatggcttcccctgcaagaacagcgagggctactgcttcatgggcaagtgccccacccgggaggaccagtgcagcgagctgtttgatgatgaggccatcgagagccatgacatctgctacaagatgaacaccaagggcaacaagtttggctactgcaagaacaaggagaaccgcttcctgccctgtgaggagaaggatgtgcgctgtgggaagatctactgcacaggaggagagctgagcagcctgctgggggaggacaagacctaccacctgaaggacccccagaagaatgccaccgtgaagtgcaagaccatcttcctgtaccatgacagcacagacatcggcctggtggccagcggcaccaagtgtggggagggcatggtgtgcaacaatggagaatgtctgaacatggagaaggtgtacatcagcaccaactgccccagccagtgcaatgaaaatcctgtggatggccacggcctgcagtgccactgtgaggagggccaggcccctgtggcctgtgaggagaccctgcacgtgaccaacatcaccatcctggtggtggtgctggtgctggtgattgtgggcatcggcgtgctgatcctgctggtgcgctacaggaagtgcatcaagctgaagcaggtgcagagccccccaacagagaccctgggcgtggagaacaagggctactttggagatgagcagcagatcagaacagagcccatcctgcctgagatccacttcctgaactag

SEQ ID NO: 142632 - DNA, 2475 bp, synthetic construct
  misc_feature 1..2475: note = Description of Artificial Sequence: Synthetic coding sequence
  source 1..2475: mol_type = other DNA
atgaggggcctgggcctgtggctgctgggcgccatgatgctgcctgccatcgcccccagccggccctgggccctgatggagcagtatgaggtggtgctgccctggaggctgcccggcccccgggtgagaagagccctgcccagccacctgggcctgcaccctgagcgggtgtcctatgtgctgggcgccaccggccacaacttcaccctgcacctgaggaagaacagagacctgctgggcagcggctacacagagacctacacagctgccaatggaagtgaggtgacagagcagccccggggccaggaccactgcttctaccagggccacgtggagggctacccagattctgctgccagcctgagcacctgtgccggcctgcggggcttcttccaggtgggcagtgacctgcacctgattgagcccctggatgagggcggggagggcggcagacatgctgtgtaccaggccgagcacctgctgcagacagctggcacctgtggggtgtctgatgacagcctgggcagcctgctgggccccaggacagctgctgtgttccggcccaggcctggggacagcctgcccagccgggagaccaggtatgtggagctgtatgtggtggtggacaatgctgagttccagatgctgggcagcgaggccgctgtgcgccaccgggtgctggaggtggtgaaccacgtggacaagctgtaccagaagctgaacttccgggtggtgctggtgggcctggagatctggaacagccaggaccgcttccacgtgtccccagaccccagcgtgaccctggagaacctgctgacctggcaggcccggcagaggaccaggaggcacctgcatgacaacgtgcagctgatcaccggggtggacttcaccggcaccaccgtgggctttgcccgggtgtctgccatgtgcagccacagcagcggggctgtgaaccaggaccacagcaagaaccctgtgggcgtggcctgcaccatggcccacgagatgggccacaacctgggcatggaccatgatgaaaatgtgcagggctgccgctgccaggagagatttgaagctggccgctgcatcatggccggcagcatcggcagcagcttccccaggatgttcagtgactgcagccaggcctacctggagagcttcctggagcggccccagagcgtgtgcctggccaatgccccagacctgagccacctggtgggcggccctgtgtgtggcaacctgtttgtggagcggggggagcagtgtgactgtggccccccagaggactgcaggaaccgctgctgcaacagcaccacctgccagctggccgagggcgcccagtgtgcccacggcacctgctgccaggagtgcaaggtgaagccagctggggagctgtgccggcccaagaaggacatgtgtgacctggaggagttctgtgatggccgccacccagaatgtccagaagatgccttccaggagaatggcaccccctgcagcggcggctactgctacaatggagcctgccccaccctggcccagcagtgccaggccttctggggccctgggggccaggccgctgaggagagctgcttctcctatgacatcctgcccggctgcaaggccagccgctacagagctgacatgtgtggggtgctgcagtgcaagggcggccagcagcccctgggccgggccatctgcatcgtggatgtgtgccacgccctgaccacagaagatggaacagcctatgagcctgtgcctgagggcacccgctgtggccctgagaaggtgtgctggaagggccgctgccaggacctgcacgtgtaccgcagcagcaactgcagcgcccagtgccacaaccacggcgtgtgcaaccacaagcaggagtgccactgccacgccggctgggccccaccccactgtgccaagctgctgacagaggtgcatgctgccagcggcagcctgcctgtgtttgtggtggtggtgctggtgctgctggccgtggtgctggtgaccctggccggcatcatcgtgtacaggaaggcccggagccgcatcctgagcagaaatgtggcccccaagaccaccatgggccgcagcaaccccctcttccaccaggccgccagccgggtgcctgccaagggcggggccccagcccccagccggggcccccaggagctggtgcccaccacccaccctggccagcctgcccggcacccagccagctctgtggccctgaagaggcctcctccagcccctcctgtgacagtgagcagcccccccttccctgtgcctgtgtacacccggcaggcccccaagcaggtgatcaagcccacctttgcccctcctgtgccccctgtgaagccaggggccggggccgccaaccctggccctgctgagggcgctgtgggccccaaggtggccctgaagccacccatccagaggaagcagggcgctggggcccccacagccccctag

SEQ ID NO: 142633 - DNA, 2202 bp, synthetic construct
  misc_feature 1..2202: note = Description of Artificial Sequence: Synthetic coding sequence
  source 1..2202: mol_type = other DNA
atgaggggcctgggcctgtggctgctgggcgccatgatgctgcccggccctgccccccgggagggggagctgcggccctggggccaccgggcccagctgcaccccccacctgctgaggagcagggccctgctggcctgcggctgcaccgggacctgtatggctgccagtggctgcggggagatggagctgccagcagagctggccccctgctgctgcccggcccccggcggggcgtgcccggcctgagccggcagccccagcacctgtgccggccccaggtgggcagtgacctgcacctgattgagcccctggatgaaggaggagagggcggcagacatgctgtgtaccaggccgagcacctgctgcagacagctggcacctgtggggtgtctgatgacagcctgggcagcctgctgggccccaggacagctgctgtgttccggcccaggcctggggacagcctgcccagccgggagacccgctacgtggagctgtatgtggtggtggacaatgctgagttccagatgctgggcagcgaggccgctgtgcgccaccgggtgctggaggtggtgaaccacgtggacaagctgtaccagaagctgaacttccgggtggtgctggtgggcctggagatctggaacagccaggaccgcttccacgtgtccccagaccccagcgtgaccctggagaacctgctgacctggcaggcccggcagaggacccggcggcacctgcatgacaacgtgcagctgatcactggagtggacttcaccggcaccaccgtgggctttgcccgggtgtctgccatgtgcagccacagcagtggagctgtgaaccaggaccacagcaagaaccctgtgggcgtggcctgcaccatggcccacgagatgggccacaacctgggcatggaccatgatgaaaatgtgcagggctgccgctgccaggagagatttgaggccggccgctgcatcatggccggcagcatcggcagcagcttccccaggatgttcagtgactgcagccaggcctacctggagagcttcctggagcggccccagagcgtgtgcctggccaatgccccagacctgagccacctggtgggcggccctgtgtgtggcaacctgtttgtggagcggggggagcagtgtgactgtggccccccagaggactgcaggaaccgctgctgcaacagcaccacctgccagctggccgagggcgcccagtgtgcccacggcacctgctgccaggagtgcaaggtgaagccagctggggagctgtgccggcccaagaaggacatgtgtgacctggaggagttctgtgatggccgccaccctgagtgcccagaagatgccttccaggagaatggcaccccctgcagcggcggctactgctacaacggggcctgccccaccctggcccagcagtgccaggccttctggggccctgggggccaggccgctgaggagagctgcttctcctatgacatcctgcccggctgcaaggccagccgctacagagctgacatgtgtggggtgctgcagtgcaagggcggccagcagcccctgggccgggccatctgcatcgtggatgtgtgccacgccctgaccacagaagatggaacagcctatgagcctgtgcctgagggcacccgctgtggccctgagaaggtgtgcaaccacaagcaggagtgccactgccacgccggctgggccccaccccactgtgccaagctgctgacagaggtgcacgccgccagcggcagcctgcctgtgtttgtggtggtggtgctggtgctgctggccgtggtgctggtgaccctggccggcatcatcgtgtacaggaaggcccggagccgcatcctgagcagaaatgtggcccccaagaccaccatgggccgcagcaaccccctcttccaccaggccgccagccgggtgcctgccaagggcggggccccagcccccagccggggcccccaggagctggtgcccaccacccaccctggccagcctgcccggcacccagccagctctgtggccctgaagaggcctcctccagcccctcctgtgacagtgagcagcccccccttccctgtgcctgtgtacacccggcaggcccccaagcagggcgctgtgggccccaaggtggccctgaagccacccatccagaggaagcagggcgctggggcccccacagccccctag

SEQ ID NO: 142634 - DNA, 2229 bp, synthetic construct
  misc_feature 1..2229: note = Description of Artificial Sequence: Synthetic coding sequence
  source 1..2229: mol_type = other DNA
atgaggggcctgggcctgtggctgctgggcgccatgatgctgcctgccatcgcccccagccggccctgggccctgatggagcagtatgaggtggtgctgccctggaggctgcccggcccccgggtgagaagagccctgcccagccacctgggcctgcaccctgagcgggtgtcctatgtgctgggcgccaccggccacaacttcaccctgcacctgaggaagaacagagacctgctgggcagcggctacacagagacctacacagctgccaatggaagtgaggtgacagagcagccccggggccaggaccactgcttctaccagggccacgtggagggctacccagattctgctgccagcctgagcacctgtgccggcctgcggggcttcttccaggtgggcagtgacctgcacctgattgagcccctggatgagggcggggagggcggcagacatgctgtgtaccaggccgagcacctgctgcagacagctggcacctgtggggtgtctgatgacagcctgggcagcctgctgggccccaggacagctgctgtgttccggcccaggcctggggacagcctgcccagccgggagaccaggtatgtggagctgtatgtggtggtggacaatgctgagttccagatgctgggcagcgaggccgctgtgcgccaccgggtgctggaggtggtgaaccacgtggacaagctgtaccagaagctgaacttccgggtggtgctggtgggcctggagatctggaacagccaggaccgcttccacgtgtccccagaccccagcgtgaccctggagaacctgctgacctggcaggcccggcagaggaccaggaggcacctgcatgacaacgtgcagctgatcaccggggtggacttcaccggcaccaccgtgggctttgcccgggtgtctgccatgtgcagccacagcagcggggctgtgaaccaggaccacagcaagaaccctgtgggcgtggcctgcaccatggcccacgagatgggccacaacctgggcatggaccatgatgaaaatgtgcagggctgccgctgccaggagagatttgaagctggccgctgcatcatggccggcagcatcggcagcagcttccccaggatgttcagtgactgcagccaggcctacctggagagcttcctggagcggccccagagcgtgtgcctggccaatgccccagacctgagccacctggtgggcggccctgtgtgtggcaacctgtttgtggagcggggggagcagtgtgactgtggccccccagaggactgcaggaaccgctgctgcaacagcaccacctgccagctggccgagggcgcccagtgtgcccacggcacctgctgccaggagtgcaaggtgaagccagctggggagctgtgccggcccaagaaggacatgtgtgacctggaggagttctgtgatggccgccacccagaatgtccagaagatgccttccaggagaatggcaccccctgcagcggcggctactgctacaatggagcctgccccaccctggcccagcagtgccaggccttctggggccctgggggccaggccgctgaggagagctgcttctcctatgacatcctgcccggctgcaaggccagccgctacagagctgacatgtgtggggtgctgcagtgcaagggcggccagcagcccctgggccgggccatctgcatcgtggatgtgtgccacgccctgaccacagaagatggaacagcctatgagcctgtgcctgagggcacccgctgtggccctgagaaggtgtgctggaagggccgctgccaggacctgcacgtgtaccgcagcagcaactgcagcgcccagtgccacaaccacggcgtgtgcaaccacaagcaggagtgccactgccacgccggctgggccccaccccactgtgccaagctgctgacagaggtgcatgctggctgccagcccagggctggccagggccggggcagcagccccatccagggccccccccgggccggcccccaccaccccccaggccctgcccggcccaccccaggcctgctgggcggcagcgaggaggccgccccctgcagcagcggccactgtgtgcagcccaccctgcccagcagctgcctgcaccctgctggcaccaaggccggccaccaggccaacgtgaggaccccatctgcccccagccagacccggggctggtgtggccagccctggagcagctag

SEQ ID NO: 142635 - DNA, 2460 bp, synthetic construct
  misc_feature 1..2460: note = Description of Artificial Sequence: Synthetic coding sequence
  source 1..2460: mol_type = other DNA
atgggcagcggggcccgcttccccagcggcaccctgcgggtgcgctggctgctgctgctgggcctggtgggccctgtgctgggcgccgcccggcccggcttccagcagaccagccacctgagcagctatgagatcatcaccccctggaggctgacccgggagcggcgggaggccccccggccctacagcaagcaggtgtcctatgtgatccaggccgagggcaaggagcacatcatccacctggagaggaacaaggacctgctgcctgaggactttgtggtgtacacctacaacaaggagggcaccctcatcacagaccaccccaacatccagaaccactgccactaccggggctacgtggagggcgtgcacaacagcagcatcgccctgagtgactgcttcggcctgcggggcctgctgcacctggagaatgccagctatggaattgagcccctgcagaacagcagccactttgagcacatcatctacaggatggatgatgtgtacaaggagcccctgaagtgtggggtgagcaacaaggacatcgagaaggagacagccaaggatgaggaggaggagccccccagcatgacccagctgctgcggcggcggcgggctgtgctgccccagaccaggtatgtggagctgttcatcgtggtggacaaggagagatatgacatgatgggcaggaaccagacagctgtgcgggaggagatgatcctgctggccaactacctggacagcatgtacatcatgctgaacatcagaattgtgctggtgggcctggagatctggaccaatggaaacctgatcaacatcgtgggcggcgctggagatgtgctgggcaactttgtgcagtggagggagaagttcctgatcaccaggagaagacatgacagcgcccagctggtgctgaagaagggctttggaggaacagctggcatggcctttgtgggcaccgtgtgcagccgcagccatgctgggggcatcaacgtgtttggccagatcaccgtggagacctttgccagcatcgtggcccacgagctgggccacaacctgggcatgaaccatgatgatggccgggactgcagctgtggggccaagagctgcatcatgaacagcggggccagcggcagcaggaacttcagcagctgcagcgctgaggactttgagaagctgaccctgaacaagggcggcaactgcctgctgaacatccccaagccagatgaggcctacagcgcccccagctgtggcaacaagctggtggatgctggggaggagtgtgactgtggcacccccaaggaatgtgagctggacccctgctgtgagggcagcacctgcaagctgaagagctttgctgaatgtgcctatggagactgctgcaaggactgccgcttcctgcccggcggcaccctgtgccggggcaagaccagtgaatgtgatgtgcctgagtactgcaatggcagcagccagttctgccagccagatgtgttcatccagaatggctacccctgccagaacaacaaggcctactgctacaacggcatgtgccagtactatgatgcccagtgccaggtgatcttcggcagcaaggccaaggccgcccccaaggactgcttcatcgaggtgaacagcaagggggaccgcttcggcaactgtggcttctctggaaatgagtacaagaagtgtgccactggaaatgccctgtgtgggaagctgcagtgtgaaaatgtgcaggagatccctgtgtttggcatcgtgcctgccatcatccagacccccagccggggcaccaagtgctggggcgtggacttccagctgggcagtgatgtgcctgaccccggcatggtgaatgaaggcaccaagtgtggggccggcaagatctgcaggaacttccagtgtgtggatgcctctgtgctgaactatgactgtgatgtgcagaagaagtgccacggccatggagtgtgcaacagcaacaagaactgccactgtgaaaatggctgggccccacccaactgtgagaccaagggctacggcggctctgtggacagcggccccacctacaatgagatgaacacagccctgagagatggcctgctggtgttcttcttcctgattgtgcccctcatcgtgtgtgccatcttcatcttcatcaagagggaccagctgtggaggagctacttcaggaagaagaggagccagacctatgaaagtgatggcaagaaccaggccaaccccagccggcagcccggctctgtgcccaggcatgtgtcccctgtgaccccaccccgggaggtgcccatctatgccaacagatttgctgtgcccacctatgctgccaagcagccccagcagttccccagccggcccccaccaccccagcccaaggtgagcagccagggcaacctgatcccagcccggcctgccccagccccacccctgtacagcagcctgacctag

SEQ ID NO: 142636 - DNA, 2904 bp, synthetic construct
  misc_feature 1..2904: note = Description of Artificial Sequence: Synthetic coding sequence
  source 1..2904: mol_type = other DNA
atgcagagagctgtgcctgagggctttggaagaaggaagctgggcagtgacatgggaaatgctgagcgggcccctggcagccgcagctttggacctgtgcccaccctgctgctgctggccgccgccctgctggccgtgtctgatgccctgggccggcccagcgaggaggatgaggagctggtggtgcctgagctggagcgggcccctggccacggcaccacccggctgcggctgcacgcctttgaccagcagctggacctggagctgcggccagacagcagcttcctggcccctggcttcaccctgcagaatgtgggcaggaagagcggcagcgagacccccctgcctgagacagacctggcccactgcttctacagcggcaccgtgaatggagaccccagcagcgctgctgccctgagcctgtgtgagggcgtgcggggggccttctacctgctgggggaggcctacttcatccagcccctgcctgctgccagcgagcggctggccacagctgcccctggagagaagcccccagcccccctgcagttccacctgctgcggaggaaccggcagggagatgtgggcggcacctgtggggtggtggatgatgagccccggcccaccgggaaggccgagacagaagatgaagatgagggcacagaaggagaagatgagggcgcccagtggagcccccaggaccctgccctgcagggcgtgggccagcccactggaacaggcagcatcaggaagaagagatttgtgagcagccacagatatgtggagaccatgctggtggccgaccagagcatggccgagttccacggcagcggcctgaagcactacctgctgaccctcttctctgtggccgcccggctgtacaagcaccccagcatcagaaattctgtgtccctggtggtggtgaagatcctggtgattcatgatgagcagaagggccctgaggtgaccagcaatgctgccctgaccctgaggaacttctgcaactggcagaagcagcacaaccccccaagtgacagagatgctgagcactatgacacagccatcctcttcacccggcaggacctgtgtggcagccagacctgtgacaccctgggcatggctgatgtgggcaccgtgtgtgaccccagccgcagctgcagcgtgattgaagatgatggcctgcaggccgccttcaccacagcccacgagctgggccacgtgttcaacatgcctcatgatgatgccaagcagtgtgccagcctgaatggagtgaaccaggacagccacatgatggcctccatgctgagcaacctggaccacagccagccctggagcccctgcagcgcctacatgatcaccagcttcctggacaatggacatggagaatgtctgatggacaagccccagaaccccatccagctgcccggggacctgcccggcaccagctatgatgccaaccggcagtgccagttcaccttcggggaggacagcaagcactgcccagatgctgccagcacctgcagcaccctgtggtgcaccggcaccagcggaggagtgctggtgtgccagaccaagcacttcccctgggcagatggcaccagctgtggggagggcaagtggtgcatcaacgggaaatgtgtgaacaagacagacaggaagcactttgacacccccttccacggctcctggggcatgtggggcccctggggagactgcagcaggacctgtggcggcggcgtgcagtacaccatgagagaatgtgacaaccctgtgcccaagaatggaggcaagtactgtgagggcaagagggtgcgctaccgcagctgcaacctggaggactgcccagacaacaacgggaagaccttccgggaggagcagtgtgaggcccacaatgagttcagcaaggccagctttggaagtggccctgctgtggagtggatccccaagtatgctggggtgagccccaaggaccgctgcaagctgatctgccaggccaagggcatcggctacttctttgtgctgcagcccaaggtggtggatggcaccccctgcagcccagacagcacctctgtgtgtgtgcagggccagtgtgtgaaggccggctgtgaccgcatcatcgacagcaagaagaagtttgataaatgtggggtgtgtggcggcaatggcagcacctgcaagaagatcagcggctctgtgaccagcgccaagccaggctaccatgacatcatcaccatccccaccggggccaccaacatcgaggtgaagcagaggaaccagaggggcagcaggaacaacggcagcttcctggccatcaaggctgctgatggcacctacatcctgaatggagactacaccctgagcaccctggagcaggacatcatgtacaagggcgtggtgctgcgctacagcggcagcagcgctgccctggagcgcatccgctccttcagccccctgaaggagcccctgaccatccaggtgctgactgtgggcaatgccctgcggcccaagatcaagtacacctactttgtgaagaagaagaaggagagcttcaatgccatccccaccttcagcgcctgggtgattgaggagtggggagaatgttccaagagctgtgagctgggctggcagaggcggctggtggagtgccgggacatcaatggccagcctgcctctgaatgtgccaaggaggtgaagccagccagcacccggccctgtgccgaccacccctgcccccagtggcagctgggggagtggagcagctgcagcaagacctgtgggaagggctacaagaagaggagcctgaagtgcctgagccatgatggaggagtgctgagccatgagagctgtgaccccctgaagaagcccaagcacttcatcgacttctgcaccatggctgaatgttcctag

SEQ ID NO: 142637 - DNA, 3312 bp, synthetic construct
  misc_feature 1..3312: note = Description of Artificial Sequence: Synthetic coding sequence
  source 1..3312: mol_type = other DNA
atggccccagcctgccagatcctgcgctgggccctggccctgggcctgggcctgatgtttgaggtgacccacgccttccgcagccaggatgagttcctgagcagcctggagagctatgaaattgccttccccaccagggtggaccacaacggggccctgctggccttcagccccccaccaccccggcggcagaggcggggcaccggggccacagctgagagccgcctcttctacaaggtggccagccccagcacccacttcctgctgaacctgaccaggagcagccggctgctggccggccacgtgtctgtggagtactggacccgggagggcctggcctggcagagagctgcccggccccactgcctgtatgccggccacctgcagggccaggccagcaccagccacgtggccatcagcacctgtggcggcctgcacggcctgattgtggctgatgaggaggagtacctgattgagcccctgcacggcggccccaagggcagccgcagccctgaggagagcggcccccacgtggtgtacaagaggagcagcctgcggcacccccacctggacacagcctgtggggtgagagatgagaagccctggaagggccggccctggtggctgcggaccctgaagcccccaccagcccggcccctgggcaatgaaacagagcggggccagcccggcctgaagaggtctgtgtcccgggagcgctacgtggagaccctggtggtggccgacaagatgatggtggcctaccatggaagaagagatgtggagcagtatgtgctggccatcatgaacatcgtggccaagctgttccaggacagcagcctgggcagcacagtgaacatcctggtgaccaggctcatcctgctgacagaggaccagcccaccctggagatcacccaccacgccggcaagagcctggacagcttctgcaagtggcagaagagcatcgtgaaccacagcggccatggaaatgccatcccagaaaatggagtggccaaccacgacacagctgtgctgatcaccaggtatgacatctgcatctacaagaacaagccctgtggcaccctgggcctggcccctgtgggcggcatgtgtgagcgggagaggagctgcagcgtgaatgaagacatcggcctggccacagccttcaccatcgcccacgagatcggccacaccttcggcatgaaccatgatggagtgggcaacagctgtggggcccggggccaggaccctgccaagctgatggccgcccacatcaccatgaagaccaacccctttgtgtggagcagctgcagccgggactacatcaccagcttcctggacagcggcctgggcctgtgcctgaacaacagaccaccccggcaggactttgtgtaccccaccgtggcccctggccaggcctatgatgctgatgagcagtgccgcttccagcacggcgtgaagagccggcagtgcaagtacggggaggtgtgcagcgagctgtggtgcctgagcaagagcaaccgctgcatcaccaacagcatcccagctgctgagggcaccctgtgccagacccacaccatcgacaagggctggtgctacaagagggtgtgtgtgcccttcggcagcaggcctgagggcgtggatggagcctggggcccctggaccccctggggagactgcagcaggacctgtggcggcggcgtgagcagcagcagccgccactgtgacagcccccggcccaccatcggcggcaagtactgcctgggggagaggagaagacacaggagctgcaacacagatgactgccccccaggcagccaggacttccgggaggtgcagtgcagcgagtttgacagcatccccttccggggcaagttctacaagtggaagacctacagaggaggaggagtgaaggcctgcagcctgacctgcctggccgagggcttcaacttctacacagaaagagctgctgctgtggtggatggcaccccctgcaggccagacacagtggacatctgtgtgtctggagagtgcaagcacgtgggctgtgacagagtgctgggcagtgacctgcgggaggacaagtgccgggtgtgtggaggagatggcagcgcctgtgagaccatcgagggcgtcttcagccctgccagccctggagctggctatgaagatgtggtgtggatccccaagggctctgtgcacatcttcatccaggacctgaacctgagcctgagccacctggccctgaagggggaccaggagagcctgctgctggagggcctgcccggcaccccccagccccaccggctgcccctggccggcaccaccttccagctgcggcagggccctgaccaggtgcagagcctggaggccctgggccccatcaatgccagcctgattgtgatggtgctggccaggacagagctgcctgccctgcgctaccgcttcaatgcccccatcgcccgggacagcctgcccccctacagctggcactacgccccctggaccaagtgcagcgcccagtgtgccggcggcagccaggtgcaggccgtggagtgcaggaaccagctggacagcagcgctgtggccccccactactgcagcgcccacagcaagctgcccaagaggcagagggcctgcaacacagagccctgccccccagactgggtggtgggcaactggagcctgtgcagccgcagctgtgatgctggggtgcgcagccgctctgtggtgtgccagaggagagtgtctgctgctgaggagaaggccctggatgacagcgcctgcccccagcccaggcctcctgtgctggaggcctgccacggccccacctgccccccagagtgggccgccctggactggagcgaatgtacccccagctgtggccctggcctgcggcaccgggtggtgctgtgcaagtctgctgaccaccgggccaccctgcccccagcccactgcagccctgctgccaagcccccagccaccatgcgctgcaacctgcggcgctgccccccagcccgctgggtggccggggagtggggcgagtgcagcgcccagtgtggggtgggccagaggcagaggtctgtgcgctgcaccagccacacaggccaggccagccatgagtgcacagaggccctgcggccccccaccacccagcagtgtgaggccaagtgtgacagccccaccccaggagatggccctgaggagtgcaaggatgtgaacaaggtggcctactgccccctggtgctgaagttccagttctgcagccgggcctacttccggcagatgtgctgcaagacctgccacggccactag

SEQ ID NO: 142638 - DNA, 2544 bp, synthetic construct
  misc_feature 1..2544: note = Description of Artificial Sequence: Synthetic coding sequence
  source 1..2544: mol_type = other DNA
caggatgatggcggcctgagccgggcccctggctgtggggctgtgtgccccggccaccacgagcactgccaggtggccaagctgttccaggacagcagcctgggcagcacagtgaacatcctggtgaccaggctcatcctgctgacagaggaccagcccaccctggagatcacccaccacgccggcaagagcctggacagcttctgcaagtggcagaagagcatcgtgaaccacagcggccatggaaatgccatcccagaaaatggagtggccaaccacgacacagctgtgctgatcaccaggtatgacatctgcatctacaagaacaagccctgtggcaccctgggcctggcccctgtgggcggcatgtgtgagcgggagaggagctgcagcgtgaatgaagacatcggcctggccacagccttcaccatcgcccacgagatcggccacaccttcggcatgaaccatgatggagtgggcaacagctgtggggcccggggccaggaccctgccaagctgatggccgcccacatcaccatgaagaccaacccctttgtgtggagcagctgcagccgggactacatcaccagcttcctggacagcggcctgggcctgtgcctgaacaacagaccaccccggcaggactttgtgtaccccaccgtggcccctggccaggcctatgatgctgatgagcagtgccgcttccagcacggcgtgaagagccggcagtgcaagtacggggaggtgtgcagcgagctgtggtgcctgagcaagagcaaccgctgcatcaccaacagcatcccagctgctgagggcaccctgtgccagacccacaccatcgacaagggctggtgctacaagagggtgtgtgtgcccttcggcagcaggcctgagggcgtggatggagcctggggcccctggaccccctggggagactgcagcaggacctgtggcggcggcgtgagcagcagcagccgccactgtgacagcccccggcccaccatcggcggcaagtactgcctgggggagaggagaagacacaggagctgcaacacagatgactgccccccaggcagccaggacttccgggaggtgcagtgcagcgagtttgacagcatccccttccggggcaagttctacaagtggaagacctacagaggaggaggagtgaaggcctgcagcctgacctgcctggccgagggcttcaacttctacacagaaagagctgctgctgtggtggatggcaccccctgcaggccagacacagtggacatctgtgtgtctggagagtgcaagcacgtgggctgtgacagagtgctgggcagtgacctgcgggaggacaagtgccgggtgtgtggaggagatggcagcgcctgtgagaccatcgagggcgtcttcagccctgccagccctggagctggctatgaagatgtggtgtggatccccaagggctctgtgcacatcttcatccaggacctgaacctgagcctgagccacctggccctgaagggggaccaggagagcctgctgctggagggcctgcccggcaccccccagccccaccggctgcccctggccggcaccaccttccagctgcggcagggccctgaccaggtgcagagcctggaggccctgggccccatcaatgccagcctgattgtgatggtgctggccaggacagagctgcctgccctgcgctaccgcttcaatgcccccatcgcccgggacagcctgcccccctacagctggcactacgccccctggaccaagtgcagcgcccagtgtgccggcggcagccaggtgcaggccgtggagtgcaggaaccagctggacagcagcgctgtggccccccactactgcagcgcccacagcaagctgcccaagaggcagagggcctgcaacacagagccctgccccccagactgggtggtgggcaactggagcctgtgcagccgcagctgtgatgctggggtgcgcagccgctctgtggtgtgccagaggagagtgtctgctgctgaggagaaggccctggatgacagcgcctgcccccagcccaggcctcctgtgctggaggcctgccacggccccacctgccccccagagtgggccgccctggactggagcgaggtgtcccggcccctgcccagccggcccctgggctgccctgggggcgtgtccacagagacccccctgcggggcctgcaggtgtcctgccccctgctgaccagccactggggcagcaccctgagcaccaagaggcccttccagctgcagtgcacccccagctgtggccctggcctgcggcaccgggtggtgctgtgcaagtctgctgaccaccgggccaccctgcccccagcccactgcagccctgctgccaagcccccagccaccatgcgctgcaacctgcggcgctgccccccagcccgctgggtggccggggagtggggagaatgttctgcccagtgtggggtgggccagaggcagaggtctgtgcgctgcaccagccacacaggccaggccagccatgaatgtacagaggcctag

SEQ ID NO: 142639 - DNA, 4530 bp, synthetic construct
  misc_feature 1..4530: note = Description of Artificial Sequence: Synthetic coding sequence
  source 1..4530: mol_type = other DNA
atgccctgtgcccagaggtcctggctggccaacctgtctgtggtggcccagctgctgaactttggagccctgtgctacggccggcagccccagcccggccctgtgcgcttcccagaccggcggcaggagcacttcatcaagggcctgcctgagtaccacgtggtgggccctgtgcgggtggatgccagcggccacttcctgtcctatggcctgcactaccccatcaccagcagcaggaggaagagggacctggatggcagcgaggactgggtgtactaccgcatcagccatgaggagaaggacctcttcttcaacctgactgtgaaccagggcttcctgagcaacagctacatcatggagaagagatatggcaacctgagccacgtgaagatgatggccagcagcgcccccctgtgccacctgagcggcaccgtgctgcagcagggcaccagggtgggcacagctgccctgagcgcctgccacggcctgaccggcttcttccagctgccccatggagacttcttcatcgagcctgtgaagaagcaccccctggtggagggcggctaccacccccacatcgtgtaccgccggcagaaggtgcctgagaccaaggagcccacctgtggcctgaaggacagcgtgaacatcagccagaagcaggagctgtggagggagaagtgggagcggcacaacctgcccagccgcagcctgagcagaagaagcatcagcaaggagcgctgggtggagaccctggtggtggccgacaccaagatgattgagtaccacggctctgaaaatgtggagagctacatcctgaccatcatgaacatggtgacaggcctcttccacaaccccagcattggaaatgccatccacatcgtggtggtgcggctcatcctgctggaggaggaggagcagggcctgaagatcgtgcaccacgccgagaagaccctgagcagcttctgcaagtggcagaagagcatcaaccccaagagtgacctgaaccctgtgcaccatgatgtggccgtgctgctgaccaggaaggacatctgtgccggcttcaaccggccctgtgagaccctgggcctgagccacctgagcggcatgtgccagccccacaggagctgcaacatcaatgaagacagcggcctgcccctggccttcaccatcgcccacgagctgggccacagctttggcatccagcatgatggcaaggaaaatgactgtgagcctgtgggccgccacccctacatcatgagccggcagctgcagtatgaccccacccccctgacctggagcaagtgcagcgaggagtacatcacccgcttcctggaccggggctggggcttctgcctggatgacatccccaagaagaagggcctgaagagcaaggtgattgcccctggggtcatctatgatgtgcaccaccagtgccagctgcagtatggccccaatgccaccttctgccaggaggtggagaatgtgtgccagaccctgtggtgcagcgtgaagggcttctgccgcagcaagctggatgctgctgctgatggcacccagtgtggggagaagaagtggtgcatggccggcaagtgcatcaccgtgggcaagaagccagagagcatccctgggggctggggccgctggagcccctggagccactgcagcaggacctgtggggccggcgtgcagagcgctgagcggctgtgcaacaaccctgagcccaagtttggaggcaagtactgcaccggggagaggaagcgctaccgcctgtgcaatgtgcacccctgccgctctgaggcccccaccttccggcagatgcagtgcagcgagtttgacacagtgccctacaagaatgagctgtaccactggttccccatcttcaaccctggctacgtggacatcggcctcatccccaagggggcccgggacatccgggtgatggagattgaaggagctggcaacttcctggccatccgctcagaagatcctgagaagtactacctgaatggaggcttcatcatccagtggaatggaaactacaagctggccggcaccgtcttccagtatgacaggaagggggacctggagaagctgatggccaccggccccaccaatgaatctgtgtggatccagctgctcttccaggtgaccaaccctggcatcaagtatgagtacaccatccagaaggatggcctggacaatgatgtggagcagcagatgtacttctggcagtatggccactggacagagtgcagcgtgacctgtggcaccggcatccggcggcagacagcccactgcatcaagaagggccggggcatggtgaaggccaccttctgtgaccctgagacccagcccaacggccggcagaagaagtgccacgagaaggcctgccccccacgctggtgggccggggagtgggaggcctgcagcgccacctgtggcccccacggggagaagaagaggacagtgctgtgcatccagaccatggtgtctgatgagcaggccctgcccccaacagactgccagcacctgctgaagcccaagaccctgctgagctgcaacagagacatcctgtgccccagcgactggacagtgggcaactggagcgagtgcagcgtgtcctgtggcggcggcgtgcgcatccgctctgtgacctgtgccaagaaccatgatgagccctgtgatgtgaccaggaagcccaacagccgggccctgtgtggcctgcagcagtgccccagcagcagaagagtgctgaagcccaacaagggcaccatcagcaatggcaagaacccccccaccctgaagcctgtgcccccacccaccagccggcccaggatgctgaccacccccactggacctgagagcatgagcaccagcaccccagccatcagcagccccagccccaccacagccagcaaggagggggacctgggcggcaagcagtggcaggacagcagcacccagcctgagctgagcagccgctacctgatcagcacaggcagcaccagccagcccatcctgaccagccagagcctgagcatccagcccagtgaagaaaatgtgagcagcagtgacaccggccccaccagcgagggcggcctggtggccaccaccaccagcggcagcggcctgagcagcagcaggaaccccatcacctggcctgtgacccccttctacaacaccctgaccaagggccctgagatggagatccacagcggcagcggggaggagcgggagcagcctgaggacaaggatgagagcaaccctgtgatctggaccaagatccgggtgcctggaaatgatgcccctgtggagagcacagagatgcccctggccccacccctgaccccagacctgagccgggagagctggtggccacccttcagcacagtgatggagggcctgctgcccagccagaggcccaccaccagcgagaccggcaccccccgggtggagggcatggtgacagagaagccagccaacaccctgctgcccctgggcggggaccaccagcctgagcccagcggcaagacagccaacagaaaccacctgaagctgcccaacaacatgaaccagaccaagagcagcgagcctgtgctgacagaagaagatgccaccagcctcatcacagagggcttcctgctgaatgccagcaactacaagcagctgaccaatggacatggcagcgcccactggatcgtgggcaactggagcgaatgttccaccacctgtggcctgggcgcctactggaggagagtggagtgcagcacccagatggacagcgactgtgccgccatccagaggccagaccctgccaagcgctgccacctgcggccctgtgccggctggaaggtgggcaactggagcaagtgcagcaggaactgcagcggcggcttcaagatccgggagatccagtgtgtggacagccgggaccacaggaacctgcggcccttccactgccagttcctggccggcatccccccacccctgtccatgagctgcaaccctgagccctgtgaggcctggcaggtggagccctggagccagtgcagccgcagctgtggcggcggcgtgcaggagcggggcgtcttctgccctgggggcctgtgtgactggaccaagaggcccaccagcaccatgagctgcaatgagcacctgtgctgccactgggccaccggcaactgggacctgtgcagcaccagctgtggcggcggcttccagaagaggacagtgcagtgtgtgcccagcgagggcaacaagacagaggaccaggaccagtgcctgtgtgaccacaagcccaggcctcctgagttcaagaagtgcaaccagcaggcctgcaagaagtctgctgacctgctgtgcaccaaggacaagctgagcgccagcttctgccagaccctgaaggccatgaagaagtgcagcgtgcccaccgtgcgggcagagtgctgcttcagctgcccccagacccacatcacccacacccagaggcagaggcggcagaggctgctgcagaagagcaaggagctgtag

SEQ ID NO: 142640 - DNA, 4785 bp, synthetic construct
  misc_feature 1..4785: note = Description of Artificial Sequence: Synthetic coding sequence
  source 1..4785: mol_type = other DNA
atgccctgtgcccagaggtcctggctggccaacctgtctgtggtggcccagctgctgaactttggagccctgtgctacggccggcagccccagcccggccctgtgcgcttcccagaccggcggcaggagcacttcatcaagggcctgcctgagtaccacgtggtgggccctgtgcgggtggatgccagcggccacttcctgtcctatggcctgcactaccccatcaccagcagcaggaggaagagggacctggatggcagcgaggactgggtgtactaccgcatcagccatgaggagaaggacctcttcttcaacctgactgtgaaccagggcttcctgagcaacagctacatcatggagaagagatatggcaacctgagccacgtgaagatgatggccagcagcgcccccctgtgccacctgagcggcaccgtgctgcagcagggcaccagggtgggcacagctgccctgagcgcctgccacggcctgaccggcttcttccagctgccccatggagacttcttcatcgagcctgtgaagaagcaccccctggtggagggcggctaccacccccacatcgtgtaccgccggcagaaggtgcctgagaccaaggagcccacctgtggcctgaaggacagcgtgaacatcagccagaagcaggagctgtggagggagaagtgggagcggcacaacctgcccagccgcagcctgagcagaagaagcatcagcaaggagcgctgggtggagaccctggtggtggccgacaccaagatgattgagtaccacggctctgaaaatgtggagagctacatcctgaccatcatgaacatggtgacaggcctcttccacaaccccagcattggaaatgccatccacatcgtggtggtgcggctcatcctgctggaggaggaggagcagggcctgaagatcgtgcaccacgccgagaagaccctgagcagcttctgcaagtggcagaagagcatcaaccccaagagtgacctgaaccctgtgcaccatgatgtggccgtgctgctgaccaggaaggacatctgtgccggcttcaaccggccctgtgagaccctgggcctgagccacctgagcggcatgtgccagccccacaggagctgcaacatcaatgaagacagcggcctgcccctggccttcaccatcgcccacgagctgggccacagctttggcatccagcatgatggcaaggaaaatgactgtgagcctgtgggccgccacccctacatcatgagccggcagctgcagtatgaccccacccccctgacctggagcaagtgcagcgaggagtacatcacccgcttcctggaccggggctggggcttctgcctggatgacatccccaagaagaagggcctgaagagcaaggtgattgcccctggggtcatctatgatgtgcaccaccagtgccagctgcagtatggccccaatgccaccttctgccaggaggtggagaatgtgtgccagaccctgtggtgcagcgtgaagggcttctgccgcagcaagctggatgctgctgctgatggcacccagtgtggggagaagaagtggtgcatggccggcaagtgcatcaccgtgggcaagaagccagagagcatccctgggggctggggccgctggagcccctggagccactgcagcaggacctgtggggccggcgtgcagagcgctgagcggctgtgcaacaaccctgagcccaagtttggaggcaagtactgcaccggggagaggaagcgctaccgcctgtgcaatgtgcacccctgccgctctgaggcccccaccttccggcagatgcagtgcagcgagtttgacacagtgccctacaagaatgagctgtaccactggttccccatcttcaacccagcccacccctgtgagctgtactgccggcccattgatggccagttcagcgagaagatgctggatgctgtgattgatggcaccccctgctttgaaggaggcaacagcagaaatgtgtgcatcaatggcatctgcaagatggtgggctgtgactatgaaattgacagcaatgccacagaggacagatgtggggtgtgcctgggagatggcagcagctgccagacagtgaggaagatgttcaagcagaaggagggcagcggctacgtggacatcggcctcatccccaagggggcccgggacatccgggtgatggagattgagggcgccggcaacttcctggccatccgctctgaggaccctgagaagtactacctgaatggaggcttcatcatccagtggaatggaaactacaagctggccggcaccgtcttccagtatgacagaaaaggagacctggagaagctgatggccaccggccccaccaatgaatctgtgtggatccagctgctcttccaggtgaccaaccctggcatcaagtatgagtacaccatccagaaggatggcctggacaatgatgtggagcagcagatgtacttctggcagtatggccactggacagaatgttctgtgacctgtggcaccggcatccggcggcagacagcccactgcatcaagaagggccggggcatggtgaaggccaccttctgtgaccctgagacccagcccaacggccggcagaagaagtgccacgagaaggcctgccccccacgctggtgggccggggagtgggaggcctgcagcgccacctgtggcccccatggagagaagaagaggacagtgctgtgcatccagaccatggtgtctgatgagcaggccctgcccccaacagactgccagcacctgctgaagcccaagaccctgctgagctgcaacagagacatcctgtgccccagcgactggacagtgggcaactggagcgaatgttctgtgtcctgtggcggcggcgtgcgcatccgctctgtgacctgtgccaagaaccatgatgagccctgtgatgtgaccaggaagcccaacagccgggccctgtgtggcctgcagcagtgccccagcagccggcgggtgctgaagcccaacaagggcaccatcagcaatggcaagaacccccccaccctgaagcctgtgcccccacccaccagccggcccaggatgctgaccacccccaccggccctgagagcatgagcaccagcaccccagccatcagcagccccagccccaccacagccagcaaggagggggacctgggcggcaagcagtggcaggacagcagcacccagcctgagctgagcagccgctacctgatcagcacaggcagcaccagccagcccatcctgaccagccagagcctgagcatccagcccagcgaggagaatgtgagcagcagtgacaccggccccaccagcgagggcggcctggtggccaccaccaccagcggcagcggcctgagcagcagcaggaaccccatcacctggcctgtgacccccttctacaacaccctgaccaagggccctgagatggagatccacagcggcagcggggaggagcgggagcagcctgaggacaaggatgagagcaaccctgtgatctggaccaagatccgggtgcctggaaatgatgcccctgtggagagcacagagatgcccctggccccacccctgaccccagacctgagccgggagagctggtggccacccttcagcacagtgatggagggcctgctgcccagccagaggcccaccaccagcgagaccggcaccccccgggtggagggcatggtgacagagaagccagccaacaccctgctgcccctgggcggggaccaccagcctgagcccagcggcaagacagccaacagaaaccacctgaagctgcccaacaacatgaaccagaccaagagcagcgagcctgtgctgacagaggaggatgccaccagcctcatcacagagggcttcctgctgaatgccagcaactacaagcagctgaccaacggccacggcagcgcccactggatcgtgggcaactggagcgagtgcagcaccacctgtggcctgggcgcctactggaggagagtggagtgcagcacccagatggacagcgactgtgccgccatccagaggccagaccctgccaagcgctgccacctgcggccctgtgccggctggaaggtgggcaactggagcaagtgcagcaggaactgcagcggcggcttcaagatccgggagatccagtgtgtggacagccgggaccacaggaacctgcggcccttccactgccagttcctggccggcatccccccacccctgtccatgagctgcaaccctgagccctgtgaggcctggcaggtggagccctggagccagtgcagccgcagctgtggcggcggcgtgcaggagcggggcgtcttctgccctgggggcctgtgtgactggaccaagaggcccaccagcaccatgagctgcaatgagcacctgtgctgccactgggccactggaaactgggacctgtgcagcaccagctgtggcggcggcttccagaagaggacagtgcagtgtgtgcccagcgagggcaacaagacagaggaccaggaccagtgcctgtgtgaccacaagccccggcccccagagttcaagaagtgcaaccagcaggcctgcaagaagtctgctgacctgctgtgcaccaaggacaagctgagcgccagcttctgccagaccctgaaggccatgaagaagtgcagcgtgcccaccgtgcgggcagagtgctgcttcagctgcccccagacccacatcacccacacccagaggcagaggcggcagaggctgctgcagaagagcaaggagctgtag

SEQ ID NO: 142641 - DNA, 699 bp, synthetic construct
  misc_feature 1..699: note = Description of Artificial Sequence: Synthetic coding sequence
  source 1..699: mol_type = other DNA
atgccctgtgcccagaggtcctggctggccaacctgtctgtggtggcccagctgctgaactttggagccctgtgctacggccggcagccccagcccggccctgtgcgcttcccagaccggcggcaggagcacttcatcaagggcctgcctgagtaccacgtggtgggccctgtgcgggtggatgccagcggccacttcctgtcctatggcctgcactaccccatcaccagcagcaggaggaagagggacctggatggcagcgaggactgggtgtactaccgcatcagccatgaggagaaggacctcttcttcaacctgactgtgaaccagggcttcctgagcaacagctacatcatggagaagagatatggcaacctgagccacgtgaagatgatggccagcagcgcccccctgtgccacctgagcggcaccgtgctgcagcagggcaccagggtgggcacagctgccctgagcgcctgccacggcctgaccggcttcttccagctgccccatggagacttcttcatcgagcctgtgaagaagcaccccctggtggagggcggctaccacccccacatcgtgtaccgccggcagaaggtgcctgagaccaaggagcccacctgtggcctgaagggcatcgtgacccacatgagctcctgggtggaggagagcgtgctcttcttctggctgttctactag

SEQ ID NO: 142642 - DNA, 3675 bp, synthetic construct
  misc_feature 1..3675: note = Description of Artificial Sequence: Synthetic coding sequence
  source 1..3675: mol_type = other DNA
atgaagccccgggcccggggctggaggggcctggccgccctgtggatgctgctggcccaggtggccgagcaggccccagcctgtgccatgggccctgctgctgctgcccctggcagccccagcgtgcccaggcctcctcctcctgctgagcggcccggctggatggagaagggggagtatgacctggtgtctgcctatgaggtggaccacagaggagactatgtgtcccatgagatcatgcaccaccagaggagaagaagagctgtgcctgtgtctgaggtggagagcctgcacctgcggctgaagggcagcagacatgacttccacatggacctgcggaccagcagcagcctggtggcccctggcttcatcgtgcagaccctgggcaagacaggcaccaagtctgtgcagaccctgcccccagaggacttctgcttctaccagggcagcctgcggagccacaggaacagctctgtggccctgagcacctgccagggcctgagcggcatgatcagaacagaggaggccgactacttcctgcggcccctgcccagccacctgtcctggaagctgggccgggccgcccagggcagcagccccagccacgtgctgtacaagaggagcacagagccccacgcccctggggccagcgaggtgctggtgaccagcaggacctgggagctggcccaccagcccctgcacagcagtgacctgcggctgggcctgccccagaagcagcacttctgtggccgcaggaagaagtacatgccccagccccccaaggaggacctcttcatcctgcctgatgagtacaagagctgcctgcggcacaagaggagcctgctgcggagccacagaaatgaggagctgaatgtggagaccctggtggtggtggacaagaagatgatgcagaaccacggccacgagaacatcaccacctacgtgctgaccatcctgaacatggtgtctgccctcttcaaggatggcaccatcggcggcaacatcaacatcgccatcgtgggcctcatcctgctggaggatgagcagcccggcctggtgatcagccaccacgccgaccacaccctgagcagcttctgccagtggcagagcggcctgatgggcaaggatggcaccaggcatgaccacgccatcctgctgaccggcctggacatctgctcctggaagaatgagccctgtgacaccctgggctttgcccccatcagcggcatgtgcagcaagtaccgcagctgcaccatcaatgaagacaccggcctgggcctggccttcaccatcgcccatgaaagtggccacaactttggcatgattcatgatggagagggcaacatgtgcaagaagtctgagggcaacatcatgagccccaccctggccggcagaaatggagtcttctcctggagcccctgcagccggcagtacctgcacaagttcctgagcacagcccaggccatctgcctggccgaccagcccaagcctgtgaaggagtacaagtacccagagaagctgcccggggagctgtatgatgccaacacccagtgcaagtggcagtttggagagaaggccaagctgtgcatgctggacttcaagaaggacatctgcaaggccctgtggtgccaccgcatcggcaggaaatgtgagaccaagttcatgcctgctgctgagggcaccatctgtggccatgacatgtggtgccggggcggccagtgtgtgaagtatggagatgagggccccaagcccacccacggccactggagcgactggagctcctggagcccctgcagcaggacctgtggcggcggcgtgagccacaggagccggctgtgcaccaaccccaagcccagccacggcggcaagttctgtgagggcagcaccaggaccctgaagctgtgcaacagccagaagtgcccccgggacagcgtggacttccgggccgcccagtgtgccgagcacaacagccgccgcttccggggccgccactacaagtggaagccctacacccaggtggaggaccaggacctgtgcaagctgtactgcatcgccgagggctttgacttcttcttcagcctgagcaacaaggtgaaggatggcaccccctgcagcgaggacagcagaaatgtgtgcattgatggcatctgtgagcgggtgggctgtgacaacgtgctgggcagtgatgctgtggaggatgtgtgtggggtgtgcaatggaaacaacagcgcctgcaccatccaccggggcctgtacaccaagcaccaccacaccaaccagtactaccacatggtgaccatccccagcggggcccggagcatccgcatctatgagatgaatgtgtccaccagctacatctctgtgagaaatgccctgcggcgctactacctgaatggccactggacagtggactggccaggccgctacaagttcagcggcaccacctttgactacagaagaagctacaatgaacctgagaacctgattgccaccggccccaccaatgagaccctgattgtggagctgctcttccagggcagaaatcctggggtggcctgggagtacagcatgccccggctgggcacagagaagcagcccccagcccagcccagctacacctgggccatcgtgcgctctgagtgcagcgtgtcctgtggcggcggccagatgacagtgcgggagggctgctacagagacctgaagttccaggtgaacatgtccttctgcaaccccaagaccaggcctgtgacaggcctggtgccctgcaaggtgtctgcctgcccccccagctggagcgtgggcaactggagcgcctgcagcaggacctgtggcggcggggcccagagcaggcctgtgcagtgcacccggcgggtgcactatgacagcgagcctgtgcctgccagcctgtgcccccagcctgcccccagcagccggcaggcctgcaacagccagagctgccccccagcctggagcgctggcccctgggccgagtgcagccacacctgtgggaagggctggaggaagagagctgtggcctgcaagagcaccaaccccagcgcccgggcccagctgctgcctgatgctgtgtgcaccagcgagcccaagcccaggatgcatgaggcctgcctgctgcagcgctgccacaagcccaagaagctgcagtggctggtgtctgcctggagccagtgcagcgtgacctgtgagcggggcacccagaagcgcttcctgaagtgtgccgagaagtatgtgtctgggaagtaccgggagctggccagcaagaagtgcagccacctgcccaagcccagcctggagctggagcgggcctgtgcccccctgccctgccccaggcaccccccatttgctgctgctggccccagccggggctcctggtttgccagcccctggagccagtgcacagccagctgtggcggcggcgtgcagaccaggtctgtgcagtgcctggccggcggccgcccagccagcggctgcctgctgcaccagaagcccagcgccagcctggcctgcaacacccacttctgccccatcgccgagaagaaggatgccttctgcaaggactacttccactggtgctacctggtgccccagcacggcatgtgcagccacaagttctacggcaagcagtgctgcaagacctgcagcaagagcaacctgtag

SEQ ID NO: 142643 - DNA, 2787 bp, synthetic construct
  misc_feature 1..2787: note = Description of Artificial Sequence: Synthetic coding sequence
  source 1..2787: mol_type = other DNA
atgaagccccgggcccggggctggaggggcctggccgccctgtggatgctgctggcccaggtggccgagcaggccccagcctgtgccatgggccctgctgctgctgcccctggcagccccagcgtgcccaggcctcctcctcctgctgagcggcccggctggatggagaagggggagtatgacctggtgtctgcctatgaggtggaccacagaggagactatgtgtcccatgagatcatgcaccaccagaggagaagaagagctgtgcctgtgtctgaggtggagagcctgcacctgcggctgaagggcagcagacatgacttccacatggacctgcggaccagcagcagcctggtggcccctggcttcatcgtgcagaccctgggcaagacaggcaccaagtctgtgcagaccctgcccccagaggacttctgcttctaccagggcagcctgcggagccacaggaacagctctgtggccctgagcacctgccagggcctgagcggcatgatcagaacagaggaggccgactacttcctgcggcccctgcccagccacctgtcctggaagctgggccgggccgcccagggcagcagccccagccacgtgctgtacaagaggagcacagagccccacgcccctggggccagcgaggtgctggtgaccagcaggacctgggagctggcccaccagcccctgcacagcagtgacctgcggctgggcctgccccagaagcagcacttctgtggccgcaggaagaagtacatgccccagccccccaaggaggacctcttcatcctgcctgatgagtacaagagctgcctgcggcacaagaggagcctgctgcggagccacagaaatgaggagctgaatgtggagaccctggtggtggtggacaagaagatgatgcagaaccacggccacgagaacatcaccacctacgtgctgaccatcctgaacatggtgtctgccctcttcaaggatggcaccatcggcggcaacatcaacatcgccatcgtgggcctcatcctgctggaggatgagcagcccggcctggtgatcagccaccacgccgaccacaccctgagcagcttctgccagtggcagagcggcctgatgggcaaggatggcaccaggcatgaccacgccatcctgctgaccggcctggacatctgctcctggaagaatgagccctgtgacaccctgggctttgcccccatcagcggcatgtgcagcaagtaccgcagctgcaccatcaatgaagacaccggcctgggcctggccttcaccatcgcccatgaaagtggccacaactttggcatgattcatgatggagagggcaacatgtgcaagaagtctgagggcaacatcatgagccccaccctggccggcagaaatggagtcttctcctggagcccctgcagccggcagtacctgcacaagttcctgagcacagcccaggccatctgcctggccgaccagcccaagcctgtgaaggagtacaagtacccagagaagctgcccggggagctgtatgatgccaacacccagtgcaagtggcagtttggagagaaggccaagctgtgcatgctggacttcaagaaggacatctgcaaggccctgtggtgccaccgcatcggcaggaaatgtgagaccaagttcatgcctgctgctgagggcaccatctgtggccatgacatgtggtgccggggcggccagtgtgtgaagtatggagatgagggccccaagcccacccacggccactggagcgactggagctcctggagcccctgcagcaggacctgtggcggcggcgtgagccacaggagccggctgtgcaccaaccccaagcccagccacggcggcaagttctgtgagggcagcaccaggaccctgaagctgtgcaacagccagaagtgcccccgggacagcgtggacttccgggccgcccagtgtgccgagcacaacagccgccgcttccggggccgccactacaagtggaagccctacacccaggtggaggaccaggacctgtgcaagctgtactgcatcgccgagggctttgacttcttcttcagcctgagcaacaaggtgaaggatggcaccccctgcagcgaggacagcagaaatgtgtgcattgatggcatctgtgagcgggtgggctgtgacaacgtgctgggcagtgatgctgtggaggatgtgtgtggggtgtgcaatggaaacaacagcgcctgcaccatccaccggggcctgtacaccaagcaccaccacaccaaccagtactaccacatggtgaccatccccagcggggcccggagcatccgcatctatgagatgaatgtgtccaccagctacatctctgtgagaaatgccctgcggcgctactacctgaatggccactggacagtggactggccaggccgctacaagttcagcggcaccacctttgactacagaagaagctacaatgaacctgagaacctgattgccaccggccccaccaatgagaccctgattgtggagctgctcttccagggcagaaatcctggggtggcctgggagtacagcatgccccggctgggcacagagaagcagcccccagcccagcccagctacacctgggccatcgtgcgctctgagtgcagcgtgtcctgtggcggcggccagatgacagtgcgggagggctgctacagagacttcctgtacttcatgttctacctgagccagctgtttgccagcgagtgccccttcaagaacaccctgctgcacgccttcctgtgcaagtag

SEQ ID NO: 142644 - DNA, 3288 bp, synthetic construct
  misc_feature 1..3288: note = Description of Artificial Sequence: Synthetic coding sequence
  source 1..3288: mol_type = other DNA
atgtgtgatggagccctgctgccccccctggtgctgcctgtgctgctgctgctggtgtggggcctggaccccggcacagctgtgggagatgctgctgctgatgtggaggtggtgctgccctggagggtgcggccagatgatgtgcacctgccccccctgcctgctgcccctggccccaggagaagaagaagacccaggaccccacctgctgccccccgggcccggcctggagagcgggccctgctgctgcacctgcctgccttcggccgggacctgtacctgcagctgcggcgggacctgcgcttcctgagccggggctttgaggtggaggaggccggggccgccaggagaagaggccggcctgctgagctgtgcttctacagcggccgggtgctgggccaccctggcagcctggtgtccctgagcgcctgtggggctgctgggggcctggtgggcctcatccagctgggccaggagcaggtgctgatccagcccctgaacaacagccagggccccttcagcggccgggagcacctgatccggaggaagtggagcctgacccccagccccagcgctgaggcccagaggcctgagcagctgtgcaaggtgctgacagagaagaagaagcccacctggggccggcccagccgggactggagggagaggagaaatgccatccggctgaccagcgagcacacagtggagaccctggtggtggctgatgctgacatggtgcagtaccacggggctgaggccgcccagcgcttcatcctgactgtgatgaacatggtgtacaacatgttccagcaccagagcctgggcatcaagatcaacatccaggtgaccaagctggtgctgctgcggcagaggcctgccaagctgagcatcggccaccacggggagaggagcctggagagcttctgccactggcagaatgaggagtatggaggagcccgctacctgggcaacaaccaggtgcctgggggcaaggatgatcctcccctggtggatgctgctgtgtttgtgaccaggacagacttctgtgtgcacaaggatgagccctgtgacacagtgggcatcgcctacctgggcggcgtgtgcagcgccaagaggaaatgtgtgctggctgaagataatggcctgaacctggccttcaccatcgcccacgagctgggccacaacctgggcatgaaccatgatgatgaccacagcagctgtgccggccgcagccacatcatgtctggagagtgggtgaagggcaggaaccccagcgacctgtcctggagcagctgcagcagagatgacctggagaacttcctgaagagcaaggtgtccacctgcctgctggtgacagaccccaggagccagcacacagtgcggctgccccacaagctgcccggcatgcactacagcgccaatgagcagtgccagatcctgtttggcatgaatgccaccttctgcaggaacatggagcacctgatgtgtgccggcctgtggtgcctggtggagggggacaccagctgcaagaccaagctggacccccccctggatggaacagaatgtggggctgacaagtggtgcagagctggagaatgtgtgtccaagacccccatccctgagcacgtggatggagactggagcccctggggcgcctggagcatgtgcagcaggacctgtggcactggagcccgcttccggcagaggaaatgtgacaaccccccacctggccctgggggcacccactgccctggggcctctgtggagcacgctgtgtgtgagaacctgccctgccccaagggcctgcccagcttccgggaccagcagtgccaggcccatgaccggctgagccccaagaagaagggcctgctgacagctgtggtggtggatgacaagccctgtgagctgtactgcagccccctgggcaaggagagccccctgctggtggccgacagagtgctggatggcaccccctgtggcccctatgaaacagacctgtgtgtgcacggcaagtgccagaagattggctgtgatggcatcatcggcagcgctgccaaggaggacagatgtggggtgtgcagcggagatggcaagacctgccacctggtgaagggggacttcagccacgcccggggcacagccctgaaggacagcggcaagggcagcatcaacagcgactggaagattgagctgcctggagagttccagattgctggcaccaccgtgcgctacgtgagaagaggcctgtgggagaagatcagcgccaagggccccaccaagctgcccctgcacctgatggtgctgctcttccatgaccaggactatggcatccactatgagtacacagtgcctgtgaacagaacagctgagaaccagagcgagcctgagaagccccaggacagcctcttcatctggacccacagcggctgggagggctgcagcgtgcagtgtggcggcggggagaggaggaccatcgtgtcctgcacccgcatcgtgaacaagaccaccaccctggtgaatgacagcgactgcccccaggccagcaggcctgagccccaggtgcggcgctgcaacctgcacccctgccagagccgctgggtggccggcccctggagcccctgcagcgccacctgtgagaagggcttccagcaccgggaggtgacctgtgtgtaccagctgcagaatggcacccacgtggccacccggcccctgtactgccccggccccaggcctgctgctgtgcagagctgtgagggccaggactgcctgagcatctgggaggccagcgagtggagccagtgcagcgccagctgtgggaaaggagtgtggaagaggacagtggcctgcaccaacagccagggcaaatgtgatgccagcacccggcccagggctgaggaggcctgtgaggactacagcggctgctatgagtggaagacaggagactggagcacctgcagcagcacctgtgggaagggcctgcagagccgggtggtgcagtgcatgcacaaggtgactggaagacatggcagcgagtgcccagccctgagcaagccagccccctaccggcagtgctaccaggaggtgtgcaatgaccgcatcaatgccaacaccatcaccagcccccggctggccgccctgacctacaagtgcacccgggaccagtggacagtgtactgcagggtcatccgggagaagaacctgtgccaggacatgcgctggtaccagcgctgctgccagacctgccgggacttctacgccaacaagatgaggcagcccccacccaacagctag

SEQ ID NO: 142645 - DNA, 3666 bp, synthetic construct
  misc_feature 1..3666: note = Description of Artificial Sequence: Synthetic coding sequence
  source 1..3666: mol_type = other DNA
atggagtgtgccctgctgctggcctgtgccttccctgctgctggcagcggccccccccggggcctggccggcctgggccgggtggccaaggccctgcagctgtgctgcctgtgctgtgcctctgtggccgccgccctggccagtgacagcagcagcggggccagcggcctgaatgatgattatgtgtttgtgacccctgtggaggtggacagcgctggcagctacatcagccatgacatcctgcacaatggaaggaagaagaggtctgcccagaatgcccggagcagcctgcactaccgcttcagcgccttcggccaggagctgcacctggagctgaagcccagcgccatcctgagcagccacttcatcgtgcaggtgctgggcaaggatggagccagcgagacccagaagccagaggtgcagcagtgcttctaccagggcttcatcagaaatgacagcagcagctctgtggccgtgtccacctgtgccggcctgagcggcctcatccgcaccaggaagaatgagttcctgatcagccccctgccccagctgctggcccaggagcacaactacagcagccctgctggccaccacccccacgtgctgtacaagaggacagctgaggagaagatccagcgctaccggggctacccaggcagcggcaggaactacccaggctacagccccagccacatcccccacgccagccagagccgggagacagagtaccaccaccggcggctgcagaagcagcacttctgtggccgcaggaagaagtatgcccccaagccacccacagaggacacctacctgcgctttgatgaatatggcagcagcggccggcccaggagatctgctgggaagagccagaagggcctgaatgtggagaccctggtggtggccgacaagaagatggtggagaagcatggaaaaggaaatgtgaccacctacatcctgactgtgatgaacatggtgtctggcctcttcaaggatggcaccatcggcagtgacatcaacgtggtggtggtgtccctcatcctgctggagcaggagcccggcggcctgctgatcaaccaccacgccgaccagagcctgaacagcttctgccagtggcagagcgccctgattggcaagaatggcaagagacatgaccacgccatcctgctgaccggctttgacatctgctcctggaagaatgagccctgtgacaccctgggctttgcccccatcagcggcatgtgcagcaagtaccgcagctgcaccatcaatgaagacaccggcctgggcctggccttcaccatcgcccacgagagcggccacaactttggcatgattcatgatggagagggcaacccctgcaggaaggccgagggcaacatcatgagccccaccctgaccggcaacaatggagtcttctcctggagcagctgcagccggcagtacctgaagaagttcctgagcaccccccaggccggctgcctggtggatgagcccaagcaggccggccagtacaagtacccagacaagctgcccggccagatctatgatgctgacacccagtgcaagtggcagtttggagccaaggccaagctgtgcagcctgggctttgtgaaggacatctgcaagagcctgtggtgccaccgggtgggccaccgctgtgagaccaagttcatgcctgctgctgagggcaccgtgtgtggcctgtccatgtggtgccggcagggccagtgtgtgaagtttggagagctgggcccccggcccatccacggccagtggagcgcctggagcaagtggagcgagtgcagcaggacctgtggcggcggcgtgaagttccaggagcggcactgcaacaaccccaagccccagtatggaggcctcttctgccccggcagcagccgcatctaccagctgtgcaacatcaacccctgcaatgaaaacagcctggacttccgggcccagcagtgtgccgagtacaacagcaagcccttccggggctggttctaccagtggaagccctacaccaaggtggaggaggaggaccgctgcaagctgtactgcaaggcagaaaattttgagttcttctttgccatgtctgggaaggtgaaggatggcaccccctgcagccccaacaagaatgatgtgtgcattgatggagtgtgtgagctggtgggctgtgaccacgagctgggcagcaaggctgtgtctgatgcctgtggggtgtgcaagggggacaacagcacctgcaagttctacaagggcctgtacctgaaccagcacaaggccaatgagtactaccctgtggtgctgatcccagctggggcccggagcattgagatccaggagctgcaggtgagcagcagctacctggccgtgcgcagcctgagccagaagtactacctgactggaggctggagcattgactggccaggagagttcccctttgctggcaccacctttgagtaccagaggagcttcaacagacctgagcggctgtatgcccctggccccaccaatgagaccctggtgtttgagatcctgatgcagggcaagaaccctggcatcgcctggaagtatgccctgcccaaggtgatgaatggcaccccaccagccaccaagaggcctgcctacacctggagcatcgtgcagagcgagtgcagcgtgtcctgtggcggcggctacatcaacgtgaaggccatctgcctgcgggaccagaacacccaggtgaacagcagcttctgcagcgccaagaccaagcctgtgacagagcccaagatctgcaatgccttcagctgcccagcctactggatgcctggagagtggagcacctgcagcaaggcctgtgccggcggccagcagagcaggaagatccagtgtgtgcagaagaagcccttccagaaggaggaggccgtgctgcacagcctgtgccctgtgtccacccccacccaggtgcaggcctgcaacagccacgcctgccccccccagtggagcctgggcccctggagccagtgcagcaagacctgtggccggggcgtgaggaagcgggagctgctgtgcaagggcagcgctgctgagaccctgcctgagagccagtgcaccagcctgcccaggcctgagctgcaggagggctgtgtgctgggccgctgccccaagaacagccggctgcagtgggtggccagctcctggagcgaatgttctgccacctgtggcctgggcgtgaggaagcgggagatgaagtgcagcgagaagggcttccagggcaagctgatcaccttccctgagcggcgctgcaggaacatcaagaagcccaacctggacctggaggagacctgcaacagaagagcctgcccagcccaccctgtgtacaacatggtggccggctggtacagcctgccctggcagcagtgcaccgtgacctgtggcggcggcgtgcagaccaggtctgtgcactgtgtgcagcagggccggcccagcagcagctgcctgctgcaccagaagccccctgtgctgcgggcctgcaacaccaacttctgcccagcccctgagaagcgggaggaccccagctgtgtggacttcttcaactggtgccacctggtgccccagcacggcgtgtgcaaccacaagttctacggcaagcagtgctgcaagagctgcaccaggaagatctag

SEQ ID NO: 142646 - DNA, 825 bp, synthetic construct
  misc_feature 1..825: note = Description of Artificial Sequence: Synthetic coding sequence
  source 1..825: mol_type = other DNA
atggagtgtgccctgctgctggcctgtgccttccctgctgctggcagcggccccccccggggcctggccggcctgggccgggtggccaaggccctgcagctgtgctgcctgtgctgtgcctctgtggccgccgccctggccagtgacagcagcagcggggccagcggcctgaatgatgattatgtgtttgtgacccctgtggaggtggacagcgctggcagctacatcagccatgacatcctgcacaatggaaggaagaagaggtctgcccagaatgcccggagcagcctgcactaccgcttcagcgccttcggccaggagctgcacctggagctgaagcccagcgccatcctgagcagccacttcatcgtgcaggtgctgggcaaggatggagccagcgagacccagaagccagaggtgcagcagtgcttctaccagggcttcatcagaaatgacagcagcagctctgtggccgtgtccacctgtgccggcctgagcggcctcatccgcaccaggaagaatgagttcctgatcagccccctgccccagctgctggcccaggagcacaactacagcagccctgctggccaccacccccacgtgctgtacaagaggacagctgaggagaagatccagcgctaccggggctacccaggcagcggcaggaactacccaggctacagccccagccacatcccccacgccagccagagccgggagacagagtaccaccaccggcggctgcagaagcagcacttctgtggccgcaggaagaagtgcatctgcagccaggccagccaccggggccacctgagcaaggtgtag

SEQ ID NO: 142647 - DNA, 3636 bp, synthetic construct
  misc_feature 1..3636: note = Description of Artificial Sequence: Synthetic coding sequence
  source 1..3636: mol_type = other DNA
atggaccccccagctggagctgcccggcggctgctgtgcccagccctgctgctgctgctgctgctgctgcccccacccctgctgcccccacctcctcctccagccaatgcccggctggccgctgctgctgaccccccaggcggccccctgggccacggggctgagcgcatcctggccgtgcctgtgaggacagatgcccagggccgcctggtgagccacgtggtgtctgctgccaccagccgggccggcgtgcgggccaggagagctgcccctgtgaggacccccagcttccctggaggaaatgaggaggagcccggcagccacctgttctacaacgtgacagtgtttggccgggacctgcacctgcggctgcggcccaatgcccggctggtggcccctggggccaccatggagtggcagggcgagaagggcaccaccagggtggagcccctgctgggcagctgcctgtatgtgggagatgtggccggcctggccgaggccagctctgtggccctgagcaactgtgatggcctggccggcctcatccgcatggaggaggaggagttcttcatcgagcccctggagaagggcctggccgcccaggaggccgagcagggccgggtgcacgtggtgtacagaagaccacccaccagcccccccctgggcggcccccaggccctggacacaggagccagcctggacagcctggacagcctgagccgggccctgggcgtgctggaggagcacgccaacagcagcagaagaagagccaggagacatgctgctgatgatgactacaacatcgaggtgctgctgggcgtggatgattctgtggtgcagttccacggcaaggagcacgtgcagaagtacctgctgaccctgatgaacatcgtgaatgagatctaccatgatgagagcctgggcgcccacatcaacgtggtgctggtgcgcatcatcctgctgtcctatggcaagtccatgagcctcatcgagatcggcaaccccagccagagcctggagaatgtgtgccgctgggcctacctgcagcagaagccagacaccggccatgatgagtaccatgaccacgccatcttcctgacccggcaggactttggccccagcggcatgcagggctacgcccctgtgacaggcatgtgccaccctgtgcgcagctgcaccctgaaccatgaagatggcttcagcagcgcctttgtggtggcccacgagaccggccacgtgctgggcatggagcatgatggccagggcaacagatgtggagatgaggtgcggctgggcagcatcatggcccccctggtgcaggccgccttccaccgcttccactggagccgctgcagccagcaggagctgagccgctacctgcacagctatgactgcctgctggatgacccctttgcccatgactggccagccctgccccagctgcccggcctgcactacagcatgaatgagcagtgccgctttgattttggcctgggctacatgatgtgcacagccttccgcacctttgacccctgcaagcagctgtggtgcagccacccagacaacccctacttctgcaagaccaagaagggcccccccctggatggcaccatgtgtgcccctgggaagcactgcttcaagggccactgcatctggctgaccccagacatcctgaagagagatggctcctggggcgcctggagccccttcggcagctgcagcaggacctgtggcactggagtgaagttccgcacccggcagtgtgacaacccccacccagccaatggaggccgcacctgcagcggcctggcctatgacttccagctgtgcagccggcaggactgcccagacagcctggccgacttccgggaggagcagtgccggcagtgggacctgtactttgagcacggagatgcccagcaccactggctgccccatgagcacagagatgccaaggagcgctgccacctgtactgtgagagccgggagaccggggaggtggtgtccatgaagaggatggtgcatgatggcacccgctgcagctacaaggatgccttcagcctgtgtgtgcggggggactgcaggaaggtgggctgtgatggagtgattggcagcagcaagcaggaggacaagtgtggggtgtgtggcggggacaacagccactgcaaggtggtgaagggcaccttcaccaggagccccaagaagcacggctacatcaagatgtttgagatcccagctggggcccggcacctgctgatccaggaggtggatgccaccagccaccacctggccgtgaagaacctggagaccgggaagttcatcctgaatgaggagaatgatgtggatgccagcagcaagaccttcatcgccatgggcgtggagtgggagtacagagatgaagatggccgggagaccctgcagaccatgggccccctgcacggcaccatcaccgtgctggtgattcctgtgggggacaccagggtgtccctgacctacaagtacatgattcatgaggacagcctgaatgtggatgacaacaacgtgctggaggaggacagcgtggtgtatgagtgggccctgaagaagtggagcccctgcagcaagccctgtggcggcggcagccagttcaccaagtatggctgcagaagaaggctggaccacaagatggtgcaccggggcttctgtgccgccctgagcaagcccaaggccatcagaagagcctgcaacccccaggagtgcagccagcctgtgtgggtgactggagagtgggagccctgcagccagacctgtggccgcacaggcatgcaggtgcgctctgtgcgctgcatccagcccctgcatgacaacaccaccaggtctgtgcacgccaagcactgcaatgatgcccggcctgagagcagaagagcctgcagccgggagctgtgccccggccgctggagggctggcccctggagccagtgcagcgtgacctgtggaaatggcacccaggagaggcctgtgctgtgcaggacagcagatgacagctttggcatctgccaggaggagaggcctgagacagcccggacctgccgcctgggcccctgccccaggaacatcagtgaccccagcaagaagagctatgtggtgcagtggctgagcaggccagaccctgacagccccatcaggaagatcagcagcaagggccactgccagggcgacaagagcatcttctgcaggatggaggtgctgagccgctactgcagcatccctggctacaacaagctgtgctgcaagagctgcaacctgtacaacaacctgaccaacgtggagggccgcatcgagcccccacctgggaagcacaatgacattgatgtgttcatgcccaccctgcctgtgcccaccgtggccatggaggtgcggcccagccccagcacccccctggaggtgcccctgaatgccagcagcaccaatgccacagaggaccaccctgagaccaatgctgtggatgagccctacaagatccacggcctggaggatgaggtgcagccccccaacctgatcccccggcggcccagcccctatgagaagaccaggaaccagaggatccaggagctgattgatgagatgaggaagaaggagatgctgggcaagttctag

SEQ ID NO: 142648 - DNA, 1701 bp, synthetic construct
  misc_feature 1..1701: note = Description of Artificial Sequence: Synthetic coding sequence
  source 1..1701: mol_type = other DNA
atggaccccccagctggagctgcccggcggctgctgtgcccagccctgctgctgctgctgctgctgctgcccccacccctgctgcccccacctcctcctccagccaatgcccggctggccgctgctgctgaccccccaggcggccccctgggccacggggctgagcgcatcctggccgtgcctgtgaggacagatgcccagggccgcctggtgagccacgtggtgtctgctgccaccagccgggccggcgtgcgggccaggagagctgcccctgtgaggacccccagcttccctggaggaaatgaggaggagcccggcagccacctgttctacaacgtgacagtgtttggccgggacctgcacctgcggctgcggcccaatgcccggctggtggcccctggggccaccatggagtggcagggcgagaagggcaccaccagggtggagcccctgctgggcagctgcctgtatgtgggagatgtggccggcctggccgaggccagctctgtggccctgagcaactgtgatggcctggccggcctcatccgcatggaggaggaggagttcttcatcgagcccctggagaagggcctggccgcccaggaggccgagcagggccgggtgcacgtggtgtacagaagaccacccaccagcccccccctgggcggcccccaggccctggacacaggagccagcctggacagcctggacagcctgagccgggccctgggcgtgctggaggagcacgccaacagcagcagaagaagagccaggagacatgctgctgatgatgactacaacatcgaggtgctgctgggcgtggatgattctgtggtgcagttccacggcaaggagcacgtgcagaagtacctgctgaccctgatgaacatcgtgaatgagatctaccatgatgagagcctgggcgcccacatcaacgtggtgctggtgcgcatcatcctgctgtcctatggcaagtccatgagcctcatcgagatcggcaaccccagccagagcctggagaatgtgtgccgctgggcctacctgcagcagaagccagacaccggccatgatgagtaccatgaccacgccatcttcctgacccggcaggactttggccccagcggcatgcagggctacgcccctgtgacaggcatgtgccaccctgtgcgcagctgcaccctgaaccatgaagatggcttcagcagcgcctttgtggtggcccacgagaccggccacgtgctgggcatggagcatgatggccagggcaacagatgtggagatgaggtgcggctgggcagcatcatggcccccctggtgcaggccgccttccaccgcttccactggagccgctgcagccagcaggagctgagccgctacctgcacagctatgactgcctgctggatgacccctttgcccatgactggccagccctgccccagctgcccggcctgcactacagcatgaatgagcagtgccgctttgattttggcctgggctacatgatgtgcacagccttccgcacctttgacccctgcaagcagctgtggtgcagccacccagacaacccctacttctgcaagaccaagaagggcccccccctggatggcaccatgtgtgcccctgggaagttccggcctggagctgtggcccacgcctgctaccccagcaccctgggcggccagggccgctggatcgcctag

SEQ ID NO: 142649 - DNA, 4515 bp, synthetic construct
  misc_feature 1..4515: note = Description of Artificial Sequence: Synthetic coding sequence
  source 1..4515: mol_type = other DNA
atgtgggtggccaagtggctgaccggcctgctgtaccacctgagcctcttcatcaccaggtcctgggaggtggacttccacccccggcaggaggccctggtgaggaccctgaccagctatgaggtggtgattcctgagcgggtgaatgaatttggagaggtgttcccccagagccaccacttcagccggcagaagaggagcagcgaggccctggagcccatgcccttccgcacccactaccgcttcaccgcctacggccagctgttccagctgaacctgacagcagatgccagcttcctggccgccggctacacagaggtgcacctgggcaccccagagcggggggcctgggagagtgatgctggccccagcgacctgcggcactgcttctaccggggccaggtgaacagccaggaggactacaaggctgtggtgtccctgtgtggcggcctgaccggcaccttcaagggccagaatggagagtacttcctggagcccatcatgaaggcagatggaaatgaatatgaagatggccacaacaagccccacctgatctaccggcaggacctgaacaacagcttcctgcagaccctgaagtactgcagcgtgtctgagagccagatcaaggagaccagcctgcccttccacacctacagcaacatgaatgaagacctgaatgtgatgaaggagcgggtgctgggccacaccagcaagaatgtgcccctgaaggatgagcggcggcacagcaggaagaagaggctcatctcctacccccgctacatcgagatcatggtgacagcagatgccaaggtggtgtctgcccacggcagcaacctgcagaactacatcctgaccctgatgagcatcgtggccaccatctacaaggaccccagcatcggcaacctgatccacatcgtggtggtgaagctggtgatgatccaccgggaggaggagggccctgtgatcaactttgatggagccaccaccctgaagaacttctgctcctggcagcagacccagaatgacctggatgatgtgcaccccagccaccacgacacagctgtgctgatcacccgggaggacatctgcagcagcaaggagaagtgcaacatgctgggcctgagctacctgggcaccatctgtgaccccctgcagagctgcttcatcaatgaggagaagggcctcatcagcgccttcaccatcgcccacgagctgggccacaccctgggcgtgcagcatgatgacaacccccgctgcaaggagatgaaggtgaccaagtaccacgtgatggccccagccctgtccttccacatgagcccctggagctggagcaactgcagcaggaaatatgtgacagagttcctggacaccggctatggagaatgtctgctggacaagccagatgaggagatctacaacctgcccagcgagctgcccggcagccgctatgatggcaacaagcagtgtgagctggcctttggacctggcagccagatgtgcccccacatcaacatctgcatgcacctgtggtgcaccagcacagagaagctgcacaagggctgcttcacccagcacgtgcccccagcagatggaacagactgtggccctggcatgcactgccgccacggcctgtgtgtgaacaaggagacagagaccaggcctgtgaatggagagtggggcccctgggagccctacagcagctgcagcaggacctgtggcggcggcatcgagagcgccacccggcgctgcaacagacctgagcccagaaatggaggcaactactgtgtgggccgcaggatgaagttccgcagctgcaacacagacagctgccccaagggcacccaggacttccgggagaagcagtgcagcgacttcaacgggaagcacctggacatcagcggcatccccagcaatgtgcgctggctgccccgctacagcggcatcggcaccaaggaccgctgcaagctgtactgccaggtggccggcaccaactacttctacctgctgaaggacatggtggaggatggcaccccctgtggcacagagagctacaacatcgactgcaactgtgtgctgaaggctgctggctgtgaccacgtgctgaacagcagcgccaagattgacaagtgtggggtgtgtggcggggacaacagcagctgcaagaccatcaccggggtcttcaacagcagccactacggctacaacgtggtggtgaagatcccagctggggccaccaacgtggacatccggcagtacagctacagcggccagccagatgacagctacctggccctgagtgatgctgagggcaacttcctgttcaatggaaacttcctgctgagcaccagcaagaaggagatcaacgtgcagggcaccaggacagtcatcgagtacagcggcagcaacaatgctgtggagcgcatcaacagcaccaaccggcaggagaaggagatcctgattgaggtgctgtgtgtgggcaacctgtacaacccagatgtgcactacagcttcaacatccccctggaggagaggagtgacatgttcacctgggacccctacggcccctgggagggctgcaccaagatgtgccagggcctgcagaggaggaacatcacctgcatccacaagagtgaccacagcgtggtgtctgacaaggaatgtgaccacctgcccctgcccagctttgtgacccagagctgcaacacagactgtgagctgcgctggcacgtgattggcaagtcagaatgtagcagccagtgtggccagggctaccgcaccctggacatccactgcatgaagtacagcatccacgagggccagacagtgcaggtggatgaccactactgtggggaccagctgaagccacccacccaggagctgtgccacggcaactgtgtgttcacccgctggcactacagcgagtggagccagtgcagccgcagctgtggcggcggggagaggagccgggagagctactgcatgaacaactttggccaccggctggccgacaatgaatgccaggagctgagccgggtgacccgggagaactgcaatgagttcagctgccccagctgggccgccagcgagtggagcgagtgcctggtgacctgtgggaagggcaccaagcagaggcaggtgtggtgccagctgaatgtggaccacctgagtgatggcttctgcaacagcagcaccaagccagagagcctgagcccctgtgagctgcacacctgtgcctcctggcaggtgggcccctggggcccctgcaccaccacctgtggccacggctaccagatgagagatgtgaagtgtgtgaatgagctggccagcgctgtgctggaggacacagagtgccacgaggccagccggcccagcgaccggcagagctgtgtgctgaccccctgcagcttcatcagcaagctggagacagccctgctgcccaccgtgctgatcaagaagatggcccagtggaggcatggctcctggaccccctgcagcgtgtcctgtggccggggcacccaggcccgctacgtgtcctgcagagatgccctggacagaattgctgatgagagctactgtgcccacctgcccaggcctgctgagatctgggactgcttcaccccctgtggggagtggcaggccggggactggagcccctgcagcgccagctgtggccacggcaagaccacccggcaggtgctgtgcatgaactaccaccagcccattgatgagaactactgtgaccctgaggtgcggcccctgatggagcaggagtgcagcctggccgcctgccccccagcccacagccacttccccagcagccctgtgcagcccagctactacctgagcaccaacctgcccctgacccagaagctggaggacaatgaaaaccaggtggtgcaccccagcgtgcggggcaaccagtggaggacaggcccctggggcagctgcagcagcagctgcagcggcggcctgcagcacagagctgtggtgtgccaggatgaaaatggccagagcgccagctactgtgatgctgccagcaagcccccagagctgcagcagtgtggccctggcccctgcccccagtggaactacggcaactggggagaatgttcccagacctgtggcggcggcatcaagagccggctggtgatctgccagttccccaacggccagatcctggaggaccacaactgtgagatcgtgaacaagccacccagcgtcatccagtgccacatgcacgcctgcccagcagatgtgtcctggcaccaggagccctggaccagcgaggacctgaaggtgaagctgctgccccagaggaccatcatcctgtgggagctgatgaagaacatcttctgccacggcaagcacagccacatgtacctgatcaacgtggtgacagaccacctgctgtaccccaggcactgtgaccctgagaccatcgagacctacttcctgagcctgtggagcctgcagttcacctggggagacctgaagtactacaagaacagcctgtag

SEQ ID NO: 142650 - DNA, 5733 bp, synthetic construct
  misc_feature 1..5733: note = Description of Artificial Sequence: Synthetic coding sequence
  source 1..5733: mol_type = other DNA
atgtgggtggccaagtggctgaccggcctgctgtaccacctgagcctcttcatcaccaggtcctgggaggtggacttccacccccggcaggaggccctggtgaggaccctgaccagctatgaggtggtgattcctgagcgggtgaatgaatttggagaggtgttcccccagagccaccacttcagccggcagaagaggagcagcgaggccctggagcccatgcccttccgcacccactaccgcttcaccgcctacggccagctgttccagctgaacctgacagcagatgccagcttcctggccgccggctacacagaggtgcacctgggcaccccagagcggggggcctgggagagtgatgctggccccagcgacctgcggcactgcttctaccggggccaggtgaacagccaggaggactacaaggctgtggtgtccctgtgtggcggcctgaccggcaccttcaagggccagaatggagagtacttcctggagcccatcatgaaggcagatggaaatgaatatgaagatggccacaacaagccccacctgatctaccggcaggacctgaacaacagcttcctgcagaccctgaagtactgcagcgtgtctgagagccagatcaaggagaccagcctgcccttccacacctacagcaacatgaatgaagacctgaatgtgatgaaggagcgggtgctgggccacaccagcaagaatgtgcccctgaaggatgagcggcggcacagcaggaagaagaggctcatctcctacccccgctacatcgagatcatggtgacagcagatgccaaggtggtgtctgcccacggcagcaacctgcagaactacatcctgaccctgatgagcatcgtggccaccatctacaaggaccccagcatcggcaacctgatccacatcgtggtggtgaagctggtgatgatccaccgggaggaggagggccctgtgatcaactttgatggagccaccaccctgaagaacttctgctcctggcagcagacccagaatgacctggatgatgtgcaccccagccaccacgacacagctgtgctgatcacccgggaggacatctgcagcagcaaggagaagtgcaacatgctgggcctgagctacctgggcaccatctgtgaccccctgcagagctgcttcatcaatgaggagaagggcctcatcagcgccttcaccatcgcccacgagctgggccacaccctgggcgtgcagcatgatgacaacccccgctgcaaggagatgaaggtgaccaagtaccacgtgatggccccagccctgtccttccacatgagcccctggagctggagcaactgcagcaggaaatatgtgacagagttcctggacaccggctatggagaatgtctgctggacaagccagatgaggagatctacaacctgcccagcgagctgcccggcagccgctatgatggcaacaagcagtgtgagctggcctttggacctggcagccagatgtgcccccacatcaacatctgcatgcacctgtggtgcaccagcacagagaagctgcacaagggctgcttcacccagcacgtgcccccagcagatggaacagactgtggccctggcatgcactgccgccacggcctgtgtgtgaacaaggagacagagaccaggcctgtgaatggagagtggggcccctgggagccctacagcagctgcagcaggacctgtggcggcggcatcgagagcgccacccggcgctgcaacagacctgagcccagaaatggaggcaactactgtgtgggccgcaggatgaagttccgcagctgcaacacagacagctgccccaagggcacccaggacttccgggagaagcagtgcagcgacttcaacgggaagcacctggacatcagcggcatccccagcaatgtgcgctggctgccccgctacagcggcatcggcaccaaggaccgctgcaagctgtactgccaggtggccggcaccaactacttctacctgctgaaggacatggtggaggatggcaccccctgtggcacagagacccatgacatctgtgtgcagggccagtgcatggctgctggctgtgaccacgtgctgaacagcagcgccaagattgacaagtgtggggtgtgtggcggggacaacagcagctgcaagaccatcaccggggtcttcaacagcagccactacggctacaacgtggtggtgaagatcccagctggggccaccaacgtggacatccggcagtacagctacagcggccagccagatgacagctacctggccctgagtgatgctgagggcaacttcctgttcaatggaaacttcctgctgagcaccagcaagaaggagatcaacgtgcagggcaccaggacagtcatcgagtacagcggcagcaacaatgctgtggagcgcatcaacagcaccaaccggcaggagaaggagctgatcctgcaggtgctgtgtgtgggcaacctgtacaacccagatgtgcactacagcttcaacatccccctggaggagaggagtgacatgttcacctgggacccctacggcccctgggagggctgcaccaagatgtgccagggcctgcagaggaggaacatcacctgcatccacaagagtgaccacagcgtggtgtctgacaaggaatgtgaccacctgcccctgcccagctttgtgacccagagctgcaacacagactgtgagctgcgctggcacgtgattggcaagtcagaatgtagcagccagtgtggccagggctaccgcaccctggacatccactgcatgaagtacagcatccacgagggccagacagtgcaggtggatgaccactactgtggggaccagctgaagccacccacccaggagctgtgccacggcaactgtgtgttcacccgctggcactacagcgagtggagccagtgcagccgcagctgtggcggcggggagaggagccgggagagctactgcatgaacaactttggccaccggctggccgacaatgaatgccaggagctgagccgggtgacccgggagaactgcaatgagttcagctgccccagctgggccgccagcgagtggagcgagtgcctggtgacctgtgggaagggcaccaagcagaggcaggtgtggtgccagctgaatgtggaccacctgagtgatggcttctgcaacagcagcaccaagccagagagcctgagcccctgtgagctgcacacctgtgcctcctggcaggtgggcccctggggcccctgcaccaccacctgtggccacggctaccagatgagagatgtgaagtgtgtgaatgagctggccagcgctgtgctggaggacacagagtgccacgaggccagccggcccagcgaccggcagagctgtgtgctgaccccctgcagcttcatcagcaagctggagacagccctgctgcccaccgtgctgatcaagaagatggcccagtggaggcatggctcctggaccccctgcagcgtgtcctgtggccggggcacccaggcccgctacgtgtcctgcagagatgccctggacagaattgctgatgagagctactgtgcccacctgcccaggcctgctgagatctgggactgcttcaccccctgtggggagtggcaggccggggactggagcccctgcagcgccagctgtggccacggcaagaccacccggcaggtgctgtgcatgaactaccaccagcccattgatgagaactactgtgaccctgaggtgcggcccctgatggagcaggagtgcagcctggccgcctgccccccagcccacagccacttccccagcagccctgtgcagcccagctactacctgagcaccaacctgcccctgacccagaagctggaggacaatgaaaaccaggtggtgcaccccagcgtgcggggcaaccagtggaggacaggcccctggggcagctgcagcagcagctgcagcggcggcctgcagcacagagctgtggtgtgccaggatgaaaatggccagagcgccagctactgtgatgctgccagcaagcccccagagctgcagcagtgtggccctggcccctgcccccagtggaactacggcaactggggagaatgttcccagacctgtggcggcggcatcaagagccggctggtgatctgccagttccccaacggccagatcctggaggaccacaactgtgagatcgtgaacaagccacccagcgtcatccagtgccacatgcacgcctgcccagcagatgtgtcctggcaccaggagccctggaccagctgcagcgccagctgtgggaaaggaaggaagtaccgggaggtgttctgcatcgaccagttccagaggaagctggaggacaccaactgcagccaggtgcagaagccacccacccacaaggcctgccgctctgtgcgctgccccagctggaaggccaacagctggaatgaatgttctgtgacctgtggcagcggcgtgcagcagagagatgtgtactgccgcctgaagggcgtgggccaggtggtggaggagatgtgtgaccagagcacccggccctgcagccagaggcgctgctggagccaggactgtgtgcagcacaagggcatggagcggggccgcctgaactgcagcaccagctgtgagaggaaggacagccaccagaggatggagtgcacagacaaccagatccggcaggtgaatgaaattgtgtacaacagcagcaccatcagcctgaccagcaagaactgcaggaaccccccctgcaactacatcgtggtgacagctgacagcagccagtgtgccaacaactgtggcttctcctaccggcagaggatcacctactgcacagagatccccagcaccaagaagcacaagctgcaccggctgcggcccatcgtgtaccaggagtgccctgtggtgcccagcagccaggtgtaccagtgcatcaacagctgcctgcacctggccacctggaaggtgggcaagtggagcaaatgttctgtgacctgtggcatcggcatcatgaagaggcaggtgaagtgcatcaccaagcacggcctgagcagtgacctgtgcctgaaccacctgaagccaggggcccagaagaagtgctacgccaatgactgcaagagcttcaccacctgcaaggagatccaggtgaagaaccacatcaggaaggatggagactactacctgaacatcaagggccgcatcatcaagatctactgtgccgacatgtacctggagaaccccaaggagtacctgaccctggtgcagggcgaggagaacttcagcgaggtgtatggcttccggctgaagaacccctaccagtgccccttcaacggcagccggcgggaggactgtgaatgtgacaatggccacctggccgccggctacaccgtcttcagcaagatcagaattgacctgacctccatgcagatcaagaccacagacctgctcttcagcaagaccatctttggaaatgctgtgccctttgccacagctggggactgctacagcgccttccgctgcccccagggccagttcagcatcaacctgagcggcaccggcatgaagatcagcagcacagccaagtggctgacccagggcagctacacctctgtgtccatccgccgctcagaagatggcacccgcttctttggaaaatgtggcggctactgtgggaagtgcctgccccacatgaccaccggcctgcccatccaggtgatctag

SEQ ID NO: 142651 - DNA, 1869 bp, synthetic construct
  misc_feature 1..1869: note = Description of Artificial Sequence: Synthetic coding sequence
  source 1..1869: mol_type = other DNA
atgttcacctgggacccctacggcccctgggagggctgcaccaagatgtgccagggcctgcagaggaggaacatcacctgcatccacaagagtgaccacagcgtggtgtctgacaaggaatgtgaccacctgcccctgcccagctttgtgacccagagctgcaacacagactgtgagctgcgctggcacgtgattggcaagtcagaatgtagcagccagtgtggccagggctaccgcaccctggacatccactgcatgaagtacagcatccacgagggccagacagtgcaggtggatgaccactactgtggggaccagctgaagccacccacccaggagctgtgccacggcaactgtgtgttcacccgctggcactacagcgagtggagccagtgcagccgcagctgtggcggcggggagaggagccgggagagctactgcatgaacaactttggccaccggctggccgacaatgaatgccaggagctgagccgggtgacccgggagaactgcaatgagttcagctgccccagctgggccgccagcgagtggagcgagtgcctggtgacctgtgggaagggcaccaagcagaggcaggtgtggtgccagctgaatgtggaccacctgagtgatggcttctgcaacagcagcaccaagccagagagcctgagcccctgtgagctgcacacctgtgcctcctggcaggtgggcccctggggcccctgcaccaccacctgtggccacggctaccagatgagagatgtgaagtgtgtgaatgagctggccagcgctgtgctggaggacacagagtgccacgaggccagccggcccagcgaccggcagtgcagcgtgtcctgtggccggggcacccaggcccgctacgtgtcctgcagagatgccctggacagaattgctgatgagagctactgtgcccacctgcccaggcctgctgagatctgggactgcttcaccccctgtggggagtggcaggccggggactggagcccctgcagcgccagctgtggccacggcaagaccacccggcaggtgctgtgcatgaactaccaccagcccattgatgagaactactgtgaccctgaggtgcggcccctgatggagcaggagtgcagcctggccgcctgccccccagcccacagccacttccccagcagccctgtgcagcccagctactacctgagcaccaacctgcccctgacccagaagctggaggacaatgaaaaccaggtggtgcaccccagcgtgcggggcaaccagtggaggacaggcccctggggcagctgcagcagcagctgcagcggcggcctgcagcacagagctgtggtgtgccaggatgaaaatggccagagcgccagctactgtgatgctgccagcaagcccccagagctgcagcagtgtggccctggcccctgcccccagtggaactacggcaactggggagaatgttcccagacctgtggcggcggcatcaagagccggctggtgatctgccagttccccaacggccagatcctggaggaccacaactgtgagatcgtgaacaagccacccagcgtcatccagtgccacatgcacgcctgcccagcagatgtgtcctggcaccaggagccctggaccagcgaggacctgaaggtgaagctgctgccccagaggaccatcatcctgtgggagctgatgaagaacatcttctgccacggcaagcacagccacatgtacctgatcaacgtggtgacagaccacctgctgtaccccaggcactgtgaccctgagaccatcgagacctacttcctgagcctgtggagcctgcagttcacctggggagacctgaagtactacaagaacagcctgtag

SEQ ID NO: 142652 - DNA, 4515 bp, synthetic construct
  misc_feature 1..4515: note = Description of Artificial Sequence: Synthetic coding sequence
  source 1..4515: mol_type = other DNA
atgtgggtggccaagtggctgaccggcctgctgtaccacctgagcctcttcatcaccaggtcctgggaggtggacttccacccccggcaggaggccctggtgaggaccctgaccagctatgaggtggtgattcctgagcgggtgaatgaatttggagaggtgttcccccagagccaccacttcagccggcagaagaggagcagcgaggccctggagcccatgcccttccgcacccactaccgcttcaccgcctacggccagctgttccagctgaacctgacagcagatgccagcttcctggccgccggctacacagaggtgcacctgggcaccccagagcggggggcctgggagagtgatgctggccccagcgacctgcggcactgcttctaccggggccaggtgaacagccaggaggactacaaggctgtggtgtccctgtgtggcggcctgaccggcaccttcaagggccagaatggagagtacttcctggagcccatcatgaaggcagatggaaatgaatatgaagatggccacaacaagccccacctgatctaccggcaggacctgaacaacagcttcctgcagaccctgaagtactgcagcgtgtctgagagccagatcaaggagaccagcctgcccttccacacctacagcaacatgaatgaagacctgaatgtgatgaaggagcgggtgctgggccacaccagcaagaatgtgcccctgaaggatgagcggcggcacagcaggaagaagaggctcatctcctacccccgctacatcgagatcatggtgacagcagatgccaaggtggtgtctgcccacggcagcaacctgcagaactacatcctgaccctgatgagcatcgtggccaccatctacaaggaccccagcatcggcaacctgatccacatcgtggtggtgaagctggtgatgatccaccgggaggaggagggccctgtgatcaactttgatggagccaccaccctgaagaacttctgctcctggcagcagacccagaatgacctggatgatgtgcaccccagccaccacgacacagctgtgctgatcacccgggaggacatctgcagcagcaaggagaagtgcaacatgctgggcctgagctacctgggcaccatctgtgaccccctgcagagctgcttcatcaatgaggagaagggcctcatcagcgccttcaccatcgcccacgagctgggccacaccctgggcgtgcagcatgatgacaacccccgctgcaaggagatgaaggtgaccaagtaccacgtgatggccccagccctgtccttccacatgagcccctggagctggagcaactgcagcaggaaatatgtgacagagttcctggacaccggctatggagaatgtctgctggacaagccagatgaggagatctacaacctgcccagcgagctgcccggcagccgctatgatggcaacaagcagtgtgagctggcctttggacctggcagccagatgtgcccccacatcaacatctgcatgcacctgtggtgcaccagcacagagaagctgcacaagggctgcttcacccagcacgtgcccccagcagatggaacagactgtggccctggcatgcactgccgccacggcctgtgtgtgaacaaggagacagagaccaggcctgtgaatggagagtggggcccctgggagccctacagcagctgcagcaggacctgtggcggcggcatcgagagcgccacccggcgctgcaacagacctgagcccagaaatggaggcaactactgtgtgggccgcaggatgaagttccgcagctgcaacacagacagctgccccaagggcacccaggacttccgggagaagcagtgcagcgacttcaacgggaagcacctggacatcagcggcatccccagcaatgtgcgctggctgccccgctacagcggcatcggcaccaaggaccgctgcaagctgtactgccaggtggccggcaccaactacttctacctgctgaaggacatggtggaggatggcaccccctgtggcacagagacccatgacatctgtgtgcagggccagtgcatggctgctggctgtgaccacgtgctgaacagcagcgccaagattgacaagtgtggggtgtgtggcggggacaacagcagctgcaagaccatcaccggggtcttcaacagcagccactacggctacaacgtggtggtgaagatcccagctggggccaccaacgtggacatccggcagtacagctacagcggccagccagatgacagctacctggccctgagtgatgctgagggcaacttcctgttcaatggaaacttcctgctgagcaccagcaagaaggagatcaacgtgcagggcaccaggacagtcatcgagtacagcggcagcaacaatgctgtggagcgcatcaacagcaccaaccggcaggagaaggagctgatcctgcaggtgctgtgtgtgggcaacctgtacaacccagatgtgcactacagcttcaacatccccctggaggagaggagtgacatgttcacctgggacccctacggcccctgggagggctgcaccaagatgtgccagggcctgcagaggaggaacatcacctgcatccacaagagtgaccacagcgtggtgtctgacaaggaatgtgaccacctgcccctgcccagctttgtgacccagagctgcaacacagactgtgagctgcgctggcacgtgattggcaagtcagaatgtagcagccagtgtggccagggctaccgcaccctggacatccactgcatgaagtacagcatccacgagggccagacagtgcaggtggatgaccactactgtggggaccagctgaagccacccacccaggagctgtgccacggcaactgtgtgttcacccgctggcactacagcgagtggagccagtgcagccgcagctgtggcggcggggagaggagccgggagagctactgcatgaacaactttggccaccggctggccgacaatgaatgccaggagctgagccgggtgacccgggagaactgcaatgagttcagctgccccagctgggccgccagcgagtggagcgagtgcctggtgacctgtgggaagggcaccaagcagaggcaggtgtggtgccagctgaatgtggaccacctgagtgatggcttctgcaacagcagcaccaagccagagagcctgagcccctgtgagctgcacacctgtgcctcctggcaggtgggcccctggggcccctgcaccaccacctgtggccacggctaccagatgagagatgtgaagtgtgtgaatgagctggccagcgctgtgctggaggacacagagtgccacgaggccagccggcccagcgaccggcagagctgtgtgctgaccccctgcagcttcatcagcaagctggagacagccctgctgcccaccgtgctgatcaagaagatggcccagtggaggcatggctcctggaccccctgcagcgtgtcctgtggccggggcacccaggcccgctacgtgtcctgcagagatgccctggacagaattgctgatgagagctactgtgcccacctgcccaggcctgctgagatctgggactgcttcaccccctgtggggagtggcaggccggggactggagcccctgcagcgccagctgtggccacggcaagaccacccggcaggtgctgtgcatgaactaccaccagcccattgatgagaactactgtgaccctgaggtgcggcccctgatggagcaggagtgcagcctggccgcctgccccccagcccacagccacttccccagcagccctgtgcagcccagctactacctgagcaccaacctgcccctgacccagaagctggaggacaatgaaaaccaggtggtgcaccccagcgtgcggggcaaccagtggaggacaggcccctggggcagctgcagcagcagctgcagcggcggcctgcagcacagagctgtggtgtgccaggatgaaaatggccagagcgccagctactgtgatgctgccagcaagcccccagagctgcagcagtgtggccctggcccctgcccccagtggaactacggcaactggggagaatgttcccagacctgtggcggcggcatcaagagccggctggtgatctgccagttccccaacggccagatcctggaggaccacaactgtgagatcgtgaacaagccacccagcgtcatccagtgccacatgcacgcctgcccagcagatgtgtcctggcaccaggagccctggaccagcgaggacctgaaggtgaagctgctgccccagaggaccatcatcctgtgggagctgatgaagaacatcttctgccacggcaagcacagccacatgtacctgatcaacgtggtgacagaccacctgctgtaccccaggcactgtgaccctgagaccatcgagacctacttcctgagcctgtggagcctgcagttcacctggggagacctgaagtactacaagaacagcctgtag

SEQ ID NO: 142653 - DNA, 3618 bp, synthetic construct
  misc_feature 1..3618: note = Description of Artificial Sequence: Synthetic coding sequence
  source 1..3618: mol_type = other DNA
atggtgctgctgagcctgtggctgattgctgctgccctggtggaggtgaggaccagcgcagatggccaggccggaaatgaggagatggtgcagattgacctgcccatcaagcgctaccgggagtatgagctggtgacccctgtgtccaccaacctggagggccgctacctgagccacaccctgagcgccagccacaagaagaggtctgccagagatgtgagcagcaaccctgagcagctgttcttcaacatcacagccttcggcaaggacttccacctgcggctgaagcccaacacccagctggtggcccctggagctgtggtggagtggcatgagaccagcctggtgcccggcaacatcacagaccccatcaacaaccaccagcccggcagcgccacctaccgcatcagaagaacagagcccctgcagaccaactgtgcctacgtgggggacatcgtggacatccctggcacctctgtggccatcagcaactgtgatggcctggccggcatgatcaagagtgacaatgaggagtacttcatcgagcccctggagcggggcaagcagatggaggaggagaagggccgcatccacgtggtgtacaagaggtctgctgtggagcaggcccccatcgacatgagcaaggacttccactaccgggagagtgacctggagggcctggatgacctgggcaccgtgtatggcaacatccaccagcagctgaatgagaccatgagaagaagaagacatgctggagaaaatgactacaacatcgaggtgctgctgggcgtggatgattctgtggtgcgcttccacggcaaggagcacgtgcagaactacctgctgaccctgatgaacatcgtgaatgagatctaccatgatgagagcctgggcgtgcacatcaacgtggtgctggtgaggatgatcatgctgggctacgccaagagcatcagcctcatcgagcggggcaaccccagccgcagcctggagaatgtgtgccgctgggccagccagcagcagaggagtgacctgaaccacagcgagcaccacgaccacgccatcttcctgacccggcaggactttggacctgctggcatgcagggctacgcccctgtgacaggcatgtgccaccctgtgcgcagctgcaccctgaaccatgaagatggcttcagcagcgcctttgtggtggcccacgagaccggccacgtgctgggcatggagcatgatggccagggcaacagatgtggagatgaaacagccatgggctctgtgatggcccccctggtgcaggccgccttccaccgctaccactggagccgctgcagcggccaggagctgaagcgctacatccacagctatgactgcctgctggatgacccctttgaccatgactggcccaagctgcctgagctgcccggcatcaactacagcatggatgagcagtgccgctttgattttggagtgggctacaagatgtgcacagccttccgcacctttgacccctgcaagcagctgtggtgcagccacccagacaacccctacttctgcaagaccaagaagggcccccccctggatggaacagaatgtgccgccggcaagtggtgctacaagggccactgcatgtggaagaatgccaaccagcagaagcaggacggcaactggggctcctggaccaagtttggcagctgcagcaggacctgtggcactggagtgcgcttccgcacccggcagtgcaacaaccccatgcccatcaatggaggccaggactgccctggggtgaactttgagtaccagctgtgcaacacagaggagtgccagaagcactttgaggacttccgggcccagcagtgccagcagaggaacagccactttgagtaccagaacaccaagcaccactggctgccctatgagcacccagaccccaagaagcgctgccacctgtactgccagagcaaggagactggagatgtggcctacatgaagcagctggtgcatgatggcacccactgcagctacaaggacccctacagcatctgtgtgagaggagaatgtgtgaaggtgggctgtgacaaggagatcggcagcaacaaggtggaggacaagtgtggggtgtgtggcggggacaacagccactgcaggacagtgaagggcaccttcaccaggacccccaggaagctgggctacctgaagatgtttgacatccccccaggggcccggcacgtgctgatccaggaggatgaggccagcccccacatcctggccatcaagaaccaggccaccggccactacatcctgaatggcaagggggaggaggccaagagcaggaccttcatcgacctgggcgtggagtgggactacaacattgaagatgacatcgagagcctgcacacagatggccccctgcatgaccccgtcatcgtgctgatcatcccccaggagaatgacaccaggagcagcctgacctacaagtacatcatccacgaggacagcgtgcccaccatcaacagcaacaacgtcatccaggaggagctggacacctttgagtgggccctgaagtcctggagccagtgcagcaagccctgtggcggcggcttccagtacaccaagtatggctgcaggaggaagagtgacaacaagatggtgcacaggagcttctgtgaggccaacaagaagcccaagcccatccggaggatgtgcaacatccaggagtgcacccaccccctgtgggtggccgaggagtgggagcactgcaccaagacctgtggcagcagcggctaccagctgaggacagtgcgctgcctgcagcccctgctggatggcaccaacagatctgtgcacagcaagtactgcatgggagacaggcctgagagccggcggccctgcaacagagtgccctgcccagcccagtggaagacaggcccctggagcgaatgttctgtgacctgtggggagggcacagaggtgcggcaggtgctgtgcagagctggggaccactgtgatggagagaagccagagagcgtgcgggcctgccagctgcccccctgcaatgatgagccctgcctgggggacaagagcatcttctgccagatggaggtgctggcccgctactgcagcatccctggctacaacaagctgtgctgtgagagctgcagcaagaggagcagcaccctgcccccaccctacctgctggaggccgctgagacccatgatgatgtgatcagcaaccccagcgacctgcccaggagcctggtgatgcccaccagcctggtgccctaccacagcgagaccccagccaagaagatgagcctgagcagcatcagctctgtgggcggccccaatgcctatgctgccttccggcccaacagcaagccagatggagccaacctgcggcagaggtctgcccagcaggccggcagcaagacagtgcggctggtgacagtgcccagcagcccccccaccaagagggtgcacctgagcagcgccagccagatggccgccgccagcttctttgctgccagtgacagcatcggggccagcagccaggcccggaccagcaagaaggatggcaagatcatcgacaacagaagacccaccaggagcagcaccctggagaggtag

SEQ ID NO: 142654 - DNA, 1020 bp, synthetic construct
  misc_feature 1..1020: note = Description of Artificial Sequence: Synthetic coding sequence
  source 1..1020: mol_type = other DNA
atgagccagacaggcagccaccctggccggggcctggccggccgctggctgtggggcgcccagccctgcctgctgctgcccatcgtgcccctgtcctggctggtgtggctgctgctgctgctgctggccagcctgctgcccagcgcccggctggccagccccctgccccgggaggaggagatcgtgtttcctgagaagctgaatggatctgtgctgcccggcagcggggccccagcccggctgctgtgccgcctgcaggccttcggggagaccctgctgctggagctggagcaggacagcggcgtgcaggtggagggcctgactgtgcagtacctgggccaggcccctgagctgctgggcggcgctgagcccggcacctacctgaccggcaccatcaatggagaccctgagagcgtggccagcctgcactgggatggaggagccctgctgggcgtgctgcagtacagaggagctgagctgcacctgcagcccctggagggcggcacccccaacagcgctgggggccctggggcccacatcctgcggaggaagagccctgccagcggccagggccccatgtgcaatgtgaaggcccccctgggcagccccagcccccggccccggcgggccaagagatttgccagcctgagcagatttgtggagaccctggtggtggctgatgacaagatggccgccttccacggggccggcctgaagcgctacctgctgactgtgatggctgctgctgccaaggccttcaagcaccccagcatcagaaatcctgtgtccctggtggtgacccggctggtgatcctgggcagcggggaggagggcccccaggtgggccccagcgctgcccagaccctgcgctccttctgtgcctggcagaggggcctgaacaccccagaagattctgaccctgaccactttgacacagccatcctcttcacccggcaggtgcggccccagagcgccccccaggccatgcactgcaccatcctgcggagcgccaccacctag

SEQ ID NO: 142655 - DNA, 2514 bp, synthetic construct
  misc_feature 1..2514: note = Description of Artificial Sequence: Synthetic coding sequence
  source 1..2514: mol_type = other DNA
atgagccagacaggcagccaccctggccggggcctggccggccgctggctgtggggcgcccagccctgcctgctgctgcccatcgtgcccctgtcctggctggtgtggctgctgctgctgctgctggccagcctgctgcccagcgcccggctggccagccccctgccccgggaggaggagatcgtgtttcctgagaagctgaatggatctgtgctgcccggcagcggggccccagcccggctgctgtgccgcctgcaggccttcggggagaccctgctgctggagctggagcaggacagcggcgtgcaggtggagggcctgactgtgcagtacctgggccaggcccctgagctgctgggcggcgctgagcccggcacctacctgaccggcaccatcaatggagaccctgagagcgtggccagcctgcactgggatggaggagccctgctgggcgtgctgcagtacagaggagctgagctgcacctgcagcccctggagggcggcacccccaacagcgctgggggccctggggcccacatcctgcggaggaagagccctgccagcggccagggccccatgtgcaatgtgaaggcccccctgggcagccccagcccccggccccggcgggccaagagatttgccagcctgagcagatttgtggagaccctggtggtggctgatgacaagatggccgccttccacggggccggcctgaagcgctacctgctgactgtgatggctgctgctgccaaggccttcaagcaccccagcatcagaaatcctgtgtccctggtggtgacccggctggtgatcctgggcagcggggaggagggcccccaggtgggccccagcgctgcccagaccctgcgctccttctgtgcctggcagaggggcctgaacaccccagaagattctgaccctgaccactttgacacagccatcctcttcacccggcaggacctgtgtggggtgtccacctgtgacaccctgggcatggctgatgtgggcaccgtgtgtgaccctgcccggagctgtgccatcgtggaggatgatggcctgcagagcgccttcaccgctgcccacgagctgggccacgtgttcaacatgctgcatgacaacagcaagccctgcatcagcctgaatggccccctgagcaccagcagacatgtgatggcccctgtgatggcccacgtggaccctgaggagccctggagcccctgcagcgcccgcttcatcacagacttcctggacaatggctacggccactgcctgctggacaagccagaggcccccctgcacctgcctgtgaccttccctgggaaggactatgatgctgaccggcagtgccagctgacctttggaccagacagccgccactgcccccagctgcccccaccctgtgccgccctgtggtgcagcggccacctgaatggacatgccatgtgccagaccaagcacagcccctgggcagatggcaccccctgtggccctgcccaggcctgcatgggcggccgctgcctgcacatggaccagctgcaggacttcaacatcccccaggccggcggctggggcccctggggcccctggggagactgcagcaggacctgtggcggcggcgtgcagttcagcagccgggactgcaccaggcctgtgcccagaaatggaggcaagtactgtgagggccgccgcacccgcttccgcagctgcaacacagaggactgccccaccggcagcgccctgaccttccgggaggagcagtgtgccgcctacaaccacaggacagacctcttcaagagcttccctggccccatggactgggtgccccgctacacaggagtggccccccaggaccagtgcaagctgacctgccaggcccaggccctgggctactactacgtgctggagccccgggtggtggatggcaccccctgcagcccagacagcagctctgtgtgtgtgcagggccgctgcatccacgccggctgtgaccgcatcatcggcagcaagaagaagtttgacaagtgcatggtgtgtggaggagatggcagcggctgcagcaagcagagcggcagcttcaggaagttccgctatggctacaacaacgtggtgaccatcccagctggggccacccacatcctggtgcggcagcagggcaaccctggccacaggagcatctacctggccctgaagctgcctgatggcagctatgccctgaatggagagtacaccctgatgcccagccccacagatgtggtgctgcccggggctgtgtccctgcgctacagcggggccacagctgccagcgagaccctgagcggccacggccccctggcccagcccctgaccctgcaggtgctggtggccggcaacccccaggacacccggctgcgctacagcttctttgtgccccggcccacccccagcaccccccggcccaccccccaggactggctgcaccggcgggcccagatcctggagatcctgcggcggcggccctgggccggcaggaagtag

SEQ ID NO: 142656 - DNA, 2793 bp, synthetic construct
  misc_feature 1..2793: note = Description of Artificial Sequence: Synthetic coding sequence
  source 1..2793: mol_type = other DNA
atgctgctgggctgggccagcctgctgctgtgtgccttccggctgcccctggccgctgtgggccctgctgccaccccagcccaggacaaggccggccagcccccaacagctgctgctgctgcccagccccggcggcggcagggcgaggaggtgcaggagagagctgagcccccaggccacccccaccccctggcccagaggcggcgcagcaagggcctggtgcagaacatcgaccagctgtacagcggcggcggcaaggtgggctacctggtgtatgccggcggccgccgcttcctgctggacctggagagagatggctctgtgggcattgctggctttgtgcctgctgggggcggcaccagcgccccctggaggcacaggagccactgcttctaccggggcaccgtggatggcagccccaggagcctggccgtgtttgacctgtgtggcggcctggatggcttctttgctgtgaagcacgcccgctacaccctgaagcccctgctgcggggcccctgggccgaggaggagaagggccgggtgtatggagatggcagcgcccgcatcctgcacgtgtacacccgggagggcttctcctttgaggccctgcccccccgggccagctgtgagaccccagccagcaccccagaggcccatgaacatgccccagcccacagcaaccccagcggccgggccgccctggccagccagctgctggaccagagcgccctgagccctgctgggggcagcggcccccagacctggtggaggagaagaagaagaagcatcagccgggcccggcaggtggagctgctgctggtggctgatgcctccatggcccggctgtatggccggggcctgcagcactacctgctgaccctggccagcatcgccaacagactctacagccacgccagcattgagaaccacatccggctggccgtggtgaaggtggtggtgctgggggacaaggacaagagcctggaggtgtccaagaatgctgccaccaccctgaagaacttctgcaagtggcagcaccagcacaaccagctgggagatgaccacgaggagcactatgatgctgccatcctcttcacccgggaggacctgtgtggccaccacagctgtgacaccctgggcatggctgatgtgggcaccatctgcagccctgagaggagctgtgctgtgattgaagatgatggcctgcacgccgccttcaccgtggcccacgagatcggccacctgctgggcctgagccatgatgacagcaagttctgtgaggagaccttcggcagcacagaggacaagaggctgatgagcagcatcctgaccagcattgatgccagcaagccctggagcaagtgcaccagcgccaccatcacagagttcctggatgatggccacggcaactgcctgctggacctgcccaggaagcagatcctgggccctgaggagctgcccggccagacctatgatgccacccagcagtgcaacctgacctttggacctgagtacagcgtgtgccccggcatggatgtgtgtgcccggctgtggtgtgctgtggtgcggcagggccagatggtgtgcctgaccaagaagctgcctgctgtggagggcaccccctgtgggaagggccgcatctgcctgcagggcaaatgtgtggacaagaccaagaagaagtactacagcaccagcagccacggcaactggggctcctggggctcctggggccagtgcagccgcagctgtggcggcggcgtgcagtttgcctaccgccactgcaacaacccagcccccaggaacaacggccgctactgcaccgggaagagggccatctaccgcagctgcagcctgatgccctgcccccccaacgggaagagcttcagacatgagcagtgtgaggccaagaatggctaccagagtgatgccaagggcgtgaagacctttgtggagtgggtgcccaagtatgccggcgtgctgcctgcagatgtgtgcaagctgacctgccgggccaagggcaccggctactacgtggtgttcagccccaaggtgacagatggaacagaatgtcggctgtacagcaacagcgtgtgtgtgcggggcaaatgtgtgaggacaggctgtgatggcatcatcggcagcaagctgcagtatgacaagtgtggggtgtgtggcggggacaacagcagctgcaccaagatcgtgggcaccttcaacaagaagagcaagggctacacagatgtggtgcgcatccctgagggcgccacccacatcaaggtgcggcagttcaaggccaaggaccagacccgcttcaccgcctacctggccctgaagaagaagaatggagagtacctgatcaatggcaagtacatgatcagcaccagcgagaccatcatcgacatcaatggcaccgtgatgaactacagcggctggagccacagagatgacttcctgcacggcatgggctacagcgccaccaaggagatcctgattgtgcagatcctggccacagaccccaccaagcccctggatgtgcgctacagcttctttgtgcccaagaagagcacccccaaggtgaacagcgtgaccagccacggcagcaacaaggtgggcagccacaccagccagccccagtgggtgacaggcccctggctggcctgcagcaggacctgtgacaccggctggcacaccaggacagtgcagtgccaggacggcaacaggaagctggccaagggctgccccctgagccagaggcccagcgccttcaagcagtgcctgctgaagaagtgctag

SEQ ID NO: 142657 - DNA, 2577 bp, synthetic construct
  misc_feature 1..2577: note = Description of Artificial Sequence: Synthetic coding sequence
  source 1..2577: mol_type = other DNA
atggagatcctgtggaagaccctgacctggatcctgagcctcatcatggccagcagcgagttccacagcgaccaccggctgagctacagcagccaggaggagttcctgacctacctggagcactaccagctgaccatccccatccgggtggaccagaatggagccttcctgtccttcaccgtgaagaatgacaagcacagcagaagaagaagatccatggaccccatcgacccccagcaggccgtgtccaagctgttcttcaagctgagcgcctacggcaagcacttccacctgaacctgaccctgaacacagactttgtgtccaagcacttcaccgtggagtactggggcaaggatggcccccagtggaagcatgacttcctggacaactgccactacacaggctacctgcaggaccagaggagcaccaccaaggtggccctgagcaactgtgtgggcctgcatggagtcatcgccacagaagatgaggagtacttcatcgagcccctgaagaacaccacagaggacagcaagcacttctcctatgaaaatggccacccccacgtgatctacaagaagagcgccctgcagcagaggcacctgtatgaccacagccactgcggcgtgtctgacttcaccaggtctgggaagccctggtggctgaatgacaccagcacagtgtcctacagcctgcccatcaacaacacccacatccaccaccggcagaagaggtctgtgtccattgaaagatttgtggagaccctggtggtggccgacaagatgatggtgggctaccacggcaggaaggacatcgagcactacatcctgtctgtgatgaacatcgtggccaagctgtacagagacagcagcctgggcaatgtggtgaacatcatcgtggcccggctgattgtgctgacagaggaccagcccaacctggagatcaaccaccacgccgacaagagcctggacagcttctgcaagtggcagaagagcatcctgagccaccagagtgatggcaacaccatcccagaaaatggaattgcccaccacgacaatgctgtgctgatcaccaggtatgacatctgcacctacaagaacaagccctgtggcaccctgggcctggcctctgtggccggcatgtgtgagcctgagaggagctgcagcatcaatgaagatattggcctgggcagcgccttcaccatcgcccatgaaattggccacaactttggcatgaaccatgatggcatcggcaacagctgcaggaaggtgatgaagcagcagtatggcagcagccactactgtgagtaccagagcttcttcctggtgtgcctgcagagccggctgcaccaccagctgagccgggaggtgtgccgggagctgtggtgcctgagcaagagcaacagatgtgtgaccaacagcatcccagctgctgagggcaccctgtgccagacaggcaacatcgagaagggctggtgctaccagggcgactgtgtgcccttcggcacctggccccagagcattgatggcggctggggcccctggagcctgtggggagaatgttccaggacctgtggcggcggcgtgagcagcagcctgcggcactgtgacagccctgcccccagcggcggcggcaagtactgcctgggggagaggaagcgctaccgcagctgcaacacagacccctgccccctgggcagccgggacttccgggagaagcagtgtgccgactttgacaacatgcccttccggggcaagtactacaactggaagccctacacaggaggcggcgtgaagccctgtgccctgaactgcctggccgagggctacaacttctacacagagcgggccccagctgtgattgatggcacccagtgcaatgctgacagcctggacatctgcatcaatggagagtgcaagcacgtgggctgtgacaacatcctgggcagtgatgccagagaagatcgctgccgggtgtgtggaggagatggcagcacctgtgatgccatcgagggcttcttcaatgacagcctgccccggggcggctacatggaggtggtgcagatcccccggggctctgtgcacatcgaggtgcgggaggtggccatgagcaagaactacatcgccctgaagtcagaaggagatgactactacatcaatggagcctggaccatcgactggcccaggaagtttgatgtggccggcacagccttccactacaagaggcccacagatgagcctgagagcctggaggccctgggccccaccagtgaaaatctcatcgtgatggtgctgctgcaggagcagaacctgggcatccgctacaagttcaacgtgcccatcaccaggactggaagtggggacaatgaggtgggcttcacctggaaccaccagccctggagcgaatgttctgccacctgtgccggcggcaagatgcccacccggcagcccacccagagggcccgctggaggaccaagcacatcctgtcctatgccctgtgcctgctgaagaagctgattggcaacatcagctgccgctttgccagcagctgcaacctggccaaggagaccctgctgtag

SEQ ID NO: 142658 - DNA, 3354 bp, synthetic construct
  misc_feature 1..3354: note = Description of Artificial Sequence: Synthetic coding sequence
  source 1..3354: mol_type = other DNA
atggagatcctgtggaagaccctgacctggatcctgagcctcatcatggccagcagcgagttccacagcgaccaccggctgagctacagcagccaggaggagttcctgacctacctggagcactaccagctgaccatccccatccgggtggaccagaatggagccttcctgtccttcaccgtgaagaatgacaagcacagcagaagaagaagatccatggaccccatcgacccccagcaggccgtgtccaagctgttcttcaagctgagcgcctacggcaagcacttccacctgaacctgaccctgaacacagactttgtgtccaagcacttcaccgtggagtactggggcaaggatggcccccagtggaagcatgacttcctggacaactgccactacacaggctacctgcaggaccagaggagcaccaccaaggtggccctgagcaactgtgtgggcctgcatggagtcatcgccacagaagatgaggagtacttcatcgagcccctgaagaacaccacagaggacagcaagcacttctcctatgaaaatggccacccccacgtgatctacaagaagagcgccctgcagcagaggcacctgtatgaccacagccactgcggcgtgtctgacttcaccaggtctgggaagccctggtggctgaatgacaccagcacagtgtcctacagcctgcccatcaacaacacccacatccaccaccggcagaagaggtctgtgtccattgaaagatttgtggagaccctggtggtggccgacaagatgatggtgggctaccacggcaggaaggacatcgagcactacatcctgtctgtgatgaacatcgtggccaagctgtacagagacagcagcctgggcaatgtggtgaacatcatcgtggcccggctgattgtgctgacagaggaccagcccaacctggagatcaaccaccacgccgacaagagcctggacagcttctgcaagtggcagaagagcatcctgagccaccagagtgatggcaacaccatcccagaaaatggaattgcccaccacgacaatgctgtgctgatcaccaggtatgacatctgcacctacaagaacaagccctgtggcaccctgggcctggcctctgtggccggcatgtgtgagcctgagaggagctgcagcatcaatgaagatattggcctgggcagcgccttcaccatcgcccatgaaattggccacaactttggcatgaaccatgatggcatcggcaacagctgtggcaccaagggccatgaagctgccaagctgatggccgcccacatcacagccaacaccaaccccttctcctggagcgcctgcagccgggactacatcaccagcttcctggacagcggccggggcacctgcctggacaatgagccccccaagagggacttcctgtacccagctgtggcccctggccaggtgtatgatgctgatgagcagtgccgcttccagtacggggccaccagccggcagtgcaagtatggagaggtgtgccgggagctgtggtgcctgagcaagagcaacagatgtgtgaccaacagcatcccagctgctgagggcaccctgtgccagacaggcaacatcgagaagggctggtgctaccagggcgactgtgtgcccttcggcacctggccccagagcattgatggcggctggggcccctggagcctgtggggagaatgttccaggacctgtggcggcggcgtgagcagcagcctgcggcactgtgacagccctgcccccagcggcggcggcaagtactgcctgggggagaggaagcgctaccgcagctgcaacacagacccctgccccctgggcagccgggacttccgggagaagcagtgtgccgactttgacaacatgcccttccggggcaagtactacaactggaagccctacacaggaggcggcgtgaagccctgtgccctgaactgcctggccgagggctacaacttctacacagagcgggccccagctgtgattgatggcacccagtgcaatgctgacagcctggacatctgcatcaatggagagtgcaagcacgtgggctgtgacaacatcctgggcagtgatgccagagaagatcgctgccgggtgtgtggaggagatggcagcacctgtgatgccatcgagggcttcttcaatgacagcctgccccggggcggctacatggaggtggtgcagatcccccggggctctgtgcacatcgaggtgcgggaggtggccatgagcaagaactacatcgccctgaagtcagaaggagatgactactacatcaatggagcctggaccatcgactggcccaggaagtttgatgtggccggcacagccttccactacaagaggcccacagatgagcctgagagcctggaggccctgggccccaccagtgaaaatctcatcgtgatggtgctgctgcaggagcagaacctgggcatccgctacaagttcaacgtgcccatcaccaggactggaagtggggacaatgaggtgggcttcacctggaaccaccagccctggagcgaatgttctgccacctgtgccggcggcgtgcagaggcaggaggtggtgtgcaagaggctggatgacaacagcatcgtgcagaacaactactgtgaccctgacagcaagcccccagagaaccagagggcctgcaacacagagccctgccccccagagtggttcatcggggactggctggagtgcagcaagacctgtgatggcggcatgaggaccagggctgtgctgtgcatcaggaagattggccccagcgaggaggagaccctggactacagcggctgcctgacccacaggcctgtggagaaggagccctgcaacaaccagagctgccccccccagtgggtggccctggactggagcgagtgcacccccaagtgtggccctggcttcaagcacagaattgtgctgtgcaagagcagtgacctgagcaagaccttccctgctgcccagtgcccagaggagagcaagccccctgtgcgcatccgctgcagcctgggccgctgccccccaccccgctgggtgactggagactggggccagtgcagcgcccagtgtggcctgggccagcagatgaggacagtgcagtgcctgagctacacaggccaggccagcagtgactgcctggagaccgtgcggccccccagcatgcagcagtgtgagagcaaatgtgacagcacccccatcagcaacacagaggagtgcaaggatgtgaacaaggtggcctactgccccctggtgctgaagttcaagttctgcagccgggcctacttccggcagatgtgctgcaagacctgccagggccactag

SEQ ID NO: 142659 - DNA, 1407 bp, synthetic construct
  misc_feature 1..1407: note = Description of Artificial Sequence: Synthetic coding sequence
  source 1..1407: mol_type = other DNA
atggagatcctgtggaagaccctgacctggatcctgagcctcatcatggccagcagcgagttccacagcgaccaccggctgagctacagcagccaggaggagttcctgacctacctggagcactaccagctgaccatccccatccgggtggaccagaatggagccttcctgtccttcaccgtgaagaatgacaagcacagcagaagaagaagatccatggaccccatcgacccccagcaggccgtgtccaagctgttcttcaagctgagcgcctacggcaagcacttccacctgaacctgaccctgaacacagactttgtgtccaagcacttcaccgtggagtactggggcaaggatggcccccagtggaagcatgacttcctggacaactgccactacacaggctacctgcaggaccagaggagcaccaccaaggtggccctgagcaactgtgtgggcctgcatggagtcatcgccacagaagatgaggagtacttcatcgagcccctgaagaacaccacagaggacagcaagcacttctcctatgaaaatggccacccccacgtgatctacaagaagagcgccctgcagcagaggcacctgtatgaccacagccactgcggcgtgtctgacttcaccaggtctgggaagccctggtggctgaatgacaccagcacagtgtcctacagcctgcccatcaacaacacccacatccaccaccggcagaagaggtctgtgtccattgaaagatttgtggagaccctggtggtggccgacaagatgatggtgggctaccacggcaggaaggacatcgagcactacatcctgtctgtgatgaacatcgtggccaagctgtacagagacagcagcctgggcaatgtggtgaacatcatcgtggcccggctgattgtgctgacagaggaccagcccaacctggagatcaaccaccacgccgacaagagcctggacagcttctgcaagtggcagaagagcatcctgagccaccagagtgatggcaacaccatcccagaaaatggaattgcccaccacgacaatgctgtgctgatcaccaggtatgacatctgcacctacaagaacaagccctgtggcaccctgggcctggcctctgtggccggcatgtgtgagcctgagaggagctgcagcatcaatgaagatattggcctgggcagcgccttcaccatcgcccatgaaattggccacaactttggcatgaaccatgatggcatcggcaacagctgtggcaccaagggccatgaagctgccaagctgatggccgcccacatcacagccaacaccaaccccttctcctggagcgcctgcagccgggactacatcaccagcttcctggagttcctgaagctgggggacagcatcagcggcagctag

SEQ ID NO: 142660 - DNA, 5061 bp, synthetic construct
  misc_feature 1..5061: note = Description of Artificial Sequence: Synthetic coding sequence
  source 1..5061: mol_type = other DNA
atgcctgggggccccagccccaggagccctgcccccctgctgcggcccctgctgctgctgctgtgtgccctggcccctggggcccctggccctgcccctggccgggccacagagggccgggccgccctggacatcgtgcaccctgtgcgggtggatgctgggggcagcttcctgtcctatgagctgtggccccgggccctgaggaagagagatgtgtctgtgagaagagatgccccagccttctatgagctgcagtaccggggccgggagctgcgcttcaacctgacagccaaccagcacctgctggcccctggctttgtgtctgagacccggcggcggggcggcctgggccgggcccacatccgggcccacaccccagcctgccacctgctgggggaggtgcaggaccctgagctggagggcggcctggccgccatcagcgcctgtgatggcctgaagggcgtcttccagctgagcaatgaagactacttcatcgagcccctggacagcgccccagcccggcccggccacgcccagccccacgtggtgtacaagaggcaggcccctgagcggctggcccagagaggagacagcagcgcccccagcacctgtggggtgcaggtgtacccagagctggagagcagaagagagcgctgggagcagaggcagcagtggaggcggccccggctgcggcggctgcaccagaggtctgtgtccaaggagaagtgggtggagaccctggtggtggctgatgccaagatggtggagtaccacggccagccccaggtggagagctatgtgctgaccatcatgaacatggtggccggcctcttccatgaccccagcatcggcaaccccatccacatcaccatcgtgcggctggtgctgctggaggatgaggaggaggacctgaagatcacccaccacgccgacaacaccctgaagagcttctgcaagtggcagaagagcatcaacatgaagggagatgcccaccccctgcaccacgacacagccatcctgctgaccaggaaggacctgtgtgccgccatgaaccggccctgtgagaccctgggcctgagccacgtggccggcatgtgccagccccacaggagctgcagcatcaatgaagacaccggcctgcccctggccttcaccgtggcccacgagctgggccacagctttggcatccagcatgatggcagcggaaatgactgtgagcctgtgggcaagaggcccttcatcatgagcccccagctgctgtatgatgctgcccccctgacctggagccgctgcagccggcagtacatcacccgcttcctggaccggggctggggcctgtgcctggatgatcctccagccaaggacatcatcgacttccccagcgtgcccccaggagtgctgtatgatgtgagccaccagtgccgcctgcagtacggggcctacagcgccttctgtgaggacatggacaacgtgtgccacaccctgtggtgcagcgtgggcaccacctgccacagcaagctggatgctgctgtggatggcacccgctgtggggagaacaagtggtgcctgagcggggagtgtgtgcctgtgggcttccggcctgaggccgtggatggcggctggagcggctggagcgcctggagcatctgcagccgcagctgtggcatgggcgtgcagagcgctgagcggcagtgcacccagcccacccccaagtacaagggccgctactgtgtgggggagaggaagcgcttccggctgtgcaacctgcaggcctgcccagctggccggcccagcttcagacatgtgcagtgcagccactttgatgccatgctgtacaagggccagctgcacacctgggtgcctgtggtgaatgatgtgaacccctgtgagctgcactgcaggcctgccaatgagtactttgctgagaagctgagagatgctgtggtggatggcaccccctgctaccaggtgcgggccagccgggacctgtgcatcaatggcatctgcaagaatgtgggctgtgactttgaaattgacagcggggccatggaggacagatgtggggtgtgccacggcaatggcagcacctgccacacagtgtctggcacctttgaggaggccgagggcctgggctacgtggatgtgggcctcatcccagctggggcccgggagatccgcatccaggaggtggccgaggccgccaacttcctggccctgcggtctgaggaccctgagaagtacttcctgaatggaggctggaccatccagtggaatggagactaccaggtggccggcaccaccttcacctacgcccggcggggcaactgggagaacctgaccagccctggccccaccaaggagcctgtgtggatccagctgctcttccaggagagcaaccctggggtgcactatgagtacaccatccaccgggaggccggcggccatgatgaggtgcccccacctgtgttctcctggcactacggcccctggaccaagtgcaccgtgacctgtggccggggcgtgcagaggcagaatgtgtactgcctggagcggcaggccggccctgtggatgaggagcactgtgaccccctgggccgcccagatgaccagcagaggaaatgttctgagcagccctgcccagcccgctggtgggccggggagtggcagctgtgcagcagcagctgtggccctgggggcctgagccggcgggctgtgctgtgcatccgctctgtgggcctggatgagcagagcgccctggagcccccagcctgtgagcacctgccccggcccccaacagagaccccctgcaacagacatgtgccctgcccagccacctgggccgtgggcaactggagccagtgcagcgtgacctgtggggagggcacccagaggagaaatgtgctgtgcaccaatgacacaggagtgccctgtgatgaggcccagcagcctgccagcgaggtgacctgcagcctgcccctgtgccgctggcccctgggcaccctgggccctgagggcagcggcagcggcagcagcagccatgagctgttcaatgaagctgacttcatcccccaccacctggccccccggcccagccctgccagcagccccaagccaggcaccatgggaaatgccatcgaggaggaggcccctgagctggacctgcccggccctgtgtttgtggatgacttctactatgactacaacttcatcaacttccacgaggacctgtcctatggccccagcgaggagccagacctggacctggccggcactggagacaggaccccaccaccccacagccaccctgctgcccccagcacaggcagccctgtgcctgccacagagcccccagctgccaaggaggagggcgtgctgggcccctggagccccagcccctggcccagccaggccggccgcagccccccacctccttctgagcagaccccaggcaaccccctcatcaacttcctgcctgaggaggacacccccatcggggccccagacctgggcctgcccagcctgtcctggccccgggtgtccacagatggcctgcagaccccagccaccccagagagccagaatgacttccctgtgggcaaggacagccagagccagctgcccccaccctggagggacaggaccaatgaggtgttcaaggatgatgaggagcccaagggccgcggggccccccacctgcccccccggcccagcagcaccctgccccccctgagccctgtgggcagcacccacagcagccccagcccagatgtggccgagctgtggacaggaggcaccgtggcctgggagcccgccctggagggcggcctgggccctgtggacagcgagctgtggcccaccgtgggcgtggccagcctgctgcccccacccatcgcccccctgcctgagatgaaggtgcgggacagcagcctggagcccggcacccccagcttccccaccccaggccctggctcctgggacctgcagacagtggccgtgtggggcaccttcctgcccaccaccctgaccggcctgggccacatgcctgagcccgccctgaaccctggccccaagggccagcctgagagcctgagccctgaggtgcccctgagcagccggctgctgagcaccccagcctgggacagccctgccaacagccaccgggtgcctgagacccagcccctggcccccagcctggccgaggccggccccccagctgaccccctggtggtgagaaatgccggctggcaggccggcaactggagcgagtgcagcaccacctgtggcctgggcgctgtgtggaggcctgtgcgctgcagcagcggcagagatgaggactgtgccccagctggccggccccagcctgcccggcgctgccacctgcggccctgtgccacctggcacagcggcaactggagcaagtgcagccgcagctgtggcggcggcagctctgtgagagatgtgcagtgtgtggacacccgggacctgcggcccctgcggcccttccactgccagcccggccctgccaagcccccagcccaccggccctgtggggcccagccctgcctgtcctggtacaccagctcctggagagaatgttctgaggcctgtggcggcggggagcagcagaggctggtgacctgcccagagcccggcctgtgtgaggaggccctgcggcccaacaccacccggccctgcaacacccacccctgcacccagtgggtggtgggcccctggggccagtgcagcggcccctgtggcggcggcgtgcagaggcggctggtgaagtgtgtgaacacccagacaggcctgcctgaggaggacagcgaccagtgtggccacgaggcctggccagagagcagccggccctgtggcacagaggactgtgagcctgtggagcccccaagatgtgagcgggaccggctgagctttggcttctgtgagaccctgcggctgctgggccgctgccagctgcccaccatccgcacccagtgctgccgcagctgcagcccccccagccatggagcccccagccggggccaccagagggtggcccggaggtag

SEQ ID NO: 142661 - DNA, 1383 bp, synthetic construct
  misc_feature 1..1383: note = Description of Artificial Sequence: Synthetic coding sequence
  source 1..1383: mol_type = other DNA
atgcctgggggccccagccccaggagccctgcccccctgctgcggcccctgctgctgctgctgtgtgccctggcccctggggcccctggccctgcccctggccgggccacagagggccgggccgccctggacatcgtgcaccctgtgcgggtggatgctgggggcagcttcctgtcctatgagctgtggccccgggccctgaggaagagagatgtgtctgtgagaagagatgccccagccttctatgagctgcagtaccggggccgggagctgcgcttcaacctgacagccaaccagcacctgctggcccctggctttgtgtctgagacccggcggcggggcggcctgggccgggcccacatccgggcccacaccccagcctgccacctgctgggggaggtgcaggaccctgagctggagggcggcctggccgccatcagcgcctgtgatggcctgaagggcgtcttccagctgagcaatgaagactacttcatcgagcccctggacagcgccccagcccggcccggccacgcccagccccacgtggtgtacaagaggcaggcccctgagcggctggcccagagaggagacagcagcgcccccagcacctgtggggtgcaggtgtacccagagctggagagcagaagagagcgctgggagcagaggcagcagtggaggcggccccggctgcggcggctgcaccagaggtctgtgtccaaggagaagtgggtggagaccctggtggtggctgatgccaagatggtggagtaccacggccagccccaggtggagagctatgtgctgaccatcatgaacatggtggccggcctcttccatgaccccagcatcggcaaccccatccacatcaccatcgtgcggctggtgctgctggaggatgaggaggaggacctgaagatcacccaccacgccgacaacaccctgaagagcttctgcaagtggcagaagagcatcaacatgaagggagatgcccaccccctgcaccacgacacagccatcctgctgaccaggaaggacctgtgtgccgccatgaaccggccctgtgagaccctgggcctgagccacgtggccggcatgtgccagccccacaggagctgcagcatcaatgaagacaccggcctgcccctggccttcaccgtggcccacgagctgggccacagcagctgcaccacccccctgcccagccctggccctgctgctgctgccagcatcagccctggcagcctgtctgtgcagaggcagaatgtgtactgcctggagcggcaggccggccctgtggatgaggagcactgtgaccccctgggccgcccagatgaccagcagaggaaatgttctgagcagccctgcccagccagcgcccagtag

SEQ ID NO: 142662 - DNA, 2670 bp, synthetic construct
  misc_feature 1..2670: note = Description of Artificial Sequence: Synthetic coding sequence
  source 1..2670: mol_type = other DNA
atgctgcctgccccagctgccccccgctggccacccctgctgctgctgctgctgctgctgctgcccctggcccggggggccccagcccggcctgctgctgggggccaggccagcgagctggtggtgcccacccggctgcccggcagcgctggggagctggccctgcacctgagcgccttcggcaagggctttgtgctgcggctggccccagatgacagcttcctggcccctgagttcaagattgagcggctgggcggcagcggccgggccactggaggagagcggggcctgcggggctgcttcttctctggaacagtgaatggagagcctgagagcctggccgctgtgtccctgtgccggggcctgagcggcagcttcctgctggatggagaggagttcaccatccagccccagggcgctgggggcagcctggcccagccccaccggctgcagcgctggggccctgctggggcccggcccctgccccggggccctgagtgggaggtggagactggagagggccagaggcaggagcggggggaccaccaggaggacagcgaggaggagagccaggaggaggaggccgagggcgccagcgagcccccaccacccctgggcgccaccagcaggaccaagagatttgtgtctgaggccaggtttgtggagaccctgctggtggctgatgcctccatggccgccttctatggagctgacctgcagaaccacatcctgaccctgatgtctgtggccgcccgcatctacaagcaccccagcatcaagaacagcatcaacctgatggtggtgaaggtgctgattgtggaggatgagaagtggggccctgaggtgtctgacaatggaggcctgaccctgaggaacttctgcaactggcagaggcgcttcaaccagcccagcgacagacaccctgagcactatgacacagccatcctgctgacccggcagaacttctgtggccaggagggcctgtgtgacaccctgggcgtggccgacatcggcaccatctgtgaccccaacaagagctgcagcgtgattgaagatgagggcctgcaggccgcccacaccctggcccacgagctgggccacgtgctgtccatgcctcatgatgacagcaagccctgcacccggctgtttggccccatgggcaagcaccacgtgatggcccccctgtttgtgcacctgaaccagaccctgccctggagcccctgcagcgccatgtacctgacagagctgctggatggcggccatggagactgcctgctggatgccccagctgctgccctgcccctgcccaccggcctgcccggccgcatggccctgtaccagctggaccagcagtgccggcagatcttcggccctgacttccgccactgccccaacaccagcgcccaggatgtgtgtgcccagctgtggtgccacacagatggagctgagcccctgtgccacaccaagaatggcagcctgccctgggcagatggcaccccctgtggccctggccacctgtgcagcgagggcagctgcctgcctgaggaggaggtggagcggcccaagcctgtggctgatggcggctgggccccctggggcccctggggagaatgttccaggacctgtggcggcggcgtgcagttcagccaccgggagtgcaaggaccctgagccccagaatggaggccgctactgcctgggccggcgggccaagtaccagagctgccacacagaagaatgtcctccagatggcaagagcttccgggagcagcagtgtgagaagtacaatgcctacaactacacagacatggatggcaacctgctgcagtgggtgcccaagtatgccggcgtgagcccccgggaccgctgcaagctgttctgccgggcccggggccgctctgagttcaaggtgtttgaggccaaggtgattgatggcaccctgtgtggccctgagaccctggccatctgtgtgcggggccagtgtgtgaaggccggctgtgaccacgtggtggacagccccaggaagctggacaagtgtggggtgtgtggcggcaaaggaaacagctgcaggaaggtgtctggcagcctgacccccaccaactacggctacaatgacatcgtgaccatcccagctggggccaccaacattgatgtgaagcagaggagccaccctggggtgcagaatgatggcaactacctggccctgaagacagcagatggccagtacctgctgaatggaaacctggccatcagcgccatcgagcaggacatcctggtgaagggcaccatcctgaagtacagcggcagcatcgccaccctggagcggctgcagagcttccggcccctgcctgagcccctgactgtgcagctgctgactgtgcctggagaggtgtttcctcccaaggtgaagtacaccttctttgtgcccaatgatgtggacttctccatgcagagcagcaaggagcgggccaccaccaacatcatccagcccctgctgcacgcccagtgggtgctgggggactggagcgaatgtagcagcacctgtggggccggctggcagaggagaacagtggagtgccgggaccccagcggccaggccagcgccacctgcaacaaggccctgaagccagaagatgccaagccctgtgagagccagctgtgccccctgtag

SEQ ID NO: 142663 - DNA, 2757 bp, synthetic construct
  misc_feature 1..2757: note = Description of Artificial Sequence: Synthetic coding sequence
  source 1..2757: mol_type = other DNA
gctgcccgggcccggctgggcggcggcggggccggcggggccggctgtgccagccagaggggccggcggggcagcgccccagctgctggcccccggggccccagccggccctgcaccaggctcatccccctcttcctggagagagctgctggccccaggagcggccggcagcacctgcctgcccctgggggcctgctgcccagccctgcccggagccaccggcgcagcccccacgccccccggcccaggaggcctcctgtggccagcgccccagctgctgctgctgctgctgctgctgctggccccaggaggcctggccctgcccggagcagaggagctggcctgggcgccggcggggcccatgctgtggcccggctgcggggctgcttcttcagcggcaccgtgaatggagagcctgagagcctggccgctgtgtccctgtgccggggcctgagcggcagcttcctgctggatggagaggagttcaccatccagccccagggcgccggcggcagcctggcccagccccaccggctgcagcgctggggccctgctggggcccggcccctgccccggggccctgagtgggaggtggagaccggggagggccagaggcaggagcggggggaccaccaggaggacagcgaggaggagagccaggaggaggaggccgagggcgccagcgagcccccaccacccctgggcgccaccagcaggaccaagagatttgtgtctgaggccaggtttgtggagaccctgctggtggctgatgcctccatggccgccttctacggggctgacctgcagaaccacatcctgaccctgatgtctgtggccgcccgcatctacaagcaccccagcatcaagaacagcatcaacctgatggtggtgaaggtgctgattgtggaggatgagaagtggggccctgaggtgtctgacaatggaggcctgaccctgaggaacttctgcaactggcagaggcgcttcaaccagcccagcgacagacaccctgagcactatgacacagccatcctgctgacccggcagaacttctgtggccaggagggcctgtgtgacaccctgggcgtggccgacatcggcaccatctgtgaccccaacaagagctgcagcgtgattgaagatgagggcctgcaggccgcccacaccctggcccacgagctgggccacgtgctgtccatgcctcatgatgacagcaagccctgcacccggctgtttggccccatgggcaagcaccacgtgatggcccccctgtttgtgcacctgaaccagaccctgccctggagcccctgcagcgccatgtacctgacagagctgctggatggcggccacggggactgcctgctggatgccccagctgctgccctgcccctgcccaccggcctgcccggccgcatggccctgtaccagctggaccagcagtgccggcagatctttggaccagacttccgccactgccccaacaccagcgcccaggatgtgtgtgcccagctgtggtgccacacagatggagctgagcccctgtgccacaccaagaatggcagcctgccctgggcagatggcaccccctgtggccctggccacctgtgcagcgagggcagctgcctgcctgaggaggaggtggagcggcccaagcctgtggctgatggcggctgggccccctggggcccctggggcgagtgcagcaggacctgtggcggcggcgtgcagttcagccaccgggagtgcaaggaccctgagccccagaatggaggccgctactgcctgggcagaagagccaagtaccagagctgccacacagaggagtgccccccagatggcaagagcttccgggagcagcagtgtgagaagtacaatgcctacaactacacagacatggatggcaacctgctgcagtgggtgcccaagtatgctggggtgagcccccgggaccgctgcaagctgttctgccgggcccggggccgctctgagttcaaggtgtttgaggccaaggtgattgatggcaccctgtgtggccctgagaccctggccatctgtgtgcggggccagtgtgtgaaggccggctgtgaccacgtggtggacagccccaggaagctggacaagtgtggggtgtgtggcggcaagggcaacagctgcaggaaggtgtctggcagcctgacccccaccaactacggctacaatgacatcgtgaccatcccagctggggccaccaacattgatgtgaagcagaggagccaccctggggtgcagaatgatggcaactacctggccctgaagacagcagatggccagtacctgctgaatggaaacctggccatcagcgccatcgagcaggacatcctggtgaagggcaccatcctgaagtacagcggcagcatcgccaccctggagcggctgcagagcttccggcccctgcctgagcccctgactgtgcagctgctgactgtgcctggagaggtgttcccccccaaggtgaagtacaccttctttgtgcccaatgatgtggacttctccatgcagagcagcaaggagcgggccaccaccaacatcatccagcccctgctgcacgcccagtgggtgctgggggactggagcgagtgcagcagcacctgtggggccggctggcagaggagaacagtggagtgccgggaccccagcggccaggccagcgccacctgcaacaaggccctgaagccagaagatgccaagccctgtgagagccagctgtgccccctgtag

SEQ ID NO: 142664 - DNA, 5724 bp, synthetic construct
  misc_feature 1..5724: note = Description of Artificial Sequence: Synthetic coding sequence
  source 1..5724: mol_type = other DNA
atgcagtttgtgtcctgggccaccctgctgaccctgctggtgcgggacctggccgagatgggcagcccagatgctgctgctgctgtgaggaaggaccggctgcacccccggcaggtgaagctgctggagaccctgtctgaatatgagatcgtgagccccatccgggtgaatgccctgggggagcccttccccaccaacgtgcacttcaagaggaccaggaggagcatcaacagcgccacagacccctggccagcctttgccagcagcagcagcagcagcaccagcagccaggcccactaccgcctgagcgccttcggccagcagttcctgttcaacctgacagccaatgccggcttcatcgcccccctcttcaccgtgaccctgctgggcaccccaggagtgaaccagaccaagttctacagcgaggaggaggccgagctgaagcactgcttctacaagggctacgtgaacaccaacagcgagcacacagctgtgatcagcctgtgcagcggcatgctgggcaccttccgcagccatgatggagactacttcatcgagcccctgcagagcatggatgagcaggaggatgaggaggagcagaacaagccccacatcatctaccgccgcagcgccccccagcgggagcccagcactggaagacatgcctgtgacaccagcgagcacaagaacagacacagcaaggacaagaagaagacccgggccaggaagtggggcgagcgcatcaacctggccggagatgtggccgccctgaacagcggcctggccacagaggccttcagcgcctacggcaacaagacagacaacacccgggagaagaggacccacaggaggaccaagcgcttcctgagctaccccaggtttgtggaggtgctggtggtggccgacaacaggatggtgtcctaccatggagagaacctgcagcactacatcctgaccctgatgagcattgatggccccagcatctccttcaatgcccagaccaccctgaagaacttctgccagtggcagcacagcaagaacagccctgggggcatccaccacgacacagctgtgctgctgacccggcaggacatctgccgggcccatgacaagtgtgacaccctgggcctggccgagctgggcaccatctgtgacccctaccgcagctgcagcatcagcgaggacagcggcctgagcacagccttcaccatcgcccacgagctgggccacgtgttcaacatgcctcatgatgacaacaacaagtgcaaggaggagggcgtgaagagcccccagcacgtgatggcccccaccctgaacttctacaccaacccctggatgtggagcaagtgcagcaggaagtacatcacagagttcctggacaccggctatggagaatgtctgctgaatgaacctgagagccggccctaccccctgcctgtgcagctgcccggcatcctgtacaacgtgaacaagcagtgtgagctgatctttggacctggcagccaggtgtgcccctacatgatgcagtgccggcggctgtggtgcaacaacgtgaatggagtgcacaagggctgcaggacccagcacaccccctgggcagatggaacagaatgtgagcccgggaagcactgcaagtatggcttctgtgtgcccaaggagatggatgtgcctgtgacagatggctcctggggctcctggagccccttcggcacctgcagcaggacctgtggcggcggcatcaagacagccatccgggagtgcaacagacctgagcccaagaatggaggcaagtactgtgtgggccgcaggatgaagttcaagagctgcaacacagagccctgcctgaagcagaagagggacttcagagatgagcagtgtgcccactttgatggcaagcacttcaacatcaatggcctgctgcccaacgtgcgctgggtgcccaagtacagcggcatcctgatgaaggaccgctgcaagctgttctgccgggtggccggcaacacagcctactaccagctgcgggacagagtgattgatggcaccccctgtggccaggacaccaatgacatctgtgtgcagggcctgtgccggcaggccggctgtgaccacgtgctgaacagcaaggcccggcgggacaagtgtggggtgtgtggcggggacaacagcagctgcaagacagtggccggcaccttcaacacagtgcactacggctacaacacagtggtgcgcatcccagctggggccaccaacattgatgtgcggcagcacagcttctctggagaaacagatgatgacaactacctggccctgagcagcagcaagggggagttcctgctgaatggaaactttgtggtgaccatggccaagcgggagatcagaattggaaatgctgtggtggagtacagcggcagcgagacagctgtggagcgcatcaacagcacagacagaattgagcaggagctgctgctgcaggtgctgtctgtgggcaagctgtacaacccagatgtgcgctacagcttcaacatccccatcgaggacaagccccagcagttctactggaacagccacggcccctggcaggcctgcagcaagccctgccagggcgagaggaagaggaagctggtgtgcacccgggagagtgaccagctgactgtgtctgaccagagatgtgaccggctgccccagcccggccacatcacagagccctgtggcacagactgtgacctgcgctggcacgtggccagccgctctgagtgcagcgcccagtgtggcctgggctaccgcaccctggacatctactgtgccaagtacagccggctggatggcaagacagagaaggtggatgatggcttctgcagcagccaccccaagcccagcaaccgggagaagtgcagcggggagtgcaacacaggaggctggagatacagcgcctggacagagtgcagcaagagctgtgatggcggcacccagaggcggcgggccatctgtgtgaacaccagaaatgatgtgctggatgacagcaagtgcacccaccaggagaaggtgaccatccagcgctgcagcgagttcccctgcccccagtggaagagcggggactggagcgaatgtctggtgacctgtgggaagggccacaagcaccggcaggtgtggtgccagtttggagaagatcggctgaatgacaggatgtgtgaccctgagaccaagcccacctccatgcagacctgccagcagccagaatgtgcctcctggcaggccggcccctggggccagtgcagcgtgacctgtggccagggctaccagctgcgggctgtgaagtgcatcatcggcacctacatgtctgtggtggatgacaatgactgcaatgctgccacccggcccacagacacccaggactgtgagctgcccagctgccaccccccacctgctgcccctgagaccaggaggagcacctacagcgcccccaggacccagtggaggtttggctcctggaccccctgcagcgccacctgtgggaagggcaccaggatgagatatgtgtcctgcagagatgaaaatggatctgtggctgatgagagcgcctgtgccaccctgcccaggcctgtggccaaggaggagtgcagcgtgaccccctgtggccagtggaaggccctggactggagcagctgcagcgtgacctgtggccagggccgggccacccggcaggtgatgtgtgtgaactacagcgaccacgtgattgacagaagtgaatgtgaccaggactacatccctgagacagaccaggactgcagcatgagcccctgcccccagaggaccccagacagcggcctggcccagcaccccttccagaatgaagactaccggcccaggtctgccagccccagcaggacccacgtgctgggcggcaaccagtggaggacaggcccctggggcgcctgcagcagcacctgtgccggcggcagccagaggagagtggtggtgtgccaggatgaaaatggctacacagccaatgactgtgtggagcgcatcaagccagatgagcagagggcctgtgagagcggcccctgcccccagtgggcctacggcaactggggagaatgtaccaagctgtgtggcggcggcatccgcacccggctggtggtgtgccagaggagcaatggagagcgcttcccagacctgagctgtgagatcctggacaagcccccagaccgggagcagtgcaacacccacgcctgcccccatgatgctgcctggagcacaggcccctggagcagctgcagcgtgtcctgtggccggggccacaagcagagaaatgtgtactgcatggccaaggatggcagccacctggagagtgactactgcaagcacctggccaagccccacggccacaggaagtgccggggcggccgctgccccaagtggaaggccggggcctggagccagtgcagcgtgtcctgtggccggggcgtgcagcagagacatgtgggctgccagatcggcacccacaagatcgcccgggagacagagtgcaacccctacaccaggcctgagagcgagcgggactgccagggcccccgctgccccctgtacacctggagggctgaggagtggcaggagtgcaccaagacctgtggggagggcagccgctacaggaaggtggtgtgtgtggatgacaacaagaatgaggtgcatggagcccgctgtgatgtgtccaagaggcctgtggaccgggagagctgcagcctgcagccctgtgaatatgtgtggatcaccggggagtggagcgaatgttctgtgacctgtgggaagggctacaagcagaggctggtgtcctgcagcgagatctacaccgggaaggaaaattatgagtacagctaccagaccaccatcaactgccccggcacccagccccccagcgtgcacccctgctacctgcgggactgccctgtgtctgccacctggagggtgggcaactggggcagctgcagcgtgtcctgtggggtgggcgtgatgcagaggtctgtgcagtgcctgaccaatgaagaccagcccagccacctgtgccacacagacctgaagccagaggagaggaagacctgcagaaatgtgtacaactgtgagctgccccagaactgcaaggaggtgaagaggctgaagggggcctctgaagatggagagtacttcctgatgatccggggcaagctgctgaagatcttctgtgccggcatgcacagcgaccaccccaaggagtatgtgaccctggtgcatggagacagcgagaacttcagcgaggtgtatggccaccggctgcacaaccccacagagtgcccctacaacggcagcagaagagatgactgccagtgcaggaaggactacacagctgctggcttcagcagcttccagaagatcagaattgacctgacctccatgcagatcatcaccacagacctgcagtttgcccggaccagcgagggccaccctgtgccctttgccacagctggggactgctacagcgctgccaagtgcccccagggccgcttcagcatcaacctgtatggaacaggcctgagcctgacagagagcgcccgctggatcagccagggcaactatgctgtgtctgacatcaagaagagcccagatggcaccagggtggtgggcaaatgtggcggctactgtgggaagtgcacccccagcagcggcaccggcctggaggtgcgggtgctgtag

SEQ ID NO: 142665 - DNA, 2976 bp, synthetic construct
  misc_feature 1..2976: note = Description of Artificial Sequence: Synthetic coding sequence
  source 1..2976: mol_type = other DNA
tgagaatgttctgcccagtgtggcctgggctaccgcaccctggacatctactgtgccaagtacagccggctggatggcaagacagagaaggtggatgatggcttctgcagcagccaccccaagcccagcaaccgggagaagtgcagcggggagtgcaacacaggaggctggagatacagcgcctggacagagtgcagcaagagctgtgatggcggcacccagaggcggcgggccatctgtgtgaacaccagaaatgatgtgctggatgacagcaagtgcacccaccaggagaaggtgaccatccagcgctgcagcgagttcccctgcccccagtggaagagcggggactggagcgaatgtctggtgacctgtgggaagggccacaagcaccggcaggtgtggtgccagtttggagaagatcggctgaatgacaggatgtgtgaccctgagaccaagcccacctccatgcagacctgccagcagccagaatgtgcctcctggcaggccggcccctggggccagtgcagcgtgacctgtggccagggctaccagctgcgggctgtgaagtgcatcatcggcacctacatgtctgtggtggatgacaatgactgcaatgctgccacccggcccacagacacccaggactgtgagctgcccagctgccaccccccacctgctgcccctgagaccaggaggagcacctacagcgcccccaggacccagtggaggtttggctcctggaccccctgcagcgccacctgtgggaagggcaccaggatgagatatgtgtcctgcagagatgaaaatggatctgtggctgatgagagcgcctgtgccaccctgcccaggcctgtggccaaggaggagtgcagcgtgaccccctgtggccagtggaaggccctggactggagcagctgcagcgtgacctgtggccagggccgggccacccggcaggtgatgtgtgtgaactacagcgaccacgtgattgacagaagtgaatgtgaccaggactacatccctgagacagaccaggactgcagcatgagcccctgcccccagaggaccccagacagcggcctggcccagcaccccttccagaatgaagactaccggcccaggtctgccagccccagcaggacccacgtgctgggcggcaaccagtggaggacaggcccctggggcgcctgcagcagcacctgtgccggcggcagccagaggagagtggtggtgtgccaggatgaaaatggctacacagccaatgactgtgtggagcgcatcaagccagatgagcagagggcctgtgagagcggcccctgcccccagtgggcctacggcaactggggagaatgtaccaagctgtgtggcggcggcatccgcacccggctggtggtgtgccagaggagcaatggagagcgcttcccagacctgagctgtgagatcctggacaagcccccagaccgggagcagtgcaacacccacgcctgcccccatgatgctgcctggagcacaggcccctggagcagctgcagcgtgtcctgtggccggggccacaagcagagaaatgtgtactgcatggccaaggatggcagccacctggagagtgactactgcaagcacctggccaagccccacggccacaggaagtgccggggcggccgctgccccaagtggaaggccggggcctggagccagtgcagcgtgtcctgtggccggggcgtgcagcagagacatgtgggctgccagatcggcacccacaagatcgcccgggagacagagtgcaacccctacaccaggcctgagagcgagcgggactgccagggcccccgctgccccctgtacacctggagggctgaggagtggcaggagtgcaccaagacctgtggggagggcagccgctacaggaaggtggtgtgtgtggatgacaacaagaatgaggtgcatggagcccgctgtgatgtgtccaagaggcctgtggaccgggagagctgcagcctgcagccctgtgaatatgtgtggatcaccggggagtggagcgaatgttctgtgacctgtgggaagggctacaagcagaggctggtgtcctgcagcgagatctacaccgggaaggaaaattatgagtacagctaccagaccaccatcaactgccccggcacccagccccccagcgtgcacccctgctacctgcgggactgccctgtgtctgccacctggagggtgggcaactggggcagctgcagcgtgtcctgtggggtgggcgtgatgcagaggtctgtgcagtgcctgaccaatgaagaccagcccagccacctgtgccacacagacctgaagccagaggagaggaagacctgcagaaatgtgtacaactgtgagctgccccagaactgcaaggaggtgaagaggctgaagggggcctctgaagatggagagtacttcctgatgatccggggcaagctgctgaagatcttctgtgccggcatgcacagcgaccaccccaaggagtatgtgaccctggtgcatggagacagcgagaacttcagcgaggtgtatggccaccggctgcacaaccccacagagtgcccctacaacggcagcagaagagatgactgccagtgcaggaaggactacacagctgctggcttcagcagcttccagaagatcagaattgacctgacctccatgcagatcatcaccacagacctgcagtttgcccggaccagcgagggccaccctgtgccctttgccacagctggggactgctacagcgctgccaagtgcccccagggccgcttcagcatcaacctgtatggaacaggcctgagcctgacagagagcgcccgctggatcagccagggcaactatgctgtgtctgacatcaagaagagcccagatggcaccagggtggtgggcaaatgtggcggctactgtgggaagtgcacccccagcagcggcaccggcctggaggtgcgggtgctgtag

SEQ ID NO: 142666 - DNA, 5808 bp, synthetic construct
  misc_feature 1..5808: note = Description of Artificial Sequence: Synthetic coding sequence
  source 1..5808: mol_type = other DNA
atgcagtttgtgtcctgggccaccctgctgaccctgctggtgcgggacctggccgagatgggcagcccagatgctgctgctgctgtgaggaaggaccggctgcacccccggcaggtgaagctgctggagaccctgtctgaatatgagatcgtgagccccatccgggtgaatgccctgggggagcccttccccaccaacgtgcacttcaagaggaccaggaggagcatcaacagcgccacagacccctggccagcctttgccagcagcagcagcagcagcaccagcagccaggcccactaccgcctgagcgccttcggccagcagttcctgttcaacctgacagccaatgccggcttcatcgcccccctcttcaccgtgaccctgctgggcaccccaggagtgaaccagaccaagttctacagcgaggaggaggccgagctgaagcactgcttctacaagggctacgtgaacaccaacagcgagcacacagctgtgatcagcctgtgcagcggcatgctgggcaccttccgcagccatgatggagactacttcatcgagcccctgcagagcatggatgagcaggaggatgaggaggagcagaacaagccccacatcatctaccgccgcagcgccccccagcgggagcccagcactggaagacatgcctgtgacaccagcgagcacaagaacagacacagcaaggacaagaagaagacccgggccaggaagtggggcgagcgcatcaacctggccggagatgtggccgccctgaacagcggcctggccacagaggccttcagcgcctacggcaacaagacagacaacacccgggagaagaggacccacaggaggaccaagcgcttcctgagctaccccaggtttgtggaggtgctggtggtggccgacaacaggatggtgtcctaccatggagagaacctgcagcactacatcctgaccctgatgagcatcgtggccagcatctacaaggaccccagcatcggcaacctgatcaacatcgtgattgtgaacctgattgtcatccacaatgagcaggacggccccagcatctccttcaatgcccagaccaccctgaagaacttctgccagtggcagcacagcaagaacagccctgggggcatccaccacgacacagctgtgctgctgacccggcaggacatctgccgggcccatgacaagtgtgacaccctgggcctggccgagctgggcaccatctgtgacccctaccgcagctgcagcatcagcgaggacagcggcctgagcacagccttcaccatcgcccacgagctgggccacgtgttcaacatgcctcatgatgacaacaacaagtgcaaggaggagggcgtgaagagcccccagcacgtgatggcccccaccctgaacttctacaccaacccctggatgtggagcaagtgcagcaggaagtacatcacagagttcctggacaccggctatggagaatgtctgctgaatgaacctgagagccggccctaccccctgcctgtgcagctgcccggcatcctgtacaacgtgaacaagcagtgtgagctgatctttggacctggcagccaggtgtgcccctacatgatgcagtgccggcggctgtggtgcaacaacgtgaatggagtgcacaagggctgcaggacccagcacaccccctgggcagatggaacagaatgtgagcccgggaagcactgcaagtatggcttctgtgtgcccaaggagatggatgtgcctgtgacagatggctcctggggctcctggagccccttcggcacctgcagcaggacctgtggcggcggcatcaagacagccatccgggagtgcaacagacctgagcccaagaatggaggcaagtactgtgtgggccgcaggatgaagttcaagagctgcaacacagagccctgcctgaagcagaagagggacttcagagatgagcagtgtgcccactttgatggcaagcacttcaacatcaatggcctgctgcccaacgtgcgctgggtgcccaagtacagcggcatcctgatgaaggaccgctgcaagctgttctgccgggtggccggcaacacagcctactaccagctgcgggacagagtgattgatggcaccccctgtggccaggacaccaatgacatctgtgtgcagggcctgtgccggcaggccggctgtgaccacgtgctgaacagcaaggcccggcgggacaagtgtggggtgtgtggcggggacaacagcagctgcaagacagtggccggcaccttcaacacagtgcactacggctacaacacagtggtgcgcatcccagctggggccaccaacattgatgtgcggcagcacagcttctctggagaaacagatgatgacaactacctggccctgagcagcagcaagggggagttcctgctgaatggaaactttgtggtgaccatggccaagcgggagatcagaattggaaatgctgtggtggagtacagcggcagcgagacagctgtggagcgcatcaacagcacagacagaattgagcaggagctgctgctgcaggtgctgtctgtgggcaagctgtacaacccagatgtgcgctacagcttcaacatccccatcgaggacaagccccagcagttctactggaacagccacggcccctggcaggcctgcagcaagccctgccagggcgagaggaagaggaagctggtgtgcacccgggagagtgaccagctgactgtgtctgaccagagatgtgaccggctgccccagcccggccacatcacagagccctgtggcacagactgtgacctgcgctggcacgtggccagccgctctgagtgcagcgcccagtgtggcctgggctaccgcaccctggacatctactgtgccaagtacagccggctggatggcaagacagagaaggtggatgatggcttctgcagcagccaccccaagcccagcaaccgggagaagtgcagcggggagtgcaacacaggaggctggagatacagcgcctggacagagtgcagcaagagctgtgatggcggcacccagaggcggcgggccatctgtgtgaacaccagaaatgatgtgctggatgacagcaagtgcacccaccaggagaaggtgaccatccagcgctgcagcgagttcccctgcccccagtggaagagcggggactggagcgaatgtctggtgacctgtgggaagggccacaagcaccggcaggtgtggtgccagtttggagaagatcggctgaatgacaggatgtgtgaccctgagaccaagcccacctccatgcagacctgccagcagccagaatgtgcctcctggcaggccggcccctggggccagtgcagcgtgacctgtggccagggctaccagctgcgggctgtgaagtgcatcatcggcacctacatgtctgtggtggatgacaatgactgcaatgctgccacccggcccacagacacccaggactgtgagctgcccagctgccaccccccacctgctgcccctgagaccaggaggagcacctacagcgcccccaggacccagtggaggtttggctcctggaccccctgcagcgccacctgtgggaagggcaccaggatgagatatgtgtcctgcagagatgaaaatggatctgtggctgatgagagcgcctgtgccaccctgcccaggcctgtggccaaggaggagtgcagcgtgaccccctgtggccagtggaaggccctggactggagcagctgcagcgtgacctgtggccagggccgggccacccggcaggtgatgtgtgtgaactacagcgaccacgtgattgacagaagtgaatgtgaccaggactacatccctgagacagaccaggactgcagcatgagcccctgcccccagaggaccccagacagcggcctggcccagcaccccttccagaatgaagactaccggcccaggtctgccagccccagcaggacccacgtgctgggcggcaaccagtggaggacaggcccctggggcgcctgcagcagcacctgtgccggcggcagccagaggagagtggtggtgtgccaggatgaaaatggctacacagccaatgactgtgtggagcgcatcaagccagatgagcagagggcctgtgagagcggcccctgcccccagtgggcctacggcaactggggagaatgtaccaagctgtgtggcggcggcatccgcacccggctggtggtgtgccagaggagcaatggagagcgcttcccagacctgagctgtgagatcctggacaagcccccagaccgggagcagtgcaacacccacgcctgcccccatgatgctgcctggagcacaggcccctggagcagctgcagcgtgtcctgtggccggggccacaagcagagaaatgtgtactgcatggccaaggatggcagccacctggagagtgactactgcaagcacctggccaagccccacggccacaggaagtgccggggcggccgctgccccaagtggaaggccggggcctggagccagtgcagcgtgtcctgtggccggggcgtgcagcagagacatgtgggctgccagatcggcacccacaagatcgcccgggagacagagtgcaacccctacaccaggcctgagagcgagcgggactgccagggcccccgctgccccctgtacacctggagggctgaggagtggcaggagtgcaccaagacctgtggggagggcagccgctacaggaaggtggtgtgtgtggatgacaacaagaatgaggtgcatggagcccgctgtgatgtgtccaagaggcctgtggaccgggagagctgcagcctgcagccctgtgaatatgtgtggatcaccggggagtggagcgaatgttctgtgacctgtgggaagggctacaagcagaggctggtgtcctgcagcgagatctacaccgggaaggaaaattatgagtacagctaccagaccaccatcaactgccccggcacccagccccccagcgtgcacccctgctacctgcgggactgccctgtgtctgccacctggagggtgggcaactggggcagctgcagcgtgtcctgtggggtgggcgtgatgcagaggtctgtgcagtgcctgaccaatgaagaccagcccagccacctgtgccacacagacctgaagccagaggagaggaagacctgcagaaatgtgtacaactgtgagctgccccagaactgcaaggaggtgaagaggctgaagggggcctctgaagatggagagtacttcctgatgatccggggcaagctgctgaagatcttctgtgccggcatgcacagcgaccaccccaaggagtatgtgaccctggtgcatggagacagcgagaacttcagcgaggtgtatggccaccggctgcacaaccccacagagtgcccctacaacggcagcagaagagatgactgccagtgcaggaaggactacacagctgctggcttcagcagcttccagaagatcagaattgacctgacctccatgcagatcatcaccacagacctgcagtttgcccggaccagcgagggccaccctgtgccctttgccacagctggggactgctacagcgctgccaagtgcccccagggccgcttcagcatcaacctgtatggaacaggcctgagcctgacagagagcgcccgctggatcagccagggcaactatgctgtgtctgacatcaagaagagcccagatggcaccagggtggtgggcaaatgtggcggctactgtgggaagtgcacccccagcagcggcaccggcctggaggtgcgggtgctgtag

SEQ ID NO: 142667 - DNA, 1176 bp, synthetic construct
  misc_feature 1..1176: note = Description of Artificial Sequence: Synthetic coding sequence
  source 1..1176: mol_type = other DNA
atgatcctgaatggagaggagatcatcctgagcctgcagaagaccaagcacctgctgggccctgactacacagagaccctgtacagccccagaggagaggagatcaccaccaagccagagaacatggagcactgctactacaagggcaacatcctgaatgagaagaacagcgtggccagcatcagcacctgtgatggcctgcggggctacttcacccaccaccaccagcgctaccagatcaagcccctgaagagcacagatgagaaggagcacgctgtgttcaccagcaaccaggaggagcaggaccctgccaaccacacctgtggggtgaagagcacagatggcaagcagggccccatccgcatcagccgcagcctgaagagccctgagaaggaggacttcctgcgggcccagaagtacatcgacctgtacctggtgctggacaatgccttctacaagaactacaatgaaaacctgaccctcatccgcagctttgtgtttgatgtgatgaacctgctgaatgtcatctacaacaccattgatgtgcaggtggccctggtgggcatggagatctggagcgatggagacaagatcaaggtggtgcccagcgccagcaccacctttgacaacttcctgcgctggcacagcagcaacctgggcaagaagatccatgaccacgcccagctgctgagcggcatctccttcaacaacagaagagtgggcctggccgccagcaacagcctgtgcagccccagctctgtggccgtgattgaggccaagaagaagaacaacgtggccctggtgggcgtgatgagccatgagctgggccacgtgctgggcatgccagatgtgcccttcaacaccaagtgccccagcggcagctgtgtgatgaaccagtacctgagcagcaagttccccaaggacttcagcaccagctgccgggcccactttgagcgctacctgctgagccagaagcccaagtgcctgctgcaggcccccatccccaccaacatcatgaccacccctgtgtgtggcaaccacctgctggaggtgggggaggactgtgactgtggcagccccaaggagtgcaccaacctgtgctgtgaggccctgacctgcaagctgaagccaggcacagactgtggaggagatgcccccaaccacaccacagaatag

SEQ ID NO: 142668 - DNA, 1413 bp, synthetic construct
  misc_feature 1..1413: note = Description of Artificial Sequence: Synthetic coding sequence
  source 1..1413: mol_type = other DNA
atgctgcggggcatcagccagctgcctgctgtggccaccatgtcctgggtgctgctgcctgtgctgtggctgattgtgcagacccaggccatcgccatcaagcagaccccagagctgaccctgcacgagatcgtgtgccccaagaagctgcacatcctgcacaagcgggagatcaagaacaaccagacagagaagcacggcaaggaggagagatatgagcctgaggtgcagtaccagatgatcctgaatggagaggagatcatcctgagcctgcagaagaccaagcacctgctgggccctgactacacagagaccctgtacagccccagaggagaggagatcaccaccaagccagagaacatggagcactgctactacaagggcaacatcctgaatgagaagaacagcgtggccagcatcagcacctgtgatggcctgcggggctacttcacccaccaccaccagcgctaccagatcaagcccctgaagagcacagatgagaaggagcacgctgtgttcaccagcaaccaggaggagcaggaccctgccaaccacacctgtggggtgaagagcacagatggcaagcagggccccatccgcatcagccgcagcctgaagagccctgagaaggaggacttcctgcgggcccagaagtacatcgacctgtacctggtgctggacaatgccttctacaagaactacaatgaaaacctgaccctcatccgcagctttgtgtttgatgtgatgaacctgctgaatgtcatctacaacaccattgatgtgcaggtggccctggtgggcatggagatctggagcgatggagacaagatcaaggtggtgcccagcgccagcaccacctttgacaacttcctgcgctggcacagcagcaacctgggcaagaagatccatgaccacgcccagctgctgagcggcatctccttcaacaacagaagagtgggcctggccgccagcaacagcctgtgcagccccagctctgtggccgtcatcgaggccaagaagaagaacaacgtggccctggtgggcgtgatgagccatgagctgggccacgtgctgggcatgccagatgtgcccttcaacaccaagtgccccagcggcagctgtgtgatgaaccagtacctgagcagcaagttccccaaggacttcagcaccagctgccgggcccactttgagcgctacctgctgagccagaagcccaagtgcctgctgcaggcccccatccccaccaacatcatgaccacccctgtgtgtggcaaccacctgctggaggtgggggaggactgtgactgtggcagccccaaggaatgtaccaacctgtgctgtgaggccctgacctgcaagctgaagccaggcacagactgtggaggagatgcccccaaccacaccacagaatag

SEQ ID NO: 142669 - DNA, 1176 bp, synthetic construct; identical to SEQ ID NO: 142667
  misc_feature 1..1176: note = Description of Artificial Sequence: Synthetic coding sequence
  source 1..1176: mol_type = other DNA

SEQ ID NO: 142670 - DNA, 2052 bp, synthetic construct
  misc_feature 1..2052: note = Description of Artificial Sequence: Synthetic coding sequence
  source 1..2052: mol_type = other DNA
atggagtgctgcagaagagccaccccaggcaccctgctgctcttcctggccttcctgctgctgagcagcaggacagcccggtctgaggaggacagagatggcctgtgggatgcctggggcccctggagcgagtgcagcaggacctgtggcggcggggccagctacagcctgcggcgctgcctgagcagcaagagctgtgagggcaggaacatccgctaccgcacctgcagcaatgtggactgccccccagaggccggggacttccgggcccagcagtgcagcgcccacaatgatgtgaagcaccacggccagttctatgagtggctgcctgtgtccaatgaccctgacaacccctgcagcctgaagtgccaggccaagggcaccaccctggtggtggagctggcccccaaggtgctggatggcacccgctgctacacagagagcctggacatgtgcatcagcggcctgtgccagatcgtgggctgtgaccaccagctgggcagcacagtgaaggaggacaactgtggggtgtgcaatggagatggcagcacctgccgcctggtgcggggccagtacaagagccagctgagcgccaccaagagtgatgacacagtggtggccatcccctacggcagccgccacatccggctggtgctgaagggccctgaccacctgtacctggagaccaagaccctgcagggcaccaagggggagaacagcctgagcagcacaggcaccttcctggtggacaacagctctgtggacttccagaagttcccagacaaggagatcctgaggatggccggccccctgacagctgacttcatcgtgaagatccggaacagcggcagcgctgacagcacagtgcagttcatcttctaccagcccatcatccaccgctggagggagacagacttcttcccctgcagcgccacctgtggcggcggctaccagctgaccagcgcagaatgttatgacctgcggagcaacagagtggtggccgaccagtactgccactactacccagagaacatcaagcccaagcccaagctgcaggagtgcaacctggacccctgcccagccagtgatggctacaagcagatcatgccctatgacctgtaccaccccctgccccgctgggaggccaccccctggacagcctgcagcagcagctgtggcggcggcatccagagcagagctgtgtcctgtgtggaggaggacatccagggccacgtgacctctgtggaggagtggaagtgcatgtacacccccaagatgcccatcgcccagccctgcaacatctttgactgccccaagtggctggcccaggagtggagcccctgcaccgtgacctgtggccagggcctgcgctacagagtggtgctgtgcatcgaccaccggggcatgcacactggaggctgcagccccaagaccaagccccacatcaaggaggagtgcatcgtgcccaccccctgctacaagcccaaggagaagctgcctgtggaggccaagctgccctggttcaagcaggcccaggagctggaggagggcgctgctgtgtctgaggagcccagcttcatccctgaggcctggagcgcctgcaccgtgacctgtggggtgggcacccaggtgcgcatcgtgcgctgccaggtgctgctgtccttcagccagagcgtggccgacctgcccattgatgaatgtgagggccccaagccagccagccagagggcctgctacgccggcccctgcagcggggagatccctgagttcaacccagatgaaacagatggcctgtttggaggcctgcaggactttgatgagctgtatgactgggagtatgagggcttcaccaagtgcagcgagagctgtggcggcggcgtgcaggaggccgtggtgtcctgcctgaacaagcagacccgggagcctgctgaggagaacctgtgtgtgaccagccggcggcccccccagctgctgaagagctgcaacctggacccctgcccagcccggagcagcattgacagcgcctggaatgcctgcaatgtgctgtgctag

SEQ ID NO: 142671 - DNA, 1401 bp, synthetic construct
  misc_feature 1..1401: note = Description of Artificial Sequence: Synthetic coding sequence
  source 1..1401: mol_type = other DNA
atgtgcctgacagatgagtggggcttcttcttcttcttcttcctgggcgtgcctgaggccgaggtgacctggttcaggaacaagagcaagctgggcagcccccaccacctgcacgagggcagcctgctgctgaccaacgtgagcagcagtgaccagggcctgtacagctgcagagctgccaacctgcatggagagctgacagagagcacccagctgctgatcctggaccccccccaggtgcccacccagctggaggacatccgggccctgctggccgccaccggccccaacctgcccagcgtgctgaccagccccctgggcacccagctggtgctggaccccggcaacagcgccctgctgggctgccccatcaagggccaccctgtgcccaacatcacctggttccacggcggccagcccatcgtgacagccaccggcctgacccaccacatcctggccgccggccagatcctgcaggtggccaacctgagcggcggcagccagggcgagttcagctgcctggcccagaatgaagctggggtgctgatgcagaaggccagcctggtgatccaggactactggtggagcgtggaccggctggccacctgcagcgccagctgtggcaacagaggagtgcagcagccccggctgcgctgcctgctgaacagcacagaggtgaacccagcccactgtgccggcaaggtgcggcctgctgtgcagcccatcgcctgcaacagaagagactgccccagccgctggatggtgacctcctggagcgcctgcaccaggagctgtggcggcggcgtgcagacccggcgggtgacctgccagaagctgaaggccagcggcatcagcacccctgtgtccaatgacatgtgcacccaggtggccaagaggcctgtggacacccaggcctgcaaccagcagctgtgtgtggagtgggccttcagctcctggggccagtgcaatggcccctgcatcggcccccacctggccgtgcagcaccggcaggtgttctgccagaccagagatggcatcaccctgcccagcgagcagtgcagcgccctgcccaggcctgtgtccacccagaactgctggagcgaggcctgcagcgtgcactggagggtgtccctgtggaccctgtgcacagccacctgtggcaactacggcttccagagccggcgggtggagtgtgtgcacgcccggaccaacaaggctgtgcctgagcacctgtgctcctggggccccaggcctgccaactggcagcgctgcaacatcaccccctgtgagaacatggagtgccgggacaccacccgctactgtgagaaggtgaagcagctgaagctgtgccagctgagccagttcaagagccgctgctgcggcacctgtgggaaggcctag

SEQ ID NO: 142672 - DNA, 1578 bp, synthetic construct
  misc_feature 1..1578: note = Description of Artificial Sequence: Synthetic coding sequence
  source 1..1578: mol_type = other DNA
atggagtgctgcagaagagccaccccaggcaccctgctgctcttcctggccttcctgctgctgagcagcaggacagcccggtctgaggaggacagagatggcctgtgggatgcctggggcccctggagcgagtgcagcaggacctgtggcggcggggccagctacagcctgcggcgctgcctgagcagcaagagctgtgagggcaggaacatccgctaccgcacctgcagcaatgtggactgccccccagaggccggggacttccgggcccagcagtgcagcgcccacaatgatgtgaagcaccacggccagttctatgagtggctgcctgtgtccaatgaccctgacaacccctgcagcctgaagtgccaggccaagggcaccaccctggtggtggagctggcccccaaggtgctggatggcacccgctgctacacagagagcctggacatgtgcatcagcggcctgtgccagatcgtgggctgtgaccaccagctgggcagcacagtgaaggaggacaactgtggggtgtgcaatggagatggcagcacctgccgcctggtgcggggccagtacaagagccagctgagcgccaccaagagtgatgacacagtggtggccatcccctacggcagccgccacatccggctggtgctgaagggccctgaccacctgtacctggagaccaagaccctgcagggcaccaagggggagaacagcctgagcagcacaggcaccttcctggtggacaacagctctgtggacttccagaagttcccagacaaggagatcctgaggatggccggccccctgacagctgacttcatcgtgaagatccggaacagcggcagcgctgacagcacagtgcagttcatcttctaccagcccatcatccaccgctggagggagacagacttcttcccctgcagcgccacctgtggcggcggctaccagctgaccagcgcagaatgttatgacctgcggagcaacagagtggtggccgaccagtactgccactactacccagagaacatcaagcccaagcccaagctgcaggagtgcaacctggacccctgcccagccagtgatggctacaagcagatcatgccctatgacctgtaccaccccctgccccgctgggaggccaccccctggacagcctgcagcagcagctgtggcggcggcatccagagcagagctgtgtcctgtgtggaggaggacatccagggccacgtgacctctgtggaggagtggaagtgcatgtacacccccaagatgcccatcgcccagccctgcaacatctttgactgccccaagtggctggcccaggagtggagcccctgcaccgtgacctgtggccagggcctgcgctacagagtggtgctgtgcatcgaccaccggggcatgcacactggaggctgcagccccaagaccaagccccacatcaaggaggagtgcatcgtgcccaccccctgctacaagcccaaggagaagctgcctgtggaggccaagctgccctggttcaagcaggcccaggagctggaggagggcgctgctgtgtctgaggagcccagctag

SEQ ID NO: 142673 - DNA, 786 bp, synthetic construct
  misc_feature 1..786: note = Description of Artificial Sequence: Synthetic coding sequence
  source 1..786: mol_type = other DNA
atgtgcctgacagatgagtggggcttcttcttcttcttcttcctgggcgtgcctgaggccgaggtgacctggttcaggaacaagagcaagctgggcagcccccaccacctgcacgagggcagcctgctgctgaccaacgtgagcagcagtgaccagggcctgtacagctgcagagctgccaacctgcatggagagctgacagagagcacccagctgctgatcctggaccccccccaggtgcccacccagctggaggacatccgggccctgctggccgccaccggccccaacctgcccagcgtgctgaccagccccctgggcacccagctggtgctggaccccggcaacagcgccctgctgggctgccccatcaagggccaccctgtgcccaacatcacctggttccacggcggccagcccatcgtgacagccaccggcctgacccaccacatcctggccgccggccagatcctgcaggtggccaacctgagcggcggcagccagggcgagttcagctgcctggcccagaatgaagctggggtgctgatgcagaaggccagcctggtgatccaggactactggtggagcgtggaccggctggccacctgcagcgccagctgtggcaacagaggagtgcagcagccccggctgcgctgcctgctgaacagcacagaggtgaacccagcccactgtgccggcaaggtgcggcctgctgtgcagcccatcgcctgcaacagaagagactgccccagccgggccatgggcctggccagcggcctgacctag

SEQ ID NO: 142674 - DNA, 5289 bp, synthetic construct
  misc_feature 1..5289: note = Description of Artificial Sequence: Synthetic coding sequence
  source 1..5289: mol_type = other DNA
atggagtgctgcagaagagccaccccaggcaccctgctgctcttcctggccttcctgctgctgagcagcaggacagcccggtctgaggaggacagagatggcctgtgggatgcctggggcccctggagcgagtgcagcaggacctgtggcggcggggccagctacagcctgcggcgctgcctgagcagcaagagctgtgagggcaggaacatccgctaccgcacctgcagcaatgtggactgccccccagaggccggggacttccgggcccagcagtgcagcgcccacaatgatgtgaagcaccacggccagttctatgagtggctgcctgtgtccaatgaccctgacaacccctgcagcctgaagtgccaggccaagggcaccaccctggtggtggagctggcccccaaggtgctggatggcacccgctgctacacagagagcctggacatgtgcatcagcggcctgtgccagatcgtgggctgtgaccaccagctgggcagcacagtgaaggaggacaactgtggggtgtgcaatggagatggcagcacctgccgcctggtgcggggccagtacaagagccagctgagcgccaccaagagtgatgacacagtggtggccatcccctacggcagccgccacatccggctggtgctgaagggccctgaccacctgtacctggagaccaagaccctgcagggcaccaagggggagaacagcctgagcagcacaggcaccttcctggtggacaacagctctgtggacttccagaagttcccagacaaggagatcctgaggatggccggccccctgacagctgacttcatcgtgaagatccggaacagcggcagcgctgacagcacagtgcagttcatcttctaccagcccatcatccaccgctggagggagacagacttcttcccctgcagcgccacctgtggcggcggctaccagctgaccagcgcagaatgttatgacctgcggagcaacagagtggtggccgaccagtactgccactactacccagagaacatcaagcccaagcccaagctgcaggagtgcaacctggacccctgcccagccagtgatggctacaagcagatcatgccctatgacctgtaccaccccctgccccgctgggaggccaccccctggacagcctgcagcagcagctgtggcggcggcatccagagcagagctgtgtcctgtgtggaggaggacatccagggccacgtgacctctgtggaggagtggaagtgcatgtacacccccaagatgcccatcgcccagccctgcaacatctttgactgccccaagtggctggcccaggagtggagcccctgcaccgtgacctgtggccagggcctgcgctacagagtggtgctgtgcatcgaccaccggggcatgcacactggaggctgcagccccaagaccaagccccacatcaaggaggagtgcatcgtgcccaccccctgctacaagcccaaggagaagctgcctgtggaggccaagctgccctggttcaagcaggcccaggagctggaggagggcgctgctgtgtctgaggagcccagcttcatccctgaggcctggagcgcctgcaccgtgacctgtggggtgggcacccaggtgcgcatcgtgcgctgccaggtgctgctgtccttcagccagagcgtggccgacctgcccattgatgaatgtgagggccccaagccagccagccagagggcctgctacgccggcccctgcagcggggagatccctgagttcaacccagatgaaacagatggcctgtttggaggcctgcaggactttgatgagctgtatgactgggagtatgagggcttcaccaagtgcagcgagagctgtggcggcggcgtgcaggaggccgtggtgtcctgcctgaacaagcagacccgggagcctgctgaggagaacctgtgtgtgaccagccggcggcccccccagctgctgaagagctgcaacctggacccctgcccagcccgctgggagatcggcaagtggagcccctgcagcctgacctgtggggtgggcctgcagaccagagatgtgttctgcagccacctgctgagccgggagatgaatgagaccgtcatcctggctgatgagctgtgccggcagcccaagcccagcacagtgcaggcctgcaaccgcttcaactgccccccagcctggtacccagcccagtggcagccctgcagcaggacctgtggcggcggcgtgcagaagcgggaggtgctgtgcaagcagaggatggctgatggcagcttcctggagctgcctgagaccttctgcagcgccagcaagccagcctgccagcaggcctgcaagaaggatgactgccccagcgagtggctgctgagtgactggacagaatgttccaccagctgtggggagggcacccagaccaggtctgccatctgcaggaagatgctgaagacaggcctgagcacagtggtgaacagcaccctgtgcccccccctgcccttcagcagcagcatccggccctgcatgctggccacctgtgcccggcccggccggcccagcaccaagcacagcccccacatcgctgctgccaggaaggtgtacatccagacccggcggcagaggaagctgcactttgtggtgggcggctttgcctacctgctgcccaagacagctgtggtgctgcgctgcccagcccggcgggtgaggaagcccctcatcacctgggagaaggatggccagcacctgatcagcagcacccacgtgacagtggcccccttcggctacctgaagatccaccggctgaagcccagtgatgctggggtgtacacctgcagcgctggccctgcccgggagcacttcgtcatcaagctgattggaggcaacaggaagctggtggcccggcccctgagccccaggtctgaggaggaggtgctggccggcaggaaaggaggccccaaggaggccctgcagacccacaagcaccagaatggcatcttcagcaatggcagcaaggccgagaagaggggcctggccgccaaccctggcagccgctatgatgacctggtgtcccggctgctggagcagggcggctggccaggagagctgctggcctcctgggaggcccaggacagcgctgagaggaacaccaccagcgaggaggaccccggggctgagcaggtgctgctgcacctgcccttcaccatggtgacagagcagaggcggctggatgacatcctgggcaacctgagccagcagcctgaggagctgcgggacctgtacagcaagcacctggtggcccagctggcccaggagatcttccgcagccacctggagcaccaggacaccctgctgaagcccagcgagaggaggaccagccctgtgaccctgagcccccacaagcacgtgtctggcttcagcagcagcctgcggaccagcagcactggagatgctgggggcggcagccggcggccccacaggaagcccaccatcctgaggaagatctctgctgcccagcagctgagcgccagcgaggtggtgacccacctgggccagacagtggccctggccagcggcaccctgtctgtgctgctgcactgtgaggccatcggccacccccggcccaccatctcctgggccagaaatggagaggaggtgcagttcagtgaccgcatcctgctgcagccagatgacagcctgcagatcctggcccctgtggaggctgatgtgggcttctacacctgcaatgccaccaatgccctgggctatgacagcgtgtccattgctgtgaccctggccggcaagcccctggtgaagaccagcaggatgaccgtcatcaacacagagaagccagctgtgacagtggacatcggcagcaccatcaagacagtgcagggcgtgaatgtgaccatcaactgccaggtggccggcgtgcctgaggccgaggtgacctggttcaggaacaagagcaagctgggcagcccccaccacctgcacgagggcagcctgctgctgaccaacgtgagcagcagtgaccagggcctgtacagctgcagagctgccaacctgcatggagagctgacagagagcacccagctgctgatcctggaccccccccaggtgcccacccagctggaggacatccgggccctgctggccgccaccggccccaacctgcccagcgtgctgaccagccccctgggcacccagctggtgctggaccccggcaacagcgccctgctgggctgccccatcaagggccaccctgtgcccaacatcacctggttccacggcggccagcccatcgtgacagccaccggcctgacccaccacatcctggccgccggccagatcctgcaggtggccaacctgagcggcggcagccagggcgagttcagctgcctggcccagaatgaagctggggtgctgatgcagaaggccagcctggtgatccaggactactggtggagcgtggaccggctggccacctgcagcgccagctgtggcaacagaggagtgcagcagccccggctgcgctgcctgctgaacagcacagaggtgaacccagcccactgtgccggcaaggtgcggcctgctgtgcagcccatcgcctgcaacagaagagactgccccagccgctggatggtgacctcctggagcgcctgcaccaggagctgtggcggcggcgtgcagacccggcgggtgacctgccagaagctgaaggccagcggcatcagcacccctgtgtccaatgacatgtgcacccaggtggccaagaggcctgtggacacccaggcctgcaaccagcagctgtgtgtggagtgggccttcagctcctggggccagtgcaatggcccctgcatcggcccccacctggccgtgcagcaccggcaggtgttctgccagaccagagatggcatcaccctgcccagcgagcagtgcagcgccctgcccaggcctgtgtccacccagaactgctggagcgaggcctgcagcgtgcactggagggtgtccctgtggaccctgtgcacagccacctgtggcaactacggcttccagagccggcgggtggagtgtgtgcacgcccggaccaacaaggctgtgcctgagcacctgtgctcctggggccccaggcctgccaactggcagcgctgcaacatcaccccctgtgagaacatggagtgccgggacaccacccgctactgtgagaaggtgaagcagctgaagctgtgccagctgagccagttcaagagccgctgctgcggcacctgtgggaaggcctag

SEQ ID NO: 142675 - DNA, 1320 bp, synthetic construct
  misc_feature 1..1320: note = Description of Artificial Sequence: Synthetic coding sequence
  source 1..1320: mol_type = other DNA
atggagtgctgcagaagagccaccccaggcaccctgctgctcttcctggccttcctgctgctgagcagcaggacagcccggtctgaggaggacagagatggcctgtgggatgcctggggcccctggagcgagtgcagcaggacctgtggcggcggggccagctacagcctgcggcgctgcctgagcagcaagagctgtgagggcaggaacatccgctaccgcacctgcagcaatgtggactgccccccagaggccggggacttccgggcccagcagtgcagcgcccacaatgatgtgaagcaccacggccagttctatgagtggctgcctgtgtccaatgaccctgacaacccctgcagcctgaagtgccaggccaagggcaccaccctggtggtggagctggcccccaaggtgctggatggcacccgctgctacacagagagcctggacatgtgcatcagcggcctgtgccagatcgtgggctgtgaccaccagctgggcagcacagtgaaggaggacaactgtggggtgtgcaatggagatggcagcacctgccgcctggtgcggggccagtacaagagccagctgagcgccaccaagagtgatgacacagtggtggccatcccctacggcagccgccacatccggctggtgctgaagggccctgaccacctgtacctggagaccaagaccctgcagggcaccaagggggagaacagcctgagcagcacaggcaccttcctggtggacaacagctctgtggacttccagaagttcccagacaaggagatcctgaggatggccggccccctgacagctgacttcatcgtgaagatccggaacagcggcagcgctgacagcacagtgcagttcatcttctaccagcccatcatccaccgctggagggagacagacttcttcccctgcagcgccacctgtggcggcggctaccagctgaccagcgcagaatgttatgacctgcggagcaacagagtggtggccgaccagtactgccactactacccagagaacatcaagcccaagcccaagctgcaggagtgcaacctggacccctgcccagcccgctgggaggccaccccctggacagcctgcagcagcagctgtggcggcggcatccagagcagagctgtgtcctgtgtggaggaggacatccagggccacgtgacctctgtggaggagtggaagtgcatgtacacccccaagatgcccatcgcccagccctgcaacatctttgactgccccaagtggctggcccaggagtggagccctgtgacagtgcccagcttctttgtgcactag

SEQ ID NO: 142676 - DNA, 2856 bp, synthetic construct
  misc_feature 1..2856: note = Description of Artificial Sequence: Synthetic coding sequence
  source 1..2856: mol_type = other DNA
atggatggccgctggcagtgcagctgctgggcctggttcctgctggtgctggccgtggtggccggggacacagtgtccacaggcagcacagacaacagccccaccagcaacagcctggagggcggcacagatgccacagccttctggtggggcgagtggaccaagtggacagcctgcagccgcagctgtggcggcggcgtgaccagccaggagcggcactgcctgcagcagaggaggaagtctgtgcccggccctggcaacagaacctgcaccggcaccagcaagcgctaccagctgtgccgggtgcaggagtgccccccagatggccgctccttccgggaggagcagtgtgtgtccttcaacagccacgtgtacaacggccgcacccaccagtggaagcccctgtacccagatgattatgtgcacatcagcagcaagccctgtgacctgcactgcaccaccgtggatggccagaggcagctgatggtgcctgccagagatggcaccagctgcaagctgacagacctgcggggcgtgtgtgtgtctggaaaatgtgagcccatcggctgtgatggagtgctcttcagcacccacaccctggacaagtgtggcatctgccagggagatggcagcagctgcacccacgtgactggaaactacagaaaaggaaatgcccacctgggctacagcctggtgacccacatcccagctggggcccgggacatccagatcgtggagaggaagaagtctgcagatgtgctggccctggctgatgaggccggctactacttcttcaacggcaactacaaggtggacagccccaagaacttcaacattgctggcaccgtggtgaagtacagaagacccatggatgtgtatgaaacaggaattgagtacatcgtggcccagggccccaccaaccagggcctgaatgtgatggtgtggaaccagaatggcaagagccccagcatcacctttgagtacaccctgctgcagccccctcatgagagccggccccagcccatctactacggcttcagcgagagcgctgagagccagggcctggatggagctggcctgatgggctttgtgccccacaacggcagcctgtatggccaggccagcagcgagcggctgggcctggacaacagactctttggccaccctggcctggacatggagctgggccccagccagggccaggagaccaatgaggtgtgtgagcaggccggcggcggggcctgtgagggccccccccggggcaagggcttccgggacagaaatgtgacaggcacccccctgactggagacaaggatgatgaggaggtggacacccactttgccagccaggagttcttcagcgccaatgccatcagtgaccagctgctgggcgccggcagtgacctgaaggacttcaccctgaatgaaacagtgaacagcatctttgcccagggcgcccccaggagcagcctggccgagagcttctttgtggactatgaagaaaatgaaggagctggcccctacctgctgaatggcagctacctggagctgagcagtgacagagtggccaacagcagcagcgaggcccccttccccaacgtgtccaccagcctgctgaccagcgctggcaacagaacccacaaggcccggacccggcccaaggccaggaagcagggcgtgtccccagctgacatgtaccgctggaagctgagcagccatgagccctgcagcgccacctgcaccaccggggtgatgtctgcctatgccatgtgtgtgcgctatgatggagtggaggtggatgacagctactgtgatgccctgaccaggcctgagcctgtgcatgagttctgtgccggccgggagtgccagccccgctgggagaccagctcctggagcgaatgttccaggacctgtggggagggctaccagttccgggtggtgcgctgctggaagatgctgagccctggctttgacagctctgtgtacagcgacctgtgtgaggccgctgaggccgtgcggcctgaggagaggaagacctgcagaaatcctgcctgtggcccccagtgggagatgtctgagtggagcgagtgcacagccaagtgtggggagaggtctgtggtgacccgggacatccgctgcagtgaagatgagaagctgtgtgaccccaacaccaggcctgtgggggagaagaactgcaccggccccccctgtgaccggcagtggacagtgtctgactggggcccctgcagcggcagctgtggccagggccgcaccatcagacatgtgtactgcaagaccagtgatggccgggtggtgcctgagagccagtgccagatggagaccaagcccctggccatccacccctgtggggacaagaactgcccagcccactggctggcccaggactgggagcgctgcaacaccacctgtggccggggcgtgaagaagaggctggtgctgtgcatggagctggccaacgggaagccccagaccaggagcggcccagaatgtggcctggccaagaagcccccagaggagagcacctgctttgagcggccctgcttcaagtggtacaccagcccctggagcgagtgcaccaagacctgtggggtgggcgtgaggatgagagatgtgaagtgctaccagggcacagacatcgtgcggggctgtgaccccctggtgaagcctgtgggccggcaggcctgtgacctgcagccctgccccacagagcccccagatgacagctgccaggaccagcccggcaccaactgtgccctggccatcaaggtgaacctgtgtggccactggtactacagcaaggcctgctgccgcagctgccggcccccccacagctag

SEQ ID NO: 142677 - DNA, 2856 bp, synthetic construct; identical to SEQ ID NO: 142676
  misc_feature 1..2856: note = Description of Artificial Sequence: Synthetic coding sequence
  source 1..2856: mol_type = other DNA

SEQ ID NO: 142678 - DNA, 3183 bp, synthetic construct
  misc_feature 1..3183: note = Description of Artificial Sequence: Synthetic coding sequence
  source 1..3183: mol_type = other DNA
atgctgtttgaggtgggggagggcggcggggccggggaggagggcaagggccggggccggcccggccgcagcctgtgcacccatgctgccccagccaggacagcccacctggcccccagcgccctgcggagcgcccggcccttcctgtgggaggacaacctgctgaccaggagccagggcctgcctgacaaccacgaccagctggtgcctgacaacctggaggcctgggccctggccggcccccggggcctcttccccaagaggaccctggtgatctggaagagaattggagctggcctggtggtgacagtggccctgctgcccaggatggatggccgctggcagtgcagctgctgggcctggttcctgctggtgctggccgtggtggccggggacacagtgtccacaggcagcacagacaacagccccaccagcaacagcctggagggcggcacagatgccacagccttctggtggggcgagtggaccaagtggacagcctgcagccgcagctgtggcggcggcgtgaccagccaggagcggcactgcctgcagcagaggaggaagtctgtgcccggccctggcaacagaacctgcaccggcaccagcaagcgctaccagctgtgccgggtgcaggagtgccccccagatggccgctccttccgggaggagcagtgtgtgtccttcaacagccacgtgtacaatggaagaacccaccagtggaagcccctgtacccagatgattatgtgcacatcagcagcaagccctgtgacctgcactgcaccaccgtggatggccagaggcagctgatggtgcctgccagagatggcaccagctgcaagctgacagacctgcggggcgtgtgtgtgtctggaaaatgtgagcccatcggctgtgatggagtgctcttcagcacccacaccctggacaagtgtggcatctgccagggagatggcagcagctgcacccacgtgacaggcaactacagaaaaggaaatgcccacctgggctacagcctggtgacccacatcccagctggggcccgggacatccagatcgtggagaggaagaagtctgcagatgtgctggccctggctgatgaagctggctactacttcttcaatggaaactacaaggtggacagccccaagaacttcaacattgctggcaccgtggtgaagtaccgccggcccatggatgtgtatgagaccggcatcgagtacatcgtggcccagggccccaccaaccagggcctgaatgtgatggtgtggaaccagaatggcaagagccccagcatcacctttgagtacaccctgctgcagccccctcatgagagccggccccagcccatctactacggcttcagcgagagcgctgagagccagggcctggatggagctggcctgatgggctttgtgccccacaacggcagcctgtatggccaggccagcagcgagcggctgggcctggacaaccggctgtttggccaccctggcctggacatggagctgggccccagccagggccaggagaccaatgaggtgtgtgagcaggccggcggcggggcctgtgagggccccccccggggcaagggcttccgggacagaaatgtgacaggcacccccctgaccggggacaaggatgatgaggaggtggacacccactttgccagccaggagttcttcagcgccaatgccatcagtgaccagctgctgggcgccggcagtgacctgaaggacttcaccctgaatgagaccgtgaacagcatctttgcccagggcgcccccaggagcagcctggccgagagcttctttgtggactatgaggagaatgaaggagctggcccctacctgctgaatggcagctacctggagctgagcagtgacagagtggccaacagcagcagcgaggcccccttccccaacgtgtccaccagcctgctgaccagcgctggcaacagaacccacaaggcccggacccggcccaaggccaggaagcagggcgtgtccccagctgacatgtaccgctggaagctgagcagccatgagccctgcagcgccacctgcaccactggagtgatgtctgcctatgccatgtgtgtgcgctatgatggagtggaggtggatgacagctactgtgatgccctgaccaggcctgagcctgtgcatgagttctgtgccggccgggagtgccagccccgctgggagaccagctcctggagcgagtgcagcaggacctgtggggagggctaccagttccgggtggtgcgctgctggaagatgctgagccctggctttgacagctctgtgtacagcgacctgtgtgaggccgctgaggccgtgcggcctgaggagaggaagacctgcaggaacccagcctgtggcccccagtgggagatgtctgagtggagcgaatgtacagccaagtgtggggagaggtctgtggtgacccgggacatccgctgcagtgaagatgagaagctgtgtgaccccaacaccaggcctgtgggggagaagaactgcaccggccccccctgtgaccggcagtggacagtgtctgactggggcccctgcagcggcagctgtggccagggccgcaccatccgccacgtgtactgcaagaccagtgatggccgggtggtgcctgagagccagtgccagatggagaccaagcccctggccatccacccctgtggggacaagaactgcccagcccactggctggcccaggactgggagcgctgcaacaccacctgtggccggggcgtgaagaagaggctggtgctgtgcatggagctggccaacgggaagccccagaccaggagcggcccagaatgtggcctggccaagaagcccccagaggagagcacctgctttgagcggccctgcttcaagtggtacaccagcccctggagcgaatgtaccaagacctgtggggtgggcgtgaggatgagagatgtgaagtgctaccagggcacagacatcgtgcggggctgtgaccccctggtgaagcctgtgggccggcaggcctgtgacctgcagccctgccccacagagcccccagatgacagctgccaggaccagcccggcaccaactgtgccctggccatcaaggtgaacctgtgtggccactggtactacagcaaggcctgctgccgcagctgcaggcctccccacagctag

SEQ ID NO: 142679 - DNA, 5076 bp, synthetic construct
  misc_feature 1..5076: note = Description of Artificial Sequence: Synthetic coding sequence
  source 1..5076: mol_type = other DNA
atggcctcctggaccagcccctggtgggtgctgattggcatggtgttcatgcacagccccctgccccagaccacagctgagaagagccctggggcctacttcctgcctgagtttgccctgagcccccagggcagcttcctggaggacaccactggagagcagttcctgacctaccgctatgatgaccagaccagcaggaacaccaggagtgatgaggacaaggatggcaactgggatgcctggggagactggagcgactgcagcaggacctgtggcggcggggccagctacagcctgcggcgctgcctgaccggcaggaactgtgagggccagaacatccgctacaagacctgcagcaaccacgactgccccccagatgctgaggacttccgggcccagcagtgcagcgcctacaatgatgtgcagtaccagggccactactatgagtggctgccccgctacaatgaccctgctgccccctgtgccctgaagtgccacgcccagggccagaacctggtggtggagctggcccccaaggtgctggatggcacccgctgcaacacagacagcctggacatgtgcatcagcggcatctgccaggccgtgggctgtgaccggcagctgggcagcaatgccaaggaggacaactgtggggtgtgtgctggagatggcagcacctgccgcctggtgcggggccagagcaagagccacgtgtccccagagaagcgggaggagaatgtgattgctgtgcccctgggcagccgctctgtgcgcatcaccgtgaagggccctgcccacctgttcatcgagagcaagaccctgcagggcagcaagggggagcacagcttcaacagccctggggtcttcctggtggagaacaccaccgtggagttccagaggggcagcgagcggcagaccttcaagatccctggccccctgatggctgacttcatcttcaagacccgctacacagctgccaaggacagcgtggtgcagttcttcttctaccagcccatcagccaccagtggaggcagacagacttcttcccctgcaccgtgacctgtggcggcggctaccagctgaacagcgcagaatgtgtggacatccggctgaagagggtggtgcctgaccactactgccactactacccagaaaatgtgaagcccaagcccaagctgaaggaatgttccatggacccctgccccagcagtgatggcttcaaggagatcatgccctatgaccacttccagcccctgccccgctgggagcacaacccctggacagcctgcagcgtgtcctgtggcggcggcatccagaggaggagctttgtgtgtgtggaggagagcatgcatggagagatcctgcaggtggaggagtggaagtgcatgtatgcccccaagcccaaggtgatgcagacctgcaacctgtttgactgccccaagtggatcgccatggagtggagccagtgcaccgtgacctgtggccggggcctgcgctacagagtggtgctgtgcatcaaccacagaggagagcacgtgggcggctgcaacccccagctgaagctgcacatcaaggaggagtgtgtgatccccatcccctgctacaagcccaaggagaagagccctgtggaggccaagctgccctggctgaagcaggcccaggagctggaggagaccagaattgccacagaggagcccaccttcatccctgagccctggagcgcctgcagcaccacctgtggccctggggtgcaggtgcgggaggtgaagtgccgggtgctgctgaccttcacccagacagaaacagagctgcctgaggaggagtgtgagggccccaagctgcccacagagcggccctgcctgctggaggcctgtgatgagagccctgccagccgggagctggacatccccctgcctgaggacagcgagaccacctatgactgggagtatgccggcttcaccccctgcacagccacctgtgtgggcggccaccaggaggccatcgctgtgtgcctgcacatccagacccagcagacagtgaatgacagcctgtgtgacatggtgcaccggcccccagccatgagccaggcctgcaacacagagccctgccccccacgctggcacgtgggctcctggggcccctgcagcgccacctgtggggtgggcatccagaccagagatgtgtactgcctgcaccctggagagaccccagcccctcctgaggagtgcagagatgagaagccccacgccctgcaggcctgcaaccagtttgactgccccccaggctggcacatcgaggagtggcagcagtgcagcaggacctgtggcggcggcacccagaacagaagagtgacctgccggcagctgctgacagatggcagcttcctgaacctgagtgatgagctgtgccagggccccaaggccagcagccacaagagctgtgccaggacagactgccccccccacctggccgtgggggactggagcaagtgcagcgtgtcctgtggggtgggcatccagaggaggaagcaggtgtgccagaggctggccgccaagggccgccgcatccccctgtctgagatgatgtgccgggacctgcccggcctgcccctggtgcgcagctgccagatgccagaatgttccaagatcaagtctgagatgaagaccaagctgggggagcagggcccccagatcctgtctgtgcagagggtgtacatccagacccgggaggagaagaggatcaacctgaccatcggcagccgggcctacctgctgcccaacaccagcgtcatcatcaagtgccctgtgcggcgcttccagaagagcctcatccagtgggagaaggatggccgctgcctgcagaacagcaagaggctgggcatcaccaagagcggcagcctgaagatccacggcctggccgccccagacattggagtgtaccgctgcatcgccggcagcgcccaggagaccgtggtgctgaagctgattggaacagacaaccggctgattgcccggcctgccctgcgggagcccatgagggagtacccaggcatggaccacagcgaggccaacagcctgggcgtgacctggcacaagatgaggcagatgtggaacaacaagaatgacctgtacctggatgatgaccacatcagcaaccagcccttcctgcgggccctgctgggccactgcagcaacagcgctggcagcaccaacagctgggagctgaagaacaagcagtttgaggccgctgtgaagcagggcgcctacagcatggacacagcccagtttgatgagctgatccggaacatgagccagctgatggagactggagaggtgtctgatgacctggccagccagctgatctaccagctggtggccgagctggccaaggcccagcccacccacatgcagtggaggggcatccaggaggagaccccacctgctgcccagctgcggggggagactggatctgtgtcccagagcagccacgccaagaacagcggcaagctgaccttcaagcccaagggccctgtgctgatgaggcagagccagcccccatccatctccttcaacaagaccatcaacagccgcatcggcaacacagtgtacatcaccaagaggacagaggtgatcaacatcctgtgtgacctgatcaccccatctgaggccacctacacctggaccaaggatggcaccctgctgcagcccagcgtgaagatcatcctggatggcaccgggaagatccagatccagaaccccaccaggaaggagcagggcatctatgagtgcagcgtggccaaccacctgggcagtgatgtggagagcagctctgtgctgtatgcagaggcccctgtgatcctgtctgtggagaggaacatcaccaagccagagcacaaccacctgtctgtggtggtgggcggcatcgtggaggccgccctgggcgccaacgtgaccatccgctgccctgtgaagggcgtgccccagcccaacatcacctggctgaagagaggaggcagcctgtctggaaatgtgtccctgctcttcaacggcagcctgctgctgcagaatgtgtccctggagaatgaaggcacctacgtgtgcatcgccaccaatgccctgggcaaggctgtggccacctctgtgctgcacctgctggagcggcgctggccagagagccgcatcgtgttcctgcagggccacaagaagtacatcctgcaggccaccaacaccaggaccaacagcaatgaccccaccggggagcccccaccccaggagcccttctgggagcccggcaactggagccactgcagcgccacctgtggccacctgggcgcccgcatccagaggccccagtgtgtgatggccaacggccaggaggtgtctgaggccctgtgtgaccacctgcagaagcccctggccggctttgagccctgcaacatccgggactgcccagcccgctggttcacctctgtgtggagccagtgcagcgtgtcctgtggggagggctaccacagccggcaggtgacctgcaagaggaccaaggccaacggcaccgtgcaggtggtgagcccccgggcctgtgcccccaaggaccggcccctgggcaggaagccctgcttcggccacccctgtgtgcagtgggagcccggcaaccgctgccccggccgctgcatgggccgggctgtgaggatgcagcagaggcacacagcctgccagcacaacagcagtgacagcaactgtgatgacaggaagaggcccaccctgcggaggaactgcaccagcggggcctgtgatgtgtgctggcacacaggcccctggaagccctgcacagctgcctgtggccggggcttccagagcaggaaggtggactgcatccacaccaggagctgcaagcctgtggccaagaggcactgtgtgcagaagaagaagcccatctcctggaggcactgcctgggccccagctgtgaccgggactgcacagacaccacccactactgcatgtttgtgaagcacctgaacctgtgcagcctggaccgctacaagcagcgctgctgccagagctgccaggagggctag

SEQ ID NO: 142680 - DNA, 3225 bp, synthetic construct
  misc_feature 1..3225: note = Description of Artificial Sequence: Synthetic coding sequence
  source 1..3225: mol_type = other DNA
atggagaactggacaggccggccctggctgtacctgctgctgctgctgagcctgccccagctgtgcctggaccaggaggtgctgagcggccacagcctgcagacccccacagaggagggccagggccctgagggcgtgtggggcccctgggtgcagtgggccagctgcagccagccctgtggggtgggcgtgcagaggaggagcaggacctgccagctgcccaccgtgcagctgcaccccagcctgcccctgcccccccggccccccaggcaccctgaggccctgctgccccggggccagggcccccggccccagaccagccctgagaccctgcccctgtaccgcacccagagccggggccggggcggccccctgcggggccctgccagccacctgggccgggaggagacccaggagatccgggccgcccggcgcagccggctgcgggaccccatcaagccaggcatgtttggctacggccgggtgccctttgccctgcccctgcacaggaacagaagacaccccaggagcccccccaggtctgagctgagcctcatcagcagcagaggagaggaggccatccccagccccacccccagggctgagcccttcagcgccaacggcagcccccagacagagctgcccccaacagagctgtctgtgcacacccccagcccccaggccgagcccctgagccctgagacagcccagacagaggtggcccccaggaccaggcctgcccccctgcggcaccacccccgggcccaggccagcggcacagagccccccagccccacccacagcctgggggagggcggcttcttccgggccagcccccagccccggcggcccagcagccagggctgggccagcccccaggtggccggcagaagaccagaccccttccccagcgtgccccggggccggggccagcagggccagggcccctggggcactggaggcaccccccacggcccccggctggagccagacccccagcaccctggggcctggctgcccctgctgagcaatggcccccacgccagcagcctgtggagcctgtttgcccccagcagccccatcccccgctgcagcggggagagcgagcagctgcgggcctgcagccaggccccctgccccccagagcagcctgacccccgggccctgcagtgtgccgccttcaacagccaggagttcatgggccagctgtaccagtgggagcccttcacagaggtgcagggcagccagagatgtgagctgaactgccggccccggggcttccgcttctacgtgcgccacacagagaaggtgcaggacggcaccctgtgccagcccggggccccagacatctgtgtggccggccgctgcctgagccctggctgtgatggcatcctgggcagcggcagaagaccagatggctgcggcgtgtgtggaggagatgacagcacctgccgcctggtgtctggcaacctgacagacagaggaggccccctgggctaccagaagatcctgtggatcccagctggggccctgcggctgcagatcgcccagctgcggcccagcagcaactacctggccctgcggggccctgggggccgcagcatcatcaatggaaactgggccgtggaccccccaggcagctaccgggccggcggcaccgtcttccgctacaaccggcccccccgggaggagggcaagggggagagcctgtctgctgagggccccaccacccagcctgtggatgtgtacatgatcttccaggaggagaaccctggggtcttctaccagtatgtgatcagcagccccccacccatcctggagaaccccaccccagagccccctgtgccccagctgcagcctgagatcctgcgggtggagccccccctggccccagcccccaggcctgcccggaccccaggcaccctgcagaggcaggtgcgcatcccccagatgcctgccccaccccaccccaggacccccctgggcagccctgctgcctactggaagagggtgggccacagcgcctgcagcgccagctgtgggaagggcgtgtggaggcccatcttcctgtgcatcagccgggagagcggggaggagctggatgagaggagctgtgccgccggggcccggcccccagccagccctgagccctgccacggcaccccctgccccccctactgggaggccggggagtggaccagctgcagccgcagctgtggccctggcacccagcaccggcagctgcagtgccggcaggagtttggaggcggcggcagctctgtgcccccagagcgctgtggccacctgccccggcccaacatcacccagagctgccagctgcggctgtgtggccactgggaggtgggcagcccctggagccagtgcagcgtgcgctgtggccggggccagaggagccggcaggtgcgctgtgtgggcaacaatggagatgaggtgtctgagcaggagtgtgccagcggccccccccagccccccagccgggaggcctgtgacatgggcccctgcaccacagcctggttccacagcgactggagcagcaaatgttctgcagaatgtggcaccggcatccagaggagatctgtggtgtgcctgggcagcggggccgccctgggccctggccagggcgaggccggggccggcaccggccagagctgccccaccggcagccggcccccagacatgagggcctgcagcctgggcccctgtgagaggacctggcgctggtacacaggcccctggggagaatgttccagtgaatgtggcagcggcacccagaggcgggacatcatctgtgtgtccaagctgggcacagagttcaacgtgaccagccccagcaactgcagccacctgccccggcccccagccctgcagccctgccagggccaggcctgccaggaccgctggttcagcaccccctggagcccctgcagccgcagctgccagggcggcacccagacccgggaggtgcagtgcctgagcaccaaccagaccctgagcacccgctgccccccccagctgcggcccagcaggaagaggccctgcaacagccagccctgcagccagaggccagatgaccagtgcaaggacagcagcccccactgccccctggtggtgcaggcccggctgtgtgtgtacccctactacacagccacctgctgccgcagctgtgcccacgtgctggagaggagcccccaggaccccagctag

SEQ ID NO: 142681 - DNA, 3225 bp, synthetic construct; identical to SEQ ID NO: 142680
  misc_feature 1..3225: note = Description of Artificial Sequence: Synthetic coding sequence
  source 1..3225: mol_type = other DNA

SEQ ID NO: 142682 - DNA, 3294 bp, synthetic construct
  misc_feature 1..3294: note = Description of Artificial Sequence: Synthetic coding sequence
  source 1..3294: mol_type = other DNA
atggagaactggacaggccggccctggctgtacctgctgctgctgctgagcctgccccagctgtgcctggaccaggaggtgctgagcggccacagcctgcagacccccacagaggagggccagggccctgagggcgtgtggggcccctgggtgcagtgggccagctgcagccagccctgtggggtgggcgtgcagaggaggagcaggacctgccagctgcccaccgtgcagctgcaccccagcctgcccctgcccccccggccccccaggcaccctgaggccctgctgccccggggccagggcccccggccccagaccagccctgagaccctgcccctgtaccgcacccagagccggggccggggcggccccctgcggggccctgccagccacctgggccgggaggagacccaggagatccgggccgcccggcgcagccggctgcgggaccccatcaagccaggcatgtttggctacggccgggtgccctttgccctgcccctgcacaggaacagaagacaccccaggagcccccccaggtctgagctgagcctcatcagcagcagaggagaggaggccatccccagccccacccccagggctgagcccttcagcgccaacggcagcccccagacagagctgcccccaacagagctgtctgtgcacacccccagcccccaggccgagcccctgagccctgagacagcccagacagaggtggcccccaggaccaggcctgcccccctgcggcaccacccccgggcccaggccagcggcacagagccccccagccccacccacagcctgggggagggcggcttcttccgggccagcccccagccccggcggcccagcagccagggctgggccagcccccaggtggccggcagaagaccagaccccttccccagcgtgccccggggccggggccagcagggccagggcccctggggcactggaggcaccccccacggcccccggctggagccagacccccagcaccctggggcctggctgcccctgctgagcaatggcccccacgccagcagcctgtggagcctgtttgcccccagcagccccatcccccgctgcagcggggagagcgagcagctgcgggcctgcagccaggccccctgccccccagagcagcctgacccccgggccctgcagtgtgccgccttcaacagccaggagttcatgggccagctgtaccagtgggagcccttcacagaggcccccctgctgcccctgcggcatgccttcttcctgctgcctggagctggcagcggggacagcactggagtgcagggcagccagagatgtgagctgaactgccggccccggggcttccgcttctacgtgcgccacacagagaaggtgcaggacggcaccctgtgccagcccggggccccagacatctgtgtggccggccgctgcctgagccctggctgtgatggcatcctgggcagcggccggcggccagatggctgcggcgtgtgtggaggagatgacagcacctgccgcctggtgtctggcaacctgacagaccggggcggccccctgggctaccagaagatcctgtggatcccagctggggccctgcggctgcagatcgcccagctgcggcccagcagcaactacctggccctgcggggccctgggggccgcagcatcatcaatggaaactgggccgtggaccccccaggcagctacagagctgggggcaccgtcttccgctacaacagaccaccccgggaggagggcaaaggagagagcctgtctgctgagggccccaccacccagcctgtggatgtgtacatgatcttccaggaggagaaccctggggtcttctaccagtatgtgatcagcagccccccacccatcctggagaaccccaccccagagccccctgtgccccagctgcagcctgagatcctgcgggtggagccccccctggccccagcccccaggcctgcccggaccccaggcaccctgcagaggcaggtgcgcatcccccagatgcctgccccaccccaccccaggacccccctgggcagccctgctgcctactggaagagggtgggccacagcgcctgcagcgccagctgtgggaaaggagtgtggaggcccatcttcctgtgcatcagccgggagagcggggaggagctggatgagaggagctgtgccgccggggcccggcccccagccagccctgagccctgccacggcaccccctgccccccctactgggaggccggggagtggaccagctgcagccgcagctgtggccctggcacccagcaccggcagctgcagtgccggcaggagtttggaggcggcggcagctctgtgcccccagagcgctgtggccacctgccccggcccaacatcacccagagctgccagctgcggctgtgtggccactgggaggtgggcagcccctggagccagtgcagcgtgcgctgtggccggggccagaggagccggcaggtgcgctgtgtgggcaacaatggagatgaggtgtctgagcaggagtgtgccagcggccccccccagccccccagccgggaggcctgtgacatgggcccctgcaccacagcctggttccacagcgactggagcagcaagtgcagcgcagaatgtggcaccggcatccagaggagatctgtggtgtgcctgggcagcggggccgccctgggccctggccagggcgaggccggggccggcaccggccagagctgccccaccggcagccggcccccagacatgagggcctgcagcctgggcccctgtgagaggacctggcgctggtacacaggcccctggggcgagtgcagcagtgaatgtggcagcggcacccagaggcgggacatcatctgtgtgtccaagctgggcacagagttcaacgtgaccagccccagcaactgcagccacctgccccggcccccagccctgcagccctgccagggccaggcctgccaggaccgctggttcagcaccccctggagcccctgcagccgcagctgccagggcggcacccagacccgggaggtgcagtgcctgagcaccaaccagaccctgagcacccgctgccccccccagctgcggcccagcaggaagaggccctgcaacagccagccctgcagccagaggccagatgaccagtgcaaggacagcagcccccactgccccctggtggtgcaggcccggctgtgtgtgtacccctactacacagccacctgctgccgcagctgtgcccacgtgctggagaggagcccccaggaccccagctag

SEQ ID NO: 142683 - DNA, 2634 bp, synthetic construct
  misc_feature 1..2634: note = Description of Artificial Sequence: Synthetic coding sequence
  source 1..2634: mol_type = other DNA
atggagaactggacaggccggccctggctgtacctgctgctgctgctgagcctgccccagctgtgcctggaccaggaggtgctgagcggccacagcctgcagacccccacagaggagggccagggccctgagggcgtgtggggcccctgggtgcagtgggccagctgcagccagccctgtggggtgggcgtgcagaggaggagcaggacctgccagctgcccaccgtgcagctgcaccccagcctgcccctgcccccccggccccccaggcaccctgaggccctgctgccccggggccagggcccccggccccagaccagccctgagaccctgcccctgtaccgcacccagagccggggccggggcggccccctgcggggccctgccagccacctgggccgggaggagacccaggagatccgggccgcccggcgcagccggctgcgggaccccatcaagccaggcatgtttggctacggccgggtgccctttgccctgcccctgcacaggaacagaagacaccccaggagcccccccaggtctgagctgagcctcatcagcagcagaggagaggaggccatccccagccccacccccagggctgagcccttcagcgccaacggcagcccccagacagagctgcccccaacagagctgtctgtgcacacccccagcccccaggccgagcccctgagccctgagacagcccagacagaggtggcccccaggaccaggcctgcccccctgcggcaccacccccgggcccaggccagcggcacagagccccccagccccacccacagcctgggggagggcggcttcttccgggccagcccccagccccggcggcccagcagccagggctgggccagcccccaggtggccggcagaagaccagaccccttccccagcgtgccccggggccggggccagcagggccagggcccctggggcactggaggcaccccccacggcccccggctggagccagacccccagcaccctggggcctggctgcccctgctgagcaatggcccccacgccagcagcctgtggagcctgtttgcccccagcagccccatcccccgctgcagcggggagagcgagcagctgcgggcctgcagccaggccccctgccccccagagcagcctgacccccgggccctgcagtgtgccgccttcaacagccaggagttcatgggccagctgtaccagtgggagcccttcacagaggtgcagggcagccagagatgtgagctgaactgccggccccggggcttccgcttctacgtgcgccacacagagaaggtgcaggacggcaccctgtgccagcccggggccccagacatctgtgtggccggccgctgcctgagccctggctgtgatggcatcctgggcagcggcagaagaccagatggctgcggcgtgtgtggaggagatgacagcacctgccgcctggtgtctggcaacctgacagacagaggaggccccctgggctaccagaagatcctgtggatcccagctggggccctgcggctgcagatcgcccagctgcggcccagcagcaactacctggccctgcggggccctgggggccgcagcatcatcaatggaaactgggccgtggaccccccaggcagctaccgggccggcggcaccgtcttccgctacaaccggcccccccgggaggagggcaagggggagagcctgtctgctgagggccccaccacccagcctgtggatgtgtacatgatcttccaggaggagaaccctggggtcttctaccagtatgtgatcagcagccccccacccatcctggagaaccccaccccagagccccctgtgccccagctgcagcctgagatcctgcgggtggagccccccctggccccagcccccaggcctgcccggaccccaggcaccctgcagaggcaggtgcgcatcccccagatgcctgccccaccccaccccaggacccccctgggcagccctgctgcctactggaagagggtgggccacagcgcctgcagcgccagctgtgggaagggcgtgtggaggcccatcttcctgtgcatcagccgggagagcggggaggagctggatgagaggagctgtgccgccggggcccggcccccagccagccctgagccctgccacggcaccccctgccccccctactgggaggccggggagtggaccagctgcagccgcagctgtggccctggcacccagcaccggcagctgcagtgccggcaggagtttggaggcggcggcagctctgtgcccccagagcgctgtggccacctgccccggcccaacatcacccagagctgccagctgcggctgtgtggccactgggaggtgggcagcccctggagccagtgcagcgtgcgctgtggccggggccagaggagccggcaggtgcgctgtgtgggcaacaatggagatgaggtgtctgagcaggagtgtgccagcggccccccccagccccccagccgggaggcctgtgacatgggcccctgcaccacagcctggttccacagcgactggagcagcaaggtgtccccagagcccccagccatcagctgcatcctgggcaaccacgcccaggacaccagcgccttccctgcctag

SEQ ID NO: 142684 - DNA, 1311 bp, synthetic construct
  misc_feature 1..1311: note = Description of Artificial Sequence: Synthetic coding sequence
  source 1..1311: mol_type = other DNA
atgggcagcctggccctggccggcgtgctgatggctgtggagagcgtgggcgtgatgatcctgcctgtggccctcttccggggcaccagcctgacagagggcgccccctgggccatccgccgcagctgtggcttccagcgggagccctgtggcagccggctgcccagcagcggcctggcccccaccacctggcactttgtggccctgggccgcagcatcatcaatggaaactgggccgtggaccccccaggcagctaccgggccggcggcaccgtcttccgctacaaccggcccccccgggaggagggcaagggggagagcctgtctgctgagggccccaccacccagcctgtggatgtgtacatgatcttccaggaggagaaccctggggtcttctaccagtatgtgatcagcagccccccacccatcctggagaaccccaccccagagccccctgtgccccagctgcagcctgagatcctgcgggtggagccccccctggccccagcccccaggcctgcccggaccccaggcaccctgcagaggcaggtgcgcatcccccagatgcctgccccaccccaccccaggacccccctgggcagccctgctgcctactggaagagggtgggccacagcgcctgcagcgccagctgtgggaagggcgtgtggaggcccatcttcctgtgcatcagccgggagagcggggaggagctggatgagaggagctgtgccgccggggcccggcccccagccagccctgagccctgccacggcaccccctgccccccctactgggaggccggggagtggaccagctgcagccgcagctgtggccctggcacccagcaccggcagctgcagtgccggcaggagtttggaggcggcggcagctctgtgcccccagagcgctgtggccacctgccccggcccaacatcacccagagctgccagctgcggctgtgtggccactgggaggtgggcagcccctggagccagtgcagcgtgcgctgtggccggggccagaggagccggcaggtgcgctgtgtgggcaacaatggagatgaggtgtctgagcaggagtgtgccagcggccccccccagccccccagccgggaggcctgtgacatgggcccctgcaccacagcctggttccacagcgactggagcagcaaatgttctgcagaatgtggcaccggcatccagaggagatctgtggtgtgcctgggcagcggggccgccctgggccctggccagggcgaggccggggccggcaccggccagagctgccccaccggcagcaggcctccttag

SEQ ID NO: 142685 - DNA, 2130 bp, synthetic construct
  misc_feature 1..2130: note = Description of Artificial Sequence: Synthetic coding sequence
  source 1..2130: mol_type = other DNA
atgcctggcatcgacaagctgcccatcgaggagaccctggaggacagcccccagaccaggagcctgctgggcgtgtttgaggaggatgccacagccatcagcaactacatgaaccagctgtaccaggccatgcaccgcatctatgatgcccagaatgagctgtctgctgccacccacctgaccagcaagctgctgaaggagtatgagaagcagcgcttccccctgggcggagatgatgaggtgatgagcagcaccctgcagcagttcagcaaggtgattgatgagctgagcagctgccacgctgtgctgagcacccagctggctgatgccatgatgttccccatcacccagttcaaggagcgggacctgaaggagatcctgaccctgaaggaggtgttccagatcgccagcaatgaccatgatgctgccatcaaccgctacagccggctgagcaagaagagagaaaatgacaaggtgaagtatgaggtgacagaagatgtgtacaccagcaggaagaagcagcaccagaccatgatgcactacttctgtgccctgaacaccctgcagtacaagaagaagatcgccctgctggagcccctgctgggctacatgcaggcccagatctccttcttcaagatgggcagcgagaacctgaatgagcagctggaggagttcctggccaacatcggcacctctgtgcagaatgtgagaagagagatggacagcgacatcgagaccatgcagcagaccatcgaggacctggaggtggccagtgaccccctgtatgtgcctgaccctgaccccaccaagtttcctgtgaacagaaacctgaccaggaaggccggctacctgaatgccaggaacaagacaggcctggtgagcagcacctgggaccggcagttctacttcacccagggcggcaacctgatgagccaggcccggggagatgtggccggcggcctggccatggacatcgacaactgcagcgtgatggctgtggactgtgaggaccggcgctactgcttccagatcaccagctttgatggcaagaagagcagcatcctgcaggccgagagcaagaaggaccacgaggagtggatctgcaccatcaacaacatcagcaagcagatctacctgtctgaaaatcctgaggagacagctgcccgggtgaaccagagcgccctggaggccgtgacccccagccccagcttccagcagagacatgagagcctgcggcctgctgctggccagagccggcccccaacagcccggaccagcagcagcggcagcctgggcagcgagagcaccaacctggccgccctgagcctggacagcctggtggccccagacacccccatccagtttgacatcatcagccctgtgtgtgaggaccagcccggccaggccaaggccttcggccagggcggccgccgcaccaacccctttggagagagcggcggcagcaccaagtcagaaacagaggacagcatcctgcaccagctgttcatcgtgcgcttcctgggctccatggaggtgaagagtgatgaccacccagatgtggtgtatgagaccatgaggcagatcctggccgcccgggccatccacaacatcttcaggatgacagagagccacctgctggtgacctgtgactgcctgaagctgattgacccccagacccaggtgacccggctgaccttccccctgccctgtgtggtgctgtatgccacccaccaggagaacaagaggctgtttggatttgtgctgcggaccagcagcggccgctctgagagcaacctgagctctgtgtgctacatctttgagagcaacaatgaaggagagaagatctgtgacagcgtgggcctggccaagcagatcgccctgcatgctgagctggacagaagagccagcgagaagcagaaggagattgaaagagtgaaggagaagcagcagaaggagctgaacaagcagaagcagatcgagaaggacctggaggagcagagccggctgattgctgccagcagccggcccaaccaggccagcagcgagggccagtttgtggtgctgagcagcagccagagcgaggagagtgacctgggggagggcggcaagaagcgggagagcgaggcctag

SEQ ID NO: 142686 - DNA, 1995 bp, synthetic construct
  misc_feature 1..1995: note = Description of Artificial Sequence: Synthetic coding sequence
  source 1..1995: mol_type = other DNA
atgcctgctgtggacaagctgctgctggaggaggccctgcaggacagcccccagaccaggagcctgctgtctgtgtttgaggaggatgctggcaccctgacagactacaccaaccagctgctgcaggccatgcagagggtgtatggagcccagaatgagatgtgcctggccacccagcagctgagcaagcagctgctggcctatgagaagcagaactttgccctgggcaaaggagatgaggaggtgatcagcaccctgcactacttcagcaaggtggtggatgagctgaacctgctgcacacagagctggccaagcagctggccgacaccatggtgctgcccatcatccagttccgggagaaggacctgacagaggtgtccaccctgaaggacctgtttggcctggccagcaatgaacatgacctgtccatggccaagtacagccggctgcccaagaagaaggaaaatgagaaggtgaagacagaggtgggcaaggaggtggccgccgcccggaggaagcagcacctgagcagcctgcagtactactgtgccctgaatgccctgcagtacaggaagcagatggccatgatggagcccatgattggatttgcccacggccagatcaacttcttcaagaagggagctgagatgttcagcaagaggatggacagcttcctgagctctgtggccgacatggtgcagagcatccaggtggagctggaggccgaggccgagaagatgagggtgtcccagcaggagctgctgtctgtggatgagagcgtgtacaccccagacagtgatgtggccgccccccagatcaacagaaacctgatccagaaggccggctacctgaacctgaggaacaagacaggcctggtgaccaccacctgggagcggctgtacttcttcacccagggcggcaacctgatgtgccagcccagaggagctgtggccggcggcctcatccaggacctggacaactgcagcgtgatggctgtggactgtgaggaccggcgctactgcttccagatcaccacccccaacgggaagagcggcatcatcctgcaggccgagagcaggaaagaaaatgaggagtggatctgtgccatcaacaacatcagccggcagatctacctgacagacaaccctgaggccgtggccatcaagctgaaccagacagccctgcaggccgtgacccccatcaccagctttgggaagaagcaggagagcagctgccccagccagaacctgaagaacagcgagatggagaatgaaaatgacaagatcgtgcccaaggccacagccagcctgcctgaggccgaggagctgattgcccctggcacccccatccagtttgacatcgtgctgcctgccacagagttcctggaccagaacagaggcagcaggaggaccaacccctttggagaaacagaagatgagagcttccctgaggccgaggacagcctgctgcagcagatgtttattgtgcgcttcctgggctccatggctgtgaagacagacagcaccacagaggtgatctatgaggccatgaggcaggtgctggccgcccgggccatccacaacatcttcaggatgacagagagccacctgatggtgaccagccagagcctgcggctgattgacccccagacccaggtgtcccgggccaactttgagctgacctctgtgacccagtttgctgcccaccaggagaacaagaggctggtgggcttcgtcatccgggtgcctgagagcactggagaggagagcctgagcacctacatctttgagagcaacagcgagggggagaagatctgctacgccatcaacctgggcaaggagatcatcgaggtgcagaaggaccctgaggccctggcccagctgatgctgagcatccccctgaccaatgatggcaagtatgtgctgctgaatgaccagccagatgatgatgatggcaaccccaatgagcacagaggagctgagagcgaggcctag

SEQ ID NO: 142687 - DNA, 2013 bp, synthetic construct
  misc_feature 1..2013: note = Description of Artificial Sequence: Synthetic coding sequence
  source 1..2013: mol_type = other DNA
atgcctgctgtggacaagctgctgctggaggaggccctgcaggacagcccccagaccaggagcctgctgtctgtgtttgaggaggatgctggcaccctgacagactacaccaaccagctgctgcaggccatgcagagggtgtatggagcccagaatgagatgtgcctggccacccagcagctgagcaagcagctgctggcctatgagaagcagaactttgccctgggcaaaggagatgaggaggtgatcagcaccctgcactacttcagcaaggtggtggatgagctgaacctgctgcacacagagctggccaagcagctggccgacaccatggtgctgcccatcatccagttccgggagaaggacctgacagaggtgtccaccctgaaggacctgtttggcctggccagcaatgatgtgtgcctcttcctggagcatgacctgtccatggccaagtacagccggctgcccaagaagaaggaaaatgagaaggtgaagacagaggtgggcaaggaggtggccgccgcccggaggaagcagcacctgagcagcctgcagtactactgtgccctgaatgccctgcagtacaggaagcagatggccatgatggagcccatgattggatttgcccacggccagatcaacttcttcaagaagggagctgagatgttcagcaagaggatggacagcttcctgagctctgtggccgacatggtgcagagcatccaggtggagctggaggccgaggccgagaagatgagggtgtcccagcaggagctgctgtctgtggatgagagcgtgtacaccccagacagtgatgtggccgccccccagatcaacagaaacctgatccagaaggccggctacctgaacctgaggaacaagacaggcctggtgaccaccacctgggagcggctgtacttcttcacccagggcggcaacctgatgtgccagcccagaggagctgtggccggcggcctcatccaggacctggacaactgcagcgtgatggctgtggactgtgaggaccggcgctactgcttccagatcaccacccccaacgggaagagcggcatcatcctgcaggccgagagcaggaaagaaaatgaggagtggatctgtgccatcaacaacatcagccggcagatctacctgacagacaaccctgaggccgtggccatcaagctgaaccagacagccctgcaggccgtgacccccatcaccagctttgggaagaagcaggagagcagctgccccagccagaacctgaagaacagcgagatggagaatgaaaatgacaagatcgtgcccaaggccacagccagcctgcctgaggccgaggagctgattgcccctggcacccccatccagtttgacatcgtgctgcctgccacagagttcctggaccagaacagaggcagcaggaggaccaacccctttggagaaacagaagatgagagcttccctgaggccgaggacagcctgctgcagcagatgtttattgtgcgcttcctgggctccatggctgtgaagacagacagcaccacagaggtgatctatgaggccatgaggcaggtgctggccgcccgggccatccacaacatcttcaggatgacagagagccacctgatggtgaccagccagagcctgcggctgattgacccccagacccaggtgtcccgggccaactttgagctgacctctgtgacccagtttgctgcccaccaggagaacaagaggctggtgggcttcgtcatccgggtgcctgagagcactggagaggagagcctgagcacctacatctttgagagcaacagcgagggggagaagatctgctacgccatcaacctgggcaaggagatcatcgaggtgcagaaggaccctgaggccctggcccagctgatgctgagcatccccctgaccaatgatggcaagtatgtgctgctgaatgaccagccagatgatgatgatggcaaccccaatgagcacagaggagctgagagcgaggcctag

SEQ ID NO: 142688 - DNA, 2760 bp, synthetic construct
  misc_feature 1..2760: note = Description of Artificial Sequence: Synthetic coding sequence
  source 1..2760: mol_type = other DNA
atgacagacagcaagtacttcaccaccaccaagaagggggagatctttgagctgaaggccgagctgaacagcgacaagaaggagaagaagaaggaggccgtgaagaaggtgattgcctccatgacagtgggcaaggatgtgtctgccctcttcccagatgtggtgaactgcatgcagacagacaacctggagctgaagaagctggtgtacctgtacctgatgaactatgccaagagccagcctgacatggccatcatggctgtgaacacctttgtgaaggactgtgaggaccccaaccccctcatccgggccctggccgtgaggaccatgggctgcatccgggtggacaagatcacagagtacctgtgtgagcccctgaggaagtgcctgaaggatgaggacccctacgtgaggaagacagctgctgtgtgtgtggccaagctgcatgacatcaatgcccagctggtggaggaccagggcttcctggacaccctgaaggacctgatcagtgacagcaaccccatggtggtggccaatgctgtggccgccctgtctgaaattgctgagagccaccccagcagcaacctgctggacctgaacccccagagcatcaacaagctgctgacagccctgaatgaatgtacagagtggggccagatcttcatcctggactgcctggccaactacatgcccaaggatgaccgggaggcccagagcatctgtgagcgggtgaccccccggctgagccacgccaacagcgctgtggtgctgtctgctgtgaaggtgctgatgaagttcatggagatgctgagcaaggacctggactactacggcaccctgctgaagaagctggccccacccctggtgaccctgctgtctgctgagcctgagctgcagtatgtggccctgaggaacatcaacctgattgtgcagaagaggcctgagatcctgaagcatgagatgaaggtgttctttgtgaagtacaatgaccccatctacgtgaagctggagaagctggacatcatgatccggctggccagccaggccaacatcgcccaggtgctggccgagctgaaggagtatgccacagaggtggatgtggactttgtgaggaaggctgtgcgggccatcggccgctgtgccatcaaggtggagcagagcgctgagcgctgtgtgtccaccctgctggacctgatccagaccaaggtgaactacgtggtgcaggaggccatcgtggtgatcaaggacatcttcaggaagtaccccaacaagtatgaatctgtgattgccaccctgtgtgagaacctggacagcctggatgagcctgaggcccgggccgccatgatctggatcgtgggggagtatgcagagagaattgacaatgctgatgagctgctggagagcttcctggagggcttccatgatgagagcacccaggtgcagctgcagctgctgacagccatcgtgaagctgttcctgaagaagcccacagagacccaggagctggtgcagcaggtgctgagcctggccacccaggacagcgacaacccagacctgcgggaccggggctacatctactggaggctgctgagcacagatcctgtggccgccaaggaggtggtgctggccgagaagcccctcatcagcgaggagacagacctgattgagcccaccctgctggatgagctgatctgctacatcggcaccctggcctctgtgtaccacaagcccccatctgcctttgtggagggcggccggggcgtggtgcacaagagcctgccccccaggacagccagcagcgagagcgctgagagccctgagacagcccccactggagcccctcctggagagcagccagatgtgatcccagcccagggcgacctgctgggggacctgctgaacctggacctgggcccccctgtgtctggcccccccctggccaccagctctgtgcagatgggcgctgtggacctgctgggcggcggcctggacagcctgattggaggcaccaactttgtggccccacccacagctgctgtgcctgccaacctgggcgcccccatcggcagcggcctgagtgacctgtttgacctgaccagcggcgtgggcaccctgagcggcagctatgtggcccccaaggctgtgggcagcatctccatggacctgcagctgaccaacaaggccctgcaggtgatgacagactttgccatccagttcaacagaaattcctttggcctggccccagccacccccctgcaggtgcacgcccccctgagccccaaccagacagtggagatcagcctgcccctgagcacagtgggctctgtgatgaagatggagcccctgaacaacctgcaggtggccgtgaagaacaacattgatgtgttctacttcagcaccctgtaccccctgcacatcctgtttgtggaggatggcaagatggaccggcagatgttcctggccacctggaaggacatccccaatgaaaatgaggcccagttccagatccgggactgccccctgaatgctgaggccgccagcagcaagctgcagagcagcaacatcttcaccgtggccaagagaaatgtggagggccaggacatgctgtaccagagcctgaagctgaccaacggcatctgggtgctggccgagctgcgcatccagcccggcaaccccagctgcaccctgagcctgaagtgccgggcccctgaggtgtcccagcacgtgtaccaggcctatgagaccatcctgaagaactag

SEQ ID NO: 142689 - DNA, 2829 bp, synthetic construct
  misc_feature 1..2829: note = Description of Artificial Sequence: Synthetic coding sequence
  source 1..2829: mol_type = other DNA
atgacagacagcaagtacttcaccaccaccaagaagggggagatctttgagctgaaggccgagctgaacagcgacaagaaggagaagaagaaggaggccgtgaagaaggtgattgcctccatgacagtgggcaaggatgtgtctgccctcttcccagatgtggtgaactgcatgcagacagacaacctggagctgaagaagctggtgtacctgtacctgatgaactatgccaagagccagcctgacatggccatcatggctgtgaacacctttgtgaaggactgtgaggaccccaaccccctcatccgggccctggccgtgaggaccatgggctgcatccgggtggacaagatcacagagtacctgtgtgagcccctgaggaagtgcctgaaggatgaggacccctacgtgaggaagacagctgctgtgtgtgtggccaagctgcatgacatcaatgcccagctggtggaggaccagggcttcctggacaccctgaaggacctgatcagtgacagcaaccccatggtggtggccaatgctgtggccgccctgtctgaaattgctgagagccaccccagcagcaacctgctggacctgaacccccagagcatcaacaagctgctgacagccctgaatgaatgtacagagtggggccagatcttcatcctggactgcctggccaactacatgcccaaggatgaccgggaggcccagagcatctgtgagcgggtgaccccccggctgagccacgccaacagcgctgtggtgctgtctgctgtgaaggtgctgatgaagttcatggagatgctgagcaaggacctggactactacggcaccctgctgaagaagctggccccacccctggtgaccctgctgtctgctgagcctgagctgcagtatgtggccctgaggaacatcaacctgattgtgcagaagaggcctgagatcctgaagcatgagatgaaggtgttctttgtgaagtacaatgaccccatctacgtgaagctggagaagctggacatcatgatccggctggccagccaggccaacatcgcccaggtgctggccgagctgaaggagtatgccacagaggtggatgtggactttgtgaggaaggctgtgcgggccatcggccgctgtgccatcaaggtggagcagagcgctgagcgctgtgtgtccaccctgctggacctgatccagaccaaggtgaactacgtggtgcaggaggccatcgtggtgatcaaggacatcttcaggaagtaccccaacaagtatgaatctgtgattgccaccctgtgtgagaacctggacagcctggatgagcctgaggcccgggccgccatgatctggatcgtgggggagtatgcagagagaattgacaatgctgatgagctgctggagagcttcctggagggcttccatgatgagagcacccaggtgcagctgcagctgctgacagccatcgtgaagctgttcctgaagaagcccacagagacccaggagctggtgcagcaggtgctgagcctggccacccaggacagcgacaacccagacctgcgggaccggggctacatctactggaggctgctgagcacagatcctgtggccgccaaggaggtggtgctggccgagaagcccctcatcagcgaggagacagacctgattgagcccaccctgctggatgagctgatctgctacatcggcaccctggcctctgtgtaccacaagcccccatctgcctttgtggagggcggccggggcgtggtgcacaagagcctgccccccaggacagccagcagcgagagcgctgagagccctgagacagcccccactggagcccctcctggagagcagccagatgtgatcccagcccagggcgacctgctgggggacctgctgaacctggacctgggcccccctgtgtctggcccccccctggccaccagctctgtgcagatgggcgctgtggacctgctgggcggcggcctggacagcctgattggaggcaccaactttgtggccccacccacagctgctgtgcctgccaacctgggcgcccccatcggcagcggcctgagtgacctgtttgacctgaccagcggcgtgggcaccctgagcggcagctatgtggcccccaaggctgtgtggctgcctgccatgaaggccaagggcctggagatcagcggcaccttcacccggcaggtgggcagcatctccatggacctgcagctgaccaacaaggccctgcaggtgatgacagactttgccatccagttcaacagaaattcctttggcctggccccagccacccccctgcaggtgcacgcccccctgagccccaaccagacagtggagatcagcctgcccctgagcacagtgggctctgtgatgaagatggagcccctgaacaacctgcaggtggccgtgaagaacaacattgatgtgttctacttcagcaccctgtaccccctgcacatcctgtttgtggaggatggcaagatggaccggcagatgttcctggccacctggaaggacatccccaatgaaaatgaggcccagttccagatccgggactgccccctgaatgctgaggccgccagcagcaagctgcagagcagcaacatcttcaccgtggccaagagaaatgtggagggccaggacatgctgtaccagagcctgaagctgaccaacggcatctgggtgctggccgagctgcgcatccagcccggcaaccccagctgcacagacctggagctgagcctgaagtgccgggcccctgaggtgtcccagcacgtgtaccaggcctatgagaccatcctgaagaactag

SEQ ID NO: 142690 - DNA, 2850 bp, synthetic construct
  misc_feature 1..2850: note = Description of Artificial Sequence: Synthetic coding sequence
  source 1..2850: mol_type = other DNA
atgacagacagcaagtacttcaccaccaccaagaagggggagatctttgagctgaaggccgagctgaacagcgacaagaaggagaagaagaaggaggccgtgaagaaggtgattgcctccatgacagtgggcaaggatgtgtctgccctcttcccagatgtggtgaactgcatgcagacagacaacctggagctgaagaagctggtgtacctgtacctgatgaactatgccaagagccagcctgacatggccatcatggctgtgaacacctttgtgaaggactgtgaggaccccaaccccctcatccgggccctggccgtgaggaccatgggctgcatccgggtggacaagatcacagagtacctgtgtgagcccctgaggaagtgcctgaaggatgaggacccctacgtgaggaagacagctgctgtgtgtgtggccaagctgcatgacatcaatgcccagctggtggaggaccagggcttcctggacaccctgaaggacctgatcagtgacagcaaccccatggtggtggccaatgctgtggccgccctgtctgaaattgctgagagccaccccagcagcaacctgctggacctgaacccccagagcatcaacaagctgctgacagccctgaatgaatgtacagagtggggccagatcttcatcctggactgcctggccaactacatgcccaaggatgaccgggaggcccagagcatctgtgagcgggtgaccccccggctgagccacgccaacagcgctgtggtgctgtctgctgtgaaggtgctgatgaagttcatggagatgctgagcaaggacctggactactacggcaccctgctgaagaagctggccccacccctggtgaccctgctgtctgctgagcctgagctgcagtatgtggccctgaggaacatcaacctgattgtgcagaagaggcctgagatcctgaagcatgagatgaaggtgttctttgtgaagtacaatgaccccatctacgtgaagctggagaagctggacatcatgatccggctggccagccaggccaacatcgcccaggtgctggccgagctgaaggagtatgccacagaggtggatgtggactttgtgaggaaggctgtgcgggccatcggccgctgtgccatcaaggtggagcagagcgctgagcgctgtgtgtccaccctgctggacctgatccagaccaaggtgaactacgtggtgcaggaggccatcgtggtgatcaaggacatcttcaggaagtaccccaacaagtatgaatctgtgattgccaccctgtgtgagaacctggacagcctggatgagcctgaggcccgggccgccatgatctggatcgtgggggagtatgcagagagaattgacaatgctgatgagctgctggagagcttcctggagggcttccatgatgagagcacccaggtgcagctgcagctgctgacagccatcgtgaagctgttcctgaagaagcccacagagacccaggagctggtgcagcaggtgctgagcctggccacccaggacagcgacaacccagacctgcgggaccggggctacatctactggaggctgctgagcacagatcctgtggccgccaaggaggtggtgctggccgagaagcccctcatcagcgaggagacagacctgattgagcccaccctgctggatgagctgatctgctacatcggcaccctggcctctgtgtaccacaagcccccatctgcctttgtggagggcggccggggcgtggtgcacaagagcctgccccccaggacagccagcagcgagagcgctgagagccctgagacagcccccactggagcccctcctggagagcagccagatgtgatcccagcccagggcgacctgctgggggacctgctgaacctggacctgggcccccctgtgtctggcccccccctggccaccagctctgtgcagatgggcgctgtggacctgctgggcggcggcctggacagcctgatgggagatgagcctgagggcatcggcggcaccaactttgtggccccacccacagctgctgtgcctgccaacctgggcgcccccatcggcagcggcctgagtgacctgtttgacctgaccagcggcgtgggcaccctgagcggcagctatgtggcccccaaggctgtgtggctgcctgccatgaaggccaagggcctggagatcagcggcaccttcacccggcaggtgggcagcatctccatggacctgcagctgaccaacaaggccctgcaggtgatgacagactttgccatccagttcaacagaaacagctttggcctggccccagccacccccctgcaggtgcacgcccccctgagccccaaccagacagtggagatcagcctgcccctgagcacagtgggctctgtgatgaagatggagcccctgaacaacctgcaggtggccgtgaagaacaacattgatgtgttctacttcagcaccctgtaccccctgcacatcctgtttgtggaggatggcaagatggaccggcagatgttcctggccacctggaaggacatccccaatgaaaatgaggcccagttccagatccgggactgccccctgaatgctgaggccgccagcagcaagctgcagagcagcaacatcttcaccgtggccaagagaaatgtggagggccaggacatgctgtaccagagcctgaagctgaccaacggcatctgggtgctggccgagctgcgcatccagcccggcaaccccagctgcacagacctggagctgagcctgaagtgccgggcccctgaggtgtcccagcacgtgtaccaggcctatgagaccatcctgaagaactag

SEQ ID NO: 142691 - DNA, 2820 bp, synthetic construct
  misc_feature 1..2820: note = Description of Artificial Sequence: Synthetic coding sequence
  source 1..2820: mol_type = other DNA
atgacagacagcaagtacttcaccaccaccaagaagggggagatctttgagctgaaggccgagctgaacagcgacaagaaggagaagaagaaggaggccgtgaagaaggtgattgcctccatgacagtgggcaaggatgtgtctgccctcttcccagatgtggtgaactgcatgcagacagacaacctggagctgaagaagctggtgtacctgtacctgatgaactatgccaagagccagcctgacatggccatcatggctgtgaacacctttgtgaaggactgtgaggaccccaaccccctcatccgggccctggccgtgaggaccatgggctgcatccgggtggacaagatcacagagtacctgtgtgagcccctgaggaagtgcctgaaggatgaggacccctacgtgaggaagacagctgctgtgtgtgtggccaagctgcatgacatcaatgcccagctggtggaggaccagggcttcctggacaccctgaaggacctgatcagtgacagcaaccccatggtggtggccaatgctgtggccgccctgtctgaaattgctgagagccaccccagcagcaacctgctggacctgaacccccagagcatcaacaagctgctgacagccctgaatgaatgtacagagtggggccagatcttcatcctggactgcctggccaactacatgcccaaggatgaccgggaggcccagagcatctgtgagcgggtgaccccccggctgagccacgccaacagcgctgtggtgctgtctgctgtgaaggtgctgatgaagttcatggagatgctgagcaaggacctggactactacggcaccctgctgaagaagctggccccacccctggtgaccctgctgtctgctgagcctgagctgcagtatgtggccctgaggaacatcaacctgattgtgcagaagaggcctgagatcctgaagcatgagatgaaggtgttctttgtgaagtacaatgaccccatctacgtgaagctggagaagctggacatcatgatccggctggccagccaggccaacatcgcccaggtgctggccgagctgaaggagtatgccacagaggtggatgtggactttgtgaggaaggctgtgcgggccatcggccgctgtgccatcaaggtggagcagagcgctgagcgctgtgtgtccaccctgctggacctgatccagaccaaggtgaactacgtggtgcaggaggccatcgtggtgatcaaggacatcttcaggaagtaccccaacaagtatgaatctgtgattgccaccctgtgtgagaacctggacagcctggatgagcctgaggcccgggccgccatgatctggatcgtgggggagtatgcagagagaattgacaatgctgatgagctgctggagagcttcctggagggcttccatgatgagagcacccaggtgcagctgcagctgctgacagccatcgtgaagctgttcctgaagaagcccacagagacccaggagctggtgcagcaggtgctgagcctggccacccaggacagcgacaacccagacctgcgggaccggggctacatctactggaggctgctgagcacagatcctgtggccgccaaggaggtggtgctggccgagaagcccctcatcagcgaggagacagacctgattgagcccaccctgctggatgagctgatctgctacatcggcaccctggcctctgtgtaccacaagcccccatctgcctttgtggagggcggccggggcgtggtgcacaagagcctgccccccaggacagccagcagcgagagcgctgagagccctgagacagcccccactggagcccctcctggagagcagccagatgtgatcccagcccagggcgacctgctgggggacctgctgaacctggacctgggcccccctgtgtctggcccccccctggccaccagctctgtgcagatgggcgctgtggacctgctgggcggcggcctggacagcctgattggaggcaccaactttgtggccccacccacagctgctgtgcctgccaacctgggcgcccccatcggcagcggcctgagtgacctgtttgacctgaccagcggcgtgggcaccctgagcggcagctatgtggcccccaaggctgtgtggctgcctgccatgaaggccaagggcctggagatcagcggcaccttcacccggcaggtgggcagcatctccatggacctgcagctgaccaacaaggccctgcaggtgatgacagactttgccatccagttcaacagaaattcctttggcctggccccagccacccccctgcaggtgcacgcccccctgagccccaaccagacagtggagatcagcctgcccctgagcacagtgggctctgtgatgaagatggagcccctgaacaacctgcaggtggccgtgaagaacaacattgatgtgttctacttcagcaccctgtaccccctgcacatcctgtttgtggaggatggcaagatggaccggcagatgttcctggccacctggaaggacatccccaatgaaaatgaggcccagttccagatccgggactgccccctgaatgctgaggccgccagcagcaagctgcagagcagcaacatcttcaccgtggccaagagaaatgtggagggccaggacatgctgtaccagagcctgaagctgaccaacggcatctgggtgctggccgagctgcgcatccagcccggcaaccccagctgcaccctgagcctgaagtgccgggcccctgaggtgtcccagcacgtgtaccaggcctatgagaccatcctgaagaactag

SEQ ID NO: 142692 - DNA, 2850 bp, synthetic construct; identical to SEQ ID NO: 142690
  misc_feature 1..2850: note = Description of Artificial Sequence: Synthetic coding sequence
  source 1..2850: mol_type = other DNA

SEQ ID NO: 142693 - DNA, 2820 bp, synthetic construct; identical to SEQ ID NO: 142691
  misc_feature 1..2820: note = Description of Artificial Sequence: Synthetic coding sequence
  source 1..2820: mol_type = other DNA

SEQ ID NO: 142694 - DNA, 1737 bp, synthetic construct
  misc_feature 1..1737: note = Description of Artificial Sequence: Synthetic coding sequence
  source 1..1737: mol_type = other DNA
atgacagacagcaagtacttcaccaccaccaagaagggggagatctttgagctgaaggccgagctgaacagcgacaagaaggagaagaagaaggaggccgtgaagaaggtgattgcctccatgacagtgggcaaggatgtgtctgccctcttcccagatgtggtgaactgcatgcagacagacaacctggagctgaagaagctggtgtacctgtacctgatgaactatgccaagagccagcctgacatggccatcatggctgtgaacacctttgtgaaggactgtgaggaccccaaccccctcatccgggccctggccgtgaggaccatgggctgcatccgggtggacaagatcacagagtacctgtgtgagcccctgaggaagtgcctgaaggatgaggacccctacgtgaggaagacagctgctgtgtgtgtggccaagctgcatgacatcaatgcccagctggtggaggaccagggcttcctggacaccctgaaggacctgatcagtgacagcaaccccatggtggtggccaatgctgtggccgccctgtctgaaattgctgagagccaccccagcagcaacctgctggacctgaacccccagagcatcaacaagctgctgacagccctgaatgaatgtacagagtggggccagatcttcatcctggactgcctggccaactacatgcccaaggatgaccgggaggcccagagcatctgtgagcgggtgaccccccggctgagccacgccaacagcgctgtggtgctgtctgctgtgaaggtgctgatgaagttcatggagatgctgagcaaggacctggactactacggcaccctgctgaagaagctggccccacccctggtgaccctgctgtctgctgagcctgagctgcagtatgtggccctgaggaacatcaacctgattgtgcagaagaggcctgagatcctgaagcatgagatgaaggtgttctttgtgaagtacaatgaccccatctacgtgaagctggagaagctggacatcatgatccggctggccagccaggccaacatcgcccaggtgctggccgagctgaaggagtatgccacagaggtggatgtggactttgtgaggaaggctgtgcgggccatcggccgctgtgccatcaaggtggagcagagcgctgagcgctgtgtgtccaccctgctggacctgatccagaccaaggtgaactacgtggtgcaggaggccatcgtggtgatcaaggacatcttcaggaagtaccccaacaagtatgaatctgtgattgccaccctgtgtgagaacctggacagcctggatgagcctgaggcccgggccgccatgatctggatcgtgggggagtatgcagagagaattgacaatgctgatgagctgctggagagcttcctggagggcttccatgatgagagcacccaggtgcagctgcagctgctgacagccatcgtgaagctgttcctgaagaagcccacagagacccaggagctggtgcagcaggtgctgagcctggccacccaggacagcgacaacccagacctgcgggaccggggctacatctactggaggctgctgagcacagatcctgtggccgccaaggaggtggtgctggccgagaagcccctcatcagcgaggagacagacctgattgagcccaccctgctggatgagctgatctgctacatcggcaccctggcctctgtgtaccacaagcccccatag

SEQ ID NO: 142695 - DNA, 2820 bp, synthetic construct; identical to SEQ ID NO: 142691
  misc_feature 1..2820: note = Description of Artificial Sequence: Synthetic coding sequence
  source 1..2820: mol_type = other DNA

SEQ ID NO: 142696 - DNA, 2469 bp, synthetic construct
  misc_feature 1..2469: note = Description of Artificial Sequence: Synthetic coding sequence
  source 1..2469: mol_type = other DNA
atgcctgcccccatccggctgcgggagctgatccgcaccatcagaacagcccggacccaggccgaggagcgggagatgatccagaaggaatgtgccgccatccgcagcagcttccgggaggaggacaacacctaccgctgcagaaatgtggccaagctgctgtacatgcacatgctgggctacccagcccacttcggccagctggagtgcctgaagctgattgccagccagaagttcacagacaagagaattggctacctgggcgccatgctgctgctggatgagcggcaggatgtgcacctgctgatgaccaactgcatcaagaatgacctgaaccacagcacccagtttgtgcagggcctggccctgtgcaccctgggctgcatgggcagcagcgagatgtgccgggacctggccggggaggtggagaagctgctgaagaccagcaacagctacctgaggaagaaggccgccctgtgtgctgtgcacgtgatcaggaaggtgcctgagctgatggagatgttcctgcctgccaccaagaacctgctgaatgagaagaaccacggcgtgctgcacacctctgtggtgctgctgacagagatgtgtgagaggagcccagacatgctggcccacttcaggaagctggtgccccagctggtgcgcatcctgaagaacctgatcatgagcggctacagccctgagcatgatgtgtctggcatcagtgaccccttcctgcaggtgcgcatcctgcggctgctgcgcatcctgggcagaaatgatgatgacagcagcgaggccatgaatgacatcctggcccaggtggccaccaacacagagaccagcaagaatgtgggcaatgccatcctgtatgagaccgtgctgaccatcatggacatcaagtctgagagcggcctgcgggtgctggccatcaacatcctgggccgcttcctgctgaacaatgacaagaacatccgctacgtggccctgaccagcctgctgaagacagtgcagacagaccacaatgctgtgcagaggcacaggagcaccatcgtggactgcctgaaggacctggatgtgtccatcaagagaagagccatggagctgagctttgccctggtgaatggaaacaacatccggggcatgatgaaggagctgctgtacttcctggacagctgtgagcctgagttcaaggctgactgtgccagcggcatcttcctggccgctgagaagtatgcccccagcaagcgctggcacatcgacaccatcatgagggtgctgaccacagctggcagctatgtgagagatgatgctgtgcccaacctgatccagctgatcaccaacagcgtggagatgcacgcctacacagtgcagaggctgtacaaggccatcctgggggactacagccagcagcccctggtgcaggtggccgcctggtgcatcggggagtatggagacctgctggtgtctggccagtgtgaggaggaggagcccatccaggtgacagaagatgaggtgctggacatcctggagagcgtgctgatcagcaacatgagcacctctgtgacccggggctacgccctgacagccatcatgaagctgagcacccgcttcacctgcaccgtgaaccgcatcaagaaggtggtgtccatctacggcagcagcattgatgtggagctgcagcagagagctgtggagtacaatgccctcttcaagaagtatgaccacatgaggtctgccctgctggagaggatgcctgtgatggagaaggtgaccaccaacggccccacagagatcgtgcagaccaacggggagacagagcccgcccccctggagaccaagcccccaccttctggcccccagcccaccagccaggccaatgacctgctggacctgctgggcggcaatgacatcacccctgtgatccccacagcccccaccagcaagcccagcagcgctggaggagagctgctggacctgctgggggacatcaacctgaccggggccccagctgctgccccagccccagcctctgtgccccagatcagccagccccccttcctgctggatggcctgagcagccagcccctcttcaatgacattgctgctggcatccccagcatcacagcctacagcaagaatggcctgaagattgagttcacctttgagaggagcaacaccaaccccagcgtgaccgtcatcaccatccaggccagcaacagcacagagctggacatgacagactttgtgttccaggccgctgtgcccaagaccttccagctgcagctgctgagccccagcagcagcatcgtgcctgccttcaacacaggcaccatcacccaggtgatcaaggtgctgaacccccagaagcagcagctgaggatgaggatcaagctgacctacaaccacaagggcagcgccatgcaggacctggccgaggtgaacaacttccccccccagagctggcagtag

SEQ ID NO: 142697 - DNA, 2478 bp, synthetic construct
  misc_feature 1..2478: note = Description of Artificial Sequence: Synthetic coding sequence
  source 1..2478: mol_type = other DNA
atgcctgcccccatccggctgcgggagctgatccgcaccatcagaacagcccggacccaggccgaggagcgggagatgatccagaaggaatgtgccgccatccgcagcagcttccgggaggaggacaacacctaccgctgcagaaatgtggccaagctgctgtacatgcacatgctgggctacccagcccacttcggccagctggagtgcctgaagctgattgccagccagaagttcacagacaagagaattggctacctgggcgccatgctgctgctggatgagcggcaggatgtgcacctgctgatgaccaactgcatcaagaatgacctgaaccacagcacccagtttgtgcagggcctggccctgtgcaccctgggctgcatgggcagcagcgagatgtgccgggacctggccggggaggtggagaagctgctgaagaccagcaacagctacctgaggaagaaggccgccctgtgtgctgtgcacgtgatcaggaaggtgcctgagctgatggagatgttcctgcctgccaccaagaacctgctgaatgagaagaaccacggcgtgctgcacacctctgtggtgctgctgacagagatgtgtgagaggagcccagacatgctggcccacttcaggaagaatgagaagctggtgccccagctggtgcgcatcctgaagaacctgatcatgagcggctacagccctgagcatgatgtgtctggcatcagtgaccccttcctgcaggtgcgcatcctgcggctgctgcgcatcctgggcagaaatgatgatgacagcagcgaggccatgaatgacatcctggcccaggtggccaccaacacagagaccagcaagaatgtgggcaatgccatcctgtatgaaacagtgctgaccatcatggacatcaagtctgagagcggcctgcgggtgctggccatcaacatcctgggccgcttcctgctgaacaatgacaagaacatccgctacgtggccctgaccagcctgctgaagacagtgcagacagaccacaatgctgtgcagaggcacaggagcaccatcgtggactgcctgaaggacctggatgtgtccatcaagaggcgggccatggagctgagctttgccctggtgaatggaaacaacatccggggcatgatgaaggagctgctgtacttcctggacagctgtgagcctgagttcaaggctgactgtgccagcggcatcttcctggccgctgagaagtatgcccccagcaagcgctggcacatcgacaccatcatgagggtgctgaccacagctggcagctatgtgagagatgatgctgtgcccaacctgatccagctgatcaccaacagcgtggagatgcacgcctacacagtgcagaggctgtacaaggccatcctgggggactacagccagcagcccctggtgcaggtggccgcctggtgcattggagaatatggagacctgctggtgtctggccagtgtgaggaggaggagcccatccaggtgacagaagatgaggtgctggacatcctggagagcgtgctgatcagcaacatgagcacctctgtgacccggggctacgccctgacagccatcatgaagctgagcacccgcttcacctgcaccgtgaaccgcatcaagaaggtggtgtccatctacggcagcagcattgatgtggagctgcagcagagagctgtggagtacaatgccctcttcaagaagtatgaccacatgaggtctgccctgctggagaggatgcctgtgatggagaaggtgaccaccaacggccccacagaaattgtgcagaccaatggagaaacagagcccgcccccctggagaccaagcccccacccagcggcccccagcccaccagccaggccaatgacctgctggacctgctgggcggcaatgacatcacccctgtgatccccacagcccccaccagcaagcccagcagcgctggaggagagctgctggacctgctgggggacatcaacctgactggagccccagctgctgccccagccccagcctctgtgccccagatcagccagccccccttcctgctggatggcctgagcagccagcccctcttcaatgacattgctgctggcatccccagcatcacagcctacagcaagaatggcctgaagattgagttcacctttgagaggagcaacaccaaccccagcgtgaccgtcatcaccatccaggccagcaacagcacagagctggacatgacagactttgtgttccaggccgctgtgcccaagaccttccagctgcagctgctgagccccagcagcagcatcgtgcctgccttcaacacaggcaccatcacccaggtgatcaaggtgctgaacccccagaagcagcagctgaggatgaggatcaagctgacctacaaccacaagggcagcgccatgcaggacctggccgaggtgaacaacttccccccccagagctggcagtag

SEQ ID NO: 142698 - DNA, 2478 bp, synthetic construct
  misc_feature 1..2478: note = Description of Artificial Sequence: Synthetic coding sequence
  source 1..2478: mol_type = other DNA
atgcctgcccccatccggctgcgggagctgatccgcaccatcagaacagcccggacccaggccgaggagcgggagatgatccagaaggaatgtgccgccatccgcagcagcttccgggaggaggacaacacctaccgctgcagaaatgtggccaagctgctgtacatgcacatgctgggctacccagcccacttcggccagctggagtgcctgaagctgattgccagccagaagttcacagacaagagaattggctacctgggcgccatgctgctgctggatgagcggcaggatgtgcacctgctgatgaccaactgcatcaagaatgacctgaaccacagcacccagtttgtgcagggcctggccctgtgcaccctgggctgcatgggcagcagcgagatgtgccgggacctggccggggaggtggagaagctgctgaagaccagcaacagctacctgaggaagaaggccgccctgtgtgctgtgcacgtgatcaggaaggtgcctgagctgatggagatgttcctgcctgccaccaagaacctgctgaatgagaagaaccacggcgtgctgcacacctctgtggtgctgctgacagagatgtgtgagaggagcccagacatgctggcccacttcaggaaggagagcaagctggtgccccagctggtgcgcatcctgaagaacctgatcatgagcggctacagccctgagcatgatgtgtctggcatcagtgaccccttcctgcaggtgcgcatcctgcggctgctgcgcatcctgggcagaaatgatgatgacagcagcgaggccatgaatgacatcctggcccaggtggccaccaacacagagaccagcaagaatgtgggcaatgccatcctgtatgaaacagtgctgaccatcatggacatcaagtctgagagcggcctgcgggtgctggccatcaacatcctgggccgcttcctgctgaacaatgacaagaacatccgctacgtggccctgaccagcctgctgaagacagtgcagacagaccacaatgctgtgcagaggcacaggagcaccatcgtggactgcctgaaggacctggatgtgtccatcaagaggcgggccatggagctgagctttgccctggtgaatggaaacaacatccggggcatgatgaaggagctgctgtacttcctggacagctgtgagcctgagttcaaggctgactgtgccagcggcatcttcctggccgctgagaagtatgcccccagcaagcgctggcacatcgacaccatcatgagggtgctgaccacagctggcagctatgtgagagatgatgctgtgcccaacctgatccagctgatcaccaacagcgtggagatgcacgcctacacagtgcagaggctgtacaaggccatcctgggggactacagccagcagcccctggtgcaggtggccgcctggtgcattggagaatatggagacctgctggtgtctggccagtgtgaggaggaggagcccatccaggtgacagaagatgaggtgctggacatcctggagagcgtgctgatcagcaacatgagcacctctgtgacccggggctacgccctgacagccatcatgaagctgagcacccgcttcacctgcaccgtgaaccgcatcaagaaggtggtgtccatctacggcagcagcattgatgtggagctgcagcagagagctgtggagtacaatgccctcttcaagaagtatgaccacatgaggtctgccctgctggagaggatgcctgtgatggagaaggtgaccaccaacggccccacagaaattgtgcagaccaatggagaaacagagcccgcccccctggagaccaagcccccacccagcggcccccagcccaccagccaggccaatgacctgctggacctgctgggcggcaatgacatcacccctgtgatccccacagcccccaccagcaagcccagcagcgctggaggagagctgctggacctgctgggggacatcaacctgactggagccccagctgctgccccagccccagcctctgtgccccagatcagccagccccccttcctgctggatggcctgagcagccagcccctcttcaatgacattgctgctggcatccccagcatcacagcctacagcaagaatggcctgaagattgagttcacctttgagaggagcaacaccaaccccagcgtgaccgtcatcaccatccaggccagcaacagcacagagctggacatgacagactttgtgttccaggccgctgtgcccaagaccttccagctgcagctgctgagccccagcagcagcatcgtgcctgccttcaacacaggcaccatcacccaggtgatcaaggtgctgaacccccagaagcagcagctgaggatgaggatcaagctgacctacaaccacaagggcagcgccatgcaggacctggccgaggtgaacaacttccccccccagagctggcagtag

SEQ ID NO: 142699 - DNA, 1698 bp, synthetic construct
  misc_feature 1..1698: note = Description of Artificial Sequence: Synthetic coding sequence
  source 1..1698: mol_type = other DNA
atgtttggcagctgctgccactgctgccggcggcccaggagctgctggttccacagccgcttccgggctgtgtctggagtgcagagccaggccgtgggcgtggagaagaggcggcagaggtcctgggcccggcggggccgggagccccagggcctgctgcggctgctggagggccggccccggggcctgggccctgggggcagcgcccggcggggcgtgccctgctgcggcgtggccccacccaggatgcctgcccccatccggctgcgggagctgatccgcaccatcagaacagcccggacccaggccgaggagcgggagatgatccagaaggaatgtgccgccatccgcagcagcttccgggaggaggacaacacctaccgctgcagaaatgtggccaagctgctgtacatgcacatgctgggctacccagcccacttcggccagctggagtgcctgaagctgattgccagccagaagttcacagacaagagaattggctacctgggcgccatgctgctgctggatgagcggcaggatgtgcacctgctgatgaccaactgcatcaagaatgacctgaaccacagcacccagtttgtgcagggcctggccctgtgcaccctgggctgcatgggcagcagcgagatgtgccgggacctggccggggaggtggagaagctgctgaagaccagcaacagctacctgaggaagaaggccgccctgtgtgctgtgcacgtgatcaggaaggtgcctgagctgatggagatgttcctgcctgccaccaagaacctgctgaatgagaagaaccacggcgtgctgcacacctctgtggtgctgctgacagagatgtgtgagaggagcccagacatgctggcccacttcaggaaggagagcaagctggtgccccagctggtgcgcatcctgaagaacctgatcatgagcggctacagccctgagcatgatgtgtctggcatcagtgaccccttcctgcaggtgcgcatcctgcggctgctgcgcatcctgggcagaaatgatgatgacagcagcgaggccatgaatgacatcctggcccaggtggccaccaacacagagaccagcaagaatgtgggcaatgccatcctgtatgaaacagtgctgaccatcatggacatcaagtctgagagcggcctgcgggtgctggccatcaacatcctgggccgcttcctgctgaacaatgacaagaacatccgctacgtggccctgaccagcctgctgaagacagtgcagacagaccacaatgctgtgcagaggcacaggagcaccatcgtggactgcctgaaggacctggatgtgtccatcaagaggcgggccatggagctgagctttgccctggtgaatggaaacaacatccggggcatgatgaaggagctgctgtacttcctggacagctgtgagcctgagttcaaggctgactgtgccagcggcatcttcctggccgctgagaagtatgcccccagcaagcgctggcacatcgacaccatcatgagggtgctgaccacagctggcagctatgtgagagatgatgctgtgcccaacctgatccagctgatcaccaacagcgtggagatgcacgcctacacagtgcagaggctgtacaaggccatcctgggggactacagccccaccttcggcaccagcggctgcatggtgtacagatag

SEQ ID NO: 142700 - DNA, 2538 bp, synthetic construct
  misc_feature 1..2538: note = Description of Artificial Sequence: Synthetic coding sequence
  source 1..2538: mol_type = other DNA
atggagaagaacatcaacctgaggaactgccagaccctgaacacctacgtgatgctgacccacctgaggatgcctgcccccatccggctgcgggagctgatccgcaccatcagaacagcccggacccaggccgaggagcgggagatgatccagaaggaatgtgccgccatccgcagcagcttccgggaggaggacaacacctaccgctgcagaaatgtggccaagctgctgtacatgcacatgctgggctacccagcccacttcggccagctggagtgcctgaagctgattgccagccagaagttcacagacaagagaattggctacctgggcgccatgctgctgctggatgagcggcaggatgtgcacctgctgatgaccaactgcatcaagaatgacctgaaccacagcacccagtttgtgcagggcctggccctgtgcaccctgggctgcatgggcagcagcgagatgtgccgggacctggccggggaggtggagaagctgctgaagaccagcaacagctacctgaggaagaaggccgccctgtgtgctgtgcacgtgatcaggaaggtgcctgagctgatggagatgttcctgcctgccaccaagaacctgctgaatgagaagaaccacggcgtgctgcacacctctgtggtgctgctgacagagatgtgtgagaggagcccagacatgctggcccacttcaggaagctggtgccccagctggtgcgcatcctgaagaacctgatcatgagcggctacagccctgagcatgatgtgtctggcatcagtgaccccttcctgcaggtgcgcatcctgcggctgctgcgcatcctgggcagaaatgatgatgacagcagcgaggccatgaatgacatcctggcccaggtggccaccaacacagagaccagcaagaatgtgggcaatgccatcctgtatgaaacagtgctgaccatcatggacatcaagtctgagagcggcctgcgggtgctggccatcaacatcctgggccgcttcctgctgaacaatgacaagaacatccgctacgtggccctgaccagcctgctgaagacagtgcagacagaccacaatgctgtgcagaggcacaggagcaccatcgtggactgcctgaaggacctggatgtgtccatcaagaggcgggccatggagctgagctttgccctggtgaatggaaacaacatccggggcatgatgaaggagctgctgtacttcctggacagctgtgagcctgagttcaaggctgactgtgccagcggcatcttcctggccgctgagaagtatgcccccagcaagcgctggcacatcgacaccatcatgagggtgctgaccacagctggcagctatgtgagagatgatgctgtgcccaacctgatccagctgatcaccaacagcgtggagatgcacgcctacacagtgcagaggctgtacaaggccatcctgggggactacagccagcagcccctggtgcaggtggccgcctggtgcattggagaatatggagacctgctggtgtctggccagtgtgaggaggaggagcccatccaggtgacagaagatgaggtgctggacatcctggagagcgtgctgatcagcaacatgagcacctctgtgacccggggctacgccctgacagccatcatgaagctgagcacccgcttcacctgcaccgtgaaccgcatcaagaaggtggtgtccatctacggcagcagcattgatgtggagctgcagcagagagctgtggagtacaatgccctcttcaagaagtatgaccacatgaggtctgccctgctggagaggatgcctgtgatggagaaggtgaccaccaacggccccacagaaattgtgcagaccaatggagaaacagagcccgcccccctggagaccaagcccccacccagcggcccccagcccaccagccaggccaatgacctgctggacctgctgggcggcaatgacatcacccctgtgatccccacagcccccaccagcaagcccagcagcgctggaggagagctgctggacctgctgggggacatcaacctgactggagccccagctgctgccccagccccagcctctgtgccccagatcagccagccccccttcctgctggatggcctgagcagccagcccctcttcaatgacattgctgctggcatccccagcatcacagcctacagcaagaatggcctgaagattgagttcacctttgagaggagcaacaccaaccccagcgtgaccgtcatcaccatccaggccagcaacagcacagagctggacatgacagactttgtgttccaggccgctgtgcccaagaccttccagctgcagctgctgagccccagcagcagcatcgtgcctgccttcaacacaggcaccatcacccaggtgatcaaggtgctgaacccccagaagcagcagctgaggatgaggatcaagctgacctacaaccacaagggcagcgccatgcaggacctggccgaggtgaacaacttccccccccagagctggcagtag

SEQ ID NO: 142701 - DNA, 531 bp, synthetic construct
  misc_feature 1..531: note = Description of Artificial Sequence: Synthetic coding sequence
  source 1..531: mol_type = other DNA
atgcctgcccccatccggctgcgggagctgatccgcaccatcagaacagcccggacccaggccgaggagcgggagatgatccagaaggaatgtgccgccatccgcagcagcttccgggaggaggacaacacctaccgctgcagaaatgtggccaagctgctgtacatgcacatgctgggctacccagcccacttcggccagctggagtgcctgaagctgattgccagccagaagttcacagacaagagaattggctacctgggcgccatgctgctgctggatgagcggcaggatgtgcacctgctgatgaccaactgcatcaagaatgacctgaaccacagcacccagtttgtgcagggcctggccctgtgcaccctgggctgcatgggcagcagcgagatgtgccgggacctggccggggaggtggagaagctgctgaagaccagcaacagctacctgaggaagaaggagatgatctacaagcagaccaacgtgacaggctacatcctgggcggcatccccaacagctag

SEQ ID NO: 142702 - DNA, 1047 bp, synthetic construct
  misc_feature 1..1047: note = Description of Artificial Sequence: Synthetic coding sequence
  source 1..1047: mol_type = other DNA
atgaaggacaagatgtgccgggacctggccggggaggtggagaagctgctgaagaccagcaacagctacctgaggaagaaggccgccctgtgtgctgtgcacgtgatcaggaaggtgcctgagctgatggagatgttcctgcctgccaccaagaacctgctgaatgagaagaaccacggcgtgctgcacacctctgtggtgctgctgacagagatgtgtgagaggagcccagacatgctggcccacttcaggaagctggtgccccagctggtgcgcatcctgaagaacctgatcatgagcggctacagccctgagcatgatgtgtctggcatcagtgaccccttcctgcaggtgcgcatcctgcggctgctgcgcatcctgggcagaaatgatgatgacagcagcgaggccatgaatgacatcctggcccaggtggccaccaacacagagaccagcaagaatgtgggcaatgccatcctgtatgaaacagtgctgaccatcatggacatcaagtctgagagcggcctgcgggtgctggccatcaacatcctgggccgcttcctgctgaacaatgacaagaacatccgctacgtggccctgaccagcctgctgaagacagtgcagacagaccacaatgctgtgcagaggcacaggagcaccatcgtggactgcctgaaggacctggatgtgtccatcaagaggcgggccatggagctgagctttgccctggtgaatggaaacaacatccggggcatgatgaaggagctgctgtacttcctggacagctgtgagcctgagttcaaggctgactgtgccagcggcatcttcctggccgctgtgcccaagaccttccagctgcagctgctgagccccagcagcagcatcgtgcctgccttcaacacaggcaccatcacccaggtgatcaaggtgctgaacccccagaagcagcagctgaggatgaggatcaagctgacctacaaccacaagggcagcgccatgcaggacctggccgaggtgaacaacttccccccccagagctggcagtag

SEQ ID NO: 142703 - DNA, 1272 bp, synthetic construct
  misc_feature 1..1272: note = Description of Artificial Sequence: Synthetic coding sequence
  source 1..1272: mol_type = other DNA
atgtctgccagcgctgtgtatgtgctggacctgaagggcaaggtgctgatctgcaggaactacagaggagatgtggacatgtctgaggtggagcacttcatgcccatcctgatggagaaggaggaggagggcatgctgagccccatcctggcccacggcggcgtgcgcttcatgtggatcaagcacaacaacctgtacctggtggccaccagcaagaagaatgcctgtgtgtccctggtgttctccttcctgtacaaggtggtgcaggtgttcagcgagtacttcaaggagctggaggaggagagcatccgggacaactttgtgatcatctatgagctgctggatgagctgatggactttggctacccccagaccacagacagcaagatcctgcaggagtacatcacccaggagggccacaagctggagaccggggccccccggcccccagccaccgtgaccaatgctgtgtcctggaggtctgagggcatcaagtacaggaagaatgaggtgttcctggatgtgattgagagcgtgaacctgctggtgtctgccaatggaaatgtgctgcggtctgagatcgtgggcagcatcaagatgagggtcttcctgagcggcatgcctgagctgcggctgggcctgaatgacaaggtgctgtttgacaacacaggccggggcaagagcaagtctgtggagctggaggatgtgaagttccaccagtgtgtgcggctgagcagatttgaaaatgacaggaccatctccttcatccccccagatggagaatttgagctgatgagctaccgcctgaacacccacgtgaagcccctcatctggattgaatctgtgattgagaagcacagccacagcagaattgagtacatgatcaaggccaagagccagttcaagagaagaagcacagccaacaacgtggagatccacatccctgtgcccaatgatgctgacagccccaagttcaagaccaccgtgggctctgtgaagtgggtgcctgaaaattctgaaattgtgtggagcatcaagagcttccctgggggcaaggagtacctgatgagggcccacttcggcctgcccagcgtggaggccgaggacaaggagggcaagccacccatctctgtgaagtttgagatcccctacttcaccaccagcggcatccaggtgcgctacctgaagatcatcgagaagagcggctaccaggccctgccctgggtgcgctacatcacccagaatggagactaccagctgcggacccagtag

SEQ ID NO: 142704 - DNA, 1113 bp, synthetic construct
  misc_feature 1..1113: note = Description of Artificial Sequence: Synthetic coding sequence
  source 1..1113: mol_type = other DNA
atgtctgccagcgctgtgtatgtgctggacctgaagggcaaggtgctgatctgcaggaactacagaggagatgtggacatgtctgaggtggagcacttcatgcccatcctgatggagaaggaggaggagggcatgctgagccccatcctggcccacggcggcgtgcgcttcatgtggatcaagcacaacaacctgtacctggtggccaccagcaagaagaatgcctgtgtgtccctggtgttctccttcctgtacaaggtggtgcaggtgttcagcgagtacttcaaggagctggaggaggagagcatccgggacaactttgtgatcatctatgagctgctggatgagctgatggactttggctacccccagaccacagacagcaagatcctgcaggagtacatcacccaggagggccacaagctggagaccggggccccccggcccccagccaccgtgaccaatgctgtgtcctggaggtctgagggcatcaagtacaggaagaatgaggtgttcctggatgtgattgagagcgtgaacctgctggtgtctgccaatggaaatgtgctgcggtctgagatcgtgggcagcatcaagatgagggtcttcctgagcggcatgcctgagctgcggctgggcctgaatgacaaggtgctgtttgacaacacaggccggggcaagagcaagtctgtggagctggaggatgtgaagttccaccagtgtgtgcggctgagcagatttgaaaatgacaggaccatctccttcatccccccagatggagaatttgagctgatgagctaccgcctgaacacccacgtgaagcccctcatctggattgaatctgtgattgagaagcacagccacagcagaattgagtacatgatcaagggcggcaaggagtacctgatgagggcccacttcggcctgcccagcgtggaggccgaggacaaggagggcaagccacccatctctgtgaagtttgagatcccctacttcaccaccagcggcatccaggtgcgctacctgaagatcatcgagaagagcggctaccaggccctgccctgggtgcgctacatcacccagaatggagactaccagctgcggacccagtag

SEQ ID NO: 142705 - DNA, 1308 bp, synthetic construct
  misc_feature 1..1308: note = Description of Artificial Sequence: Synthetic coding sequence
  source 1..1308: mol_type = other DNA
atgtctgccagcgctgtgtatgtgctggacctgaagggcaaggtgctgatctgcaggaactacagaggagatgtggacatgtctgaggtggagcacttcatgcccatcctgatggagaaggaggaggagggcatgctgagccccatcctggcccacggcggcgtgcgcttcatgtggatcaagcacaacaacctgtacctggtggccaccagcaagaagaatgcctgtgtgtccctggtgttctccttcctgtacaaggtggtgcaggtgttcagcgagtacttcaaggagctggaggaggagagcatccgggacaactttgtgatcatctatgagctgctggatgagctgatggactttggctacccccagaccacagacagcaagatcctgcaggagtacatcacccaggagggccacaagctggagaccggggccccccggcccccagccaccgtgaccaatgctgtgtcctggaggtctgagggcatcaagtacaggaagaatgaggtgttcctggatgtgattgagagcgtgaacctgctgggcaagtacccaggagtgggctggctgggccacacagtgtctgccaatggaaatgtgctgcggtctgagatcgtgggcagcatcaagatgagggtcttcctgagcggcatgcctgagctgcggctgggcctgaatgacaaggtgctgtttgacaacacaggccggggcaagagcaagtctgtggagctggaggatgtgaagttccaccagtgtgtgcggctgagcagatttgaaaatgacaggaccatctccttcatccccccagatggagaatttgagctgatgagctaccgcctgaacacccacgtgaagcccctcatctggattgaatctgtgattgagaagcacagccacagcagaattgagtacatgatcaaggccaagagccagttcaagagaagaagcacagccaacaacgtggagatccacatccctgtgcccaatgatgctgacagccccaagttcaagaccaccgtgggctctgtgaagtgggtgcctgaaaattctgaaattgtgtggagcatcaagagcttccctgggggcaaggagtacctgatgagggcccacttcggcctgcccagcgtggaggccgaggacaaggagggcaagccacccatctctgtgaagtttgagatcccctacttcaccaccagcggcatccaggtgcgctacctgaagatcatcgagaagagcggctaccaggccctgccctgggtgcgctacatcacccagaatggagactaccagctgcggacccagtag

SEQ ID NO: 142706 - DNA, 1056 bp, synthetic construct
  misc_feature 1..1056: note = Description of Artificial Sequence: Synthetic coding sequence
  source 1..1056: mol_type = other DNA
atgtctgccagcgctgtgtatgtgctggacctgaagggcaaggtggtgcaggtgttcagcgagtacttcaaggagctggaggaggagagcatccgggacaactttgtgatcatctatgagctgctggatgagctgatggactttggctacccccagaccacagacagcaagatcctgcaggagtacatcacccaggagggccacaagctggagaccggggccccccggcccccagccaccgtgaccaatgctgtgtcctggaggtctgagggcatcaagtacaggaagaatgaggtgttcctggatgtgattgagagcgtgaacctgctggtgtctgccaatggaaatgtgctgcggtctgagatcgtgggcagcatcaagatgagggtcttcctgagcggcatgcctgagctgcggctgggcctgaatgacaaggtgctgtttgacaacacaggccggggcaagagcaagtctgtggagctggaggatgtgaagttccaccagtgtgtgcggctgagcagatttgaaaatgacaggaccatctccttcatccccccagatggagaatttgagctgatgagctaccgcctgaacacccacgtgaagcccctcatctggattgaatctgtgattgagaagcacagccacagcagaattgagtacatgatcaaggccaagagccagttcaagagaagaagcacagccaacaacgtggagatccacatccctgtgcccaatgatgctgacagccccaagttcaagaccaccgtgggctctgtgaagtgggtgcctgaaaattctgaaattgtgtggagcatcaagagcttccctgggggcaaggagtacctgatgagggcccacttcggcctgcccagcgtggaggccgaggacaaggagggcaagccacccatctctgtgaagtttgagatcccctacttcaccaccagcggcatccaggtgcgctacctgaagatcatcgagaagagcggctaccaggccctgccctgggtgcgctacatcacccagaatggagactaccagctgcggacccagtag

SEQ ID NO: 142707 - DNA, 1272 bp, synthetic construct
  misc_feature 1..1272: note = Description of Artificial Sequence: Synthetic coding sequence
  source 1..1272: mol_type = other DNA
atgtctgccagcgctgtgttcatcctggatgtgaagggcaagcccctcatcagcaggaactacaagggagatgtggccatgagcaagattgagcacttcatgcccctgctggtgcagcgggaggaggagggcgccctggcccccctgctgagccacggccaggtgcacttcctgtggatcaagcacagcaacctgtacctggtggccaccaccagcaagaatgccaatgccagcctggtgtacagcttcctgtacaagaccatcgaggtgttctgtgagtacttcaaggagctggaggaggagagcatccgggacaactttgtgattgtgtatgagctgctggatgagctgatggactttggcttcccccagaccacagacagcaagatcctgcaggagtacatcacccagcagagcaacaagctggagaccgggaagagccgggtgccccccaccgtgaccaatgctgtgtcctggaggtctgagggcatcaagtacaagaagaatgaggtgttcattgatgtgattgagagcgtgaacctgctggtgaatgccaacggctctgtgctgctgtctgagatcgtgggcaccatcaagctgaaggtgttcctgagcggcatgcctgagctgcggctgggcctgaatgacagagtgctgtttgagctgaccggccgcagcaagaacaagtctgtggagctggaggatgtgaagttccaccagtgtgtgcggctgagcagatttgacaatgacaggaccatctccttcatccccccagatggagactttgagctgatgagctaccgcctgagcacccaggtgaagcccctcatctggattgaatctgtgattgagaagttcagccacagccgggtggagatcatggtgaaggccaagggccagttcaagaagcagagcgtggccaacggggtggagatctctgtgcctgtgcccagtgatgctgacagcccccgcttcaagacctctgtgggcagcgccaagtatgtgcctgagagaaatgtggtgatctggagcatcaagagcttccctgggggcaaggagtacctgatgagggcccacttcggcctgcccagcgtggagaaggaggaggtggagggccggccccccatcggcgtgaagtttgagatcccctacttcaccgtgtctggcatccaggtgcgctacatgaagatcatcgagaagagcggctaccaggccctgccctgggtgcgctacatcacccagagcggggactaccagctgcggaccagctag

SEQ ID NO: 142708 - DNA, 477 bp, synthetic construct
  misc_feature 1..477: note = Description of Artificial Sequence: Synthetic coding sequence
  source 1..477: mol_type = other DNA
atgatgaggttcatgctgctcttcagccggcagggcaagctgcggctgcagaagtggtacctggccaccagtgacaaggagaggaagaagatggtgcgggagctgatgcaggtggtgctggccaggaagcccaagatgtgcagcttcctggagtggagggacctgaaggtggtgtacaagagatatgccagcctgtacttctgctgtgccatcgagggccaggacaatgagctgatcaccctggagctgatccacagatatgtggagctgctggacaagtactttggatctgtgtgtgagctggacatcatcttcaactttgagaaggcctacttcatcctggatgagttcctgatgggaggagatgtgcaggacaccagcaagaagtctgtgctgaaggccatcgagcaggccgacctgctgcaggaggaggatgagagccccaggtctgtgctggaggagatgggcctggcctag

SEQ ID NO: 142709 - DNA, 477 bp, synthetic construct; identical to SEQ ID NO: 142708
  misc_feature 1..477: note = Description of Artificial Sequence: Synthetic coding sequence
  source 1..477: mol_type = other DNA

SEQ ID NO: 142710 - DNA, 474 bp, synthetic construct
  misc_feature 1..474: note = Description of Artificial Sequence: Synthetic coding sequence
  source 1..474: mol_type = other DNA
atgcagttcatgctgctcttcagccggcagggcaagctgcggctgcagaagtggtacgtgcccctgagtgacaaggagaagaagaagatcacccgggagctggtgcagacagtgctggccaggaagcccaagatgtgcagcttcctggagtggagggacctgaagatcgtgtacaagagatatgccagcctgtacttctgctgtgccatcgaggaccaggacaatgaactcatcaccctggagatcatccaccgctacgtggagctgctggacaagtacttcggctctgtgtgtgagctggacatcatcttcaactttgagaaggcctacttcatcctggatgagttcctgctgggcggggaggtgcaggagaccagcaagaagaatgtgctgaaggccatcgagcaggccgacctgctgcaggaggaggccgagacccccaggtctgtgctggaggagatcggcctgacctag

SEQ ID NO: 142711 - DNA, 462 bp, synthetic construct
  misc_feature 1..462: note = Description of Artificial Sequence: Synthetic coding sequence
  source 1..462: mol_type = other DNA
atgctgctcttcagccggcagggcaagctgcggctgcagaagtggtacgtgcccctgagtgacaaggagaagaagaagatcacccgggagctggtgcagacagtgctggccaggaagcccaagatgtgcagcttcctggagtggagggacctgaagatcgtgtacaagagatatgccagcctgtacttctgctgtgccatcgaggaccaggacaatgagctgatcaccctggagatcatccacagatatgtggagctgctggacaagtactttggatctgtgtgtgagctggacatcatcttcaactttgagaaggcctacttcatcctggatgagttcctgctgggcggggaggtgcaggagaccagcaagaagaatgtgctgaaggccatcgagcaggccgacctgctgcaggagagccagaatgaggagtggggcggcctgtctgaggacatcctgtag

SEQ ID NO: 142712 - DNA, 483 bp, synthetic construct
  misc_feature 1..483: note = Description of Artificial Sequence: Synthetic coding sequence
  source 1..483: mol_type = other DNA
atgcagttcatgctgctcttcagccggcagggcaagctgcggctgcagaagtggtacgtgcccctgagtgacaaggagaagaagaagatcacccgggagctggtgcagacagtgctggccaggaagcccaagatgtgcagcttcctggagtggagggacctgaagatcgtgtacaagagatatgccagcctgtacttctgctgtgccatcgaggaccaggacaatgaactcatcaccctggagatcatccaccgctacgtggagctgctggacaagtacttcggctctgtgtgtgagctggacatcatcttcaactttgagaaggcctacttcatcctggatgagttcctgctgggcggggaggtgcaggagaccagcaagaagaatgtgctgaaggccatcgagcaggccgacctgctgcaggagaagacagagaccatgtaccacagcaagagcttcatcggcttcaagaaggcctactag

SEQ ID NO: 142713 - DNA, 609 bp, synthetic construct
  misc_feature 1..609: note = Description of Artificial Sequence: Synthetic coding sequence
  source 1..609: mol_type = other DNA
atgcctgctggctgccccccccacagcaccacagccagcctgccccagcacggggaccggggcttcccctttgctgctgctgctgctgctggccaggccccaccccggcccaggcctgctgctgccatgcagttcatgctgctcttcagccggcagggcaagctgcggctgcagaagtggtacgtgcccctgagtgacaaggagaagaagaagatcacccgggagctggtgcagacagtgctggccaggaagcccaagatgtgcagcttcctggagtggagggacctgaagatcgtgtacaagagatatgccagcctgtacttctgctgtgccatcgaggaccaggacaatgaactcatcaccctggagatcatccaccgctacgtggagctgctggacaagtacttcggctctgtgtgtgagctggacatcatcttcaactttgagaaggcctacttcatcctggatgagttcctgctgggcggggaggtgcaggagaccagcaagaagaatgtgctgaaggccatcgagcaggccgacctgctgcaggagaagacagagaccatgtaccacagcaagagcttcatcggcttcaagaaggcctactag

SEQ ID NO: 142714 - DNA, 441 bp, synthetic construct
  misc_feature 1..441: note = Description of Artificial Sequence: Synthetic coding sequence
  source 1..441: mol_type = other DNA
tgaagacagggcaagctgcggctgcagaagtggtacgtgcccctgagtgacaaggagaagaagaagatcacccgggagctggtgcagacagtgctggccaggaagcccaagatgtgcagcttcctggagtggagggacctgaagatcgtgtacaagagatatgccagcctgtacttctgctgtgccatcgaggaccaggacaatgagctgatcaccctggagatcatccacagatatgtggagctgctggacaagtactttggatctgtgtgtgagctggacatcatcttcaactttgagaaggcctacttcatcctggatgagttcctgctgggcggggaggtgcaggagaccagcaagaagaatgtgctgaaggccatcgagcaggccgacctgctgcaggagcccaggcatgagtacttcaacgtgcctgtgtactag

SEQ ID NO: 142715 - DNA, 462 bp, synthetic construct
  misc_feature 1..462: note = Description of Artificial Sequence: Synthetic coding sequence
  source 1..462: mol_type = other DNA
tgactgctcttcagccggcagggcaagctgcggctgcagaagtggtacgtgcccctgagtgacaaggagaagaagaagatcacccgggagctggtgcagacagtgctggccaggaagcccaagatgtgcagcttcctggagtggagggacctgaagatcgtgtacaagagatatgccagcctgtacttctgctgtgccatcgaggaccaggacaatgagctgatcaccctggagatcatccacagatatgtggagctgctggacaagtactttggatctgtgtgtgagctggacatcatcttcaactttgagaaggcctacttcatcctggatgagttcctgctgggcggggaggtgcaggagaccagcaagaagaatgtgctgaaggccatcgagcaggccgacctgctgcaggagagccagaatgaggagtggggcggcctgtctgaggacatcctgtag

SEQ ID NO: 142716 - DNA, 588 bp, synthetic construct
  misc_feature 1..588: note = Description of Artificial Sequence: Synthetic coding sequence
  source 1..588: mol_type = other DNA
atgcctgctggctgccccccccacagcaccacagccagcctgccccagcacggggaccggggcttcccctttgctgctgctgctgctgctggccaggccccaccccggcccaggcctgctgctgccatgcagttcatgctgctcttcagccggcagggcaagctgcggctgcagaagtggtacgtgcccctgagtgacaaggagaagaagaagatcacccgggagctggtgcagacagtgctggccaggaagcccaagatgtgcagcttcctggagtggagggacctgaagatcgtgtacaagagatatgccagcctgtacttctgctgtgccatcgaggaccaggacaatgaactcatcaccctggagatcatccaccgctacgtggagctgctggacaagtacttcggctctgtgtgtgagctggacatcatcttcaactttgagaaggcctacttcatcctggatgagttcctgctgggcggggaggtgcaggagaccagcaagaagaatgtgctgaaggccatcgagcaggccgacctgctgcaggagcccaggcatgagtacttcaacgtgcctgtgtactag

SEQ ID NO: 142717 - DNA, 315 bp, synthetic construct
  misc_feature 1..315: note = Description of Artificial Sequence: Synthetic coding sequence
  source 1..315: mol_type = other DNA
atgatccgcttcatcctgatccagaacagagctgggaagacccggctggccaagtggtacatgcagtttgatgatgatgagaagcagaagctgattgaggaggtgcatgctgtggtgacagtgagagatgccaagcacaccaactttgtggaggtgctgaatgagtacttccacaacgtgtgtgagctggacctggtgttcaacttctacaaggtgtacacagtggtggatgagatgttcctggccggggagatccgggagaccagccagaccaaggtgctgaagcagctgctgatgctgcagagcctggagtag

SEQ ID NO: 142718 - DNA, 2868 bp, synthetic construct
  misc_feature 1..2868: note = Description of Artificial Sequence: Synthetic coding sequence
  source 1..2868: mol_type = other DNA
atgcctgctgtgtccaaaggagatggcatgaggggcctggccgtgttcatcagtgacatccggaactgcaagagcaaggaggccgagatcaagaggatcaacaaggagctggccaacatccgcagcaagttcaagggggacaaggccctggatggctacagcaagaagaagtatgtgtgcaagctgctcttcatcttcctgctgggccatgacatcgactttggccacatggaggccgtgaacctgctgagcagcaacaagtacacagagaagcagatcggctacctgttcatctctgtgctggtgaacagcaacagcgagctgatccgcctcatcaacaatgccatcaagaatgacctggccagcaggaaccccaccttcatgtgcctggccctgcactgcatcgccaacgtgggcagccgggagatgggagaggcctttgctgctgacatcccccgcatcctggtggccggggacagcatggattctgtgaagcagagcgctgccctgtgcctgctgcggctgtacaaggccagcccagacctggtgcccatgggagagtggacagcccgggtggtgcacctgctgaatgaccagcacatgggcgtggtgacagctgctgtgtccctcatcacctgcctgtgcaagaagaacccagatgacttcaagacctgtgtgtccctggccgtgtcccggctgagccgcatcgtgtcctctgccagcacagacctgcaggactacacctactactttgtgcctgccccctggctgtctgtgaagctgctgcggctgctgcagtgctacccacctccagaagatgctgctgtgaagggccgcctggtggagtgcctggagaccgtgctgaacaaggcccaggagccccccaagagcaagaaggtgcagcacagcaatgccaagaatgccatcctgtttgagaccatcagcctcatcatccactatgacagcgagcccaacctgctggtgcgggcctgcaaccagctgggccagttcctgcagcaccgggagaccaacctgcgctacctggccctggagagcatgtgcaccctggccagcagcgagttcagccatgaagctgtgaagacccacatcgacaccgtcatcaatgccctgaagacagaaagagatgtgtctgtgcggcagagagctgctgacctgctgtatgccatgtgtgacaggagcaatgccaagcagatcgtgtctgagatgctgcgctacctggagacagctgactatgccatccgggaggagatcgtgctgaaggtggccatcctggccgagaagtatgctgtggactacagctggtacgtggacaccatcctgaacctgatcagaattgctggggactatgtgtctgaggaggtgtggtacagagtgctgcagatcgtgaccaacagagatgatgtgcagggctatgctgccaagacagtgtttgaggccctgcaggccccagcctgccacgagaacatggtgaaggtgggcggctacatcctgggggagtttggaaacctgattgctggggaccccaggagcagcccccctgtgcagttcagcctgctgcacagcaagttccacctgtgcagcgtggccacccgggccctgctgctgagcacctacatcaagttcatcaacctcttccctgagaccaaggccaccatccagggcgtgctgcgggccggcagccagctgagaaatgctgatgtggagctgcagcagagagctgtggagtacctgaccctgagctctgtggccagcacagatgtgctggccaccgtgctggaggagatgccacccttccctgagcgggagagcagcatcctggccaagctgaagaggaagaagggccctggggccggcagcgccctggatgatggccggcgggaccccagcagcaatgacatcaatggaggcatggagcccacccccagcacagtgtccacccccagccccagcgctgacctgctgggcctgcgggccgcccctcctcctgctgcccccccagccagcgctggggccggcaacctgctggtggatgtgtttgatggccctgctgcccagcccagcctgggccccaccccagaggaggccttcctgagccctggcccagaagatattggcccccccatccctgaggctgatgagctgctgaacaagtttgtgtgcaagaacaacggggtgctgtttgagaaccagctgctgcagattggagtgaagtctgagttccggcagaacctgggccgcatgtacctgttctacggcaacaagacctctgtgcagttccagaacttcagccccaccgtggtgcaccctggggacctgcagacccagctggccgtgcagaccaagagggtggccgcccaggtggatggaggagcccaggtgcagcaggtgctgaacattgaatgtctgcgggacttcctgaccccacccctgctgtctgtgcgcttccgctatggaggagccccccaggccctgaccctgaagctgcctgtgaccatcaacaagttcttccagcccacagagatggccgcccaggacttcttccagcgctggaagcagctgagcctgccccagcaggaggcccagaagatcttcaaggccaaccaccccatggatgctgaggtgaccaaggccaagctgctgggctttggaagtgccctgctggacaacgtggaccccaaccctgagaactttgtgggcgccggcatcatccagaccaaggccctgcaggtgggctgcctgctgcggctggagcccaatgcccaggcccagatgtaccgcctgaccctgcggaccagcaaggagcctgtgagccgccacctgtgtgagctgctggcccagcagttctag

SEQ ID NO: 142719 - DNA, 2934 bp, synthetic construct
  misc_feature 1..2934: note = Description of Artificial Sequence: Synthetic coding sequence
  source 1..2934: mol_type = other DNA
atgcctgctgtgtccaaaggagatggcatgaggggcctggccgtgttcatcagtgacatccggaactgcaagagcaaggaggccgagatcaagaggatcaacaaggagctggccaacatccgcagcaagttcaagggggacaaggccctggatggctacagcaagaagaagtatgtgtgcaagctgctcttcatcttcctgctgggccatgacatcgactttggccacatggaggccgtgaacctgctgagcagcaacaagtacacagagaagcagatcggctacctgttcatctctgtgctggtgaacagcaacagcgagctgatccgcctcatcaacaatgccatcaagaatgacctggccagcaggaaccccaccttcatgtgcctggccctgcactgcatcgccaacgtgggcagccgggagatgggagaggcctttgctgctgacatcccccgcatcctggtggccggggacagcatggattctgtgaagcagagcgctgccctgtgcctgctgcggctgtacaaggccagcccagacctggtgcccatgggagagtggacagcccgggtggtgcacctgctgaatgaccagcacatgggcgtggtgacagctgctgtgtccctcatcacctgcctgtgcaagaagaacccagatgacttcaagacctgtgtgtccctggccgtgtcccggctgagccgcatcgtgtcctctgccagcacagacctgcaggactacacctactactttgtgcctgccccctggctgtctgtgaagctgctgcggctgctgcagtgctacccacctccagaagatgctgctgtgaagggccgcctggtggagtgcctggagaccgtgctgaacaaggcccaggagccccccaagagcaagaaggtgcagcacagcaatgccaagaatgccatcctgtttgagaccatcagcctcatcatccactatgacagcgagcccaacctgctggtgcgggcctgcaaccagctgggccagttcctgcagcaccgggagaccaacctgcgctacctggccctggagagcatgtgcaccctggccagcagcgagttcagccatgaagctgtgaagacccacatcgacaccgtcatcaatgccctgaagacagaaagagatgtgtctgtgcggcagagagctgctgacctgctgtatgccatgtgtgacaggagcaatgccaagcagatcgtgtctgagatgctgcgctacctggagacagctgactatgccatccgggaggagatcgtgctgaaggtggccatcctggccgagaagtatgctgtggactacagctggtacgtggacaccatcctgaacctgatcagaattgctggggactatgtgtctgaggaggtgtggtacagagtgctgcagatcgtgaccaacagagatgatgtgcagggctatgctgccaagacagtgtttgaggccctgcaggccccagcctgccacgagaacatggtgaaggtgggcggctacatcctgggggagtttggaaacctgattgctggggaccccaggagcagcccccctgtgcagttcagcctgctgcacagcaagttccacctgtgcagcgtggccacccgggccctgctgctgagcacctacatcaagttcatcaacctcttccctgagaccaaggccaccatccagggcgtgctgcgggccggcagccagctgagaaatgctgatgtggagctgcagcagagagctgtggagtacctgaccctgagctctgtggccagcacagatgtgctggccaccgtgctggaggagatgccacccttccctgagcgggagagcagcatcctggccaagctgaagaggaagaagggccctggggccggcagcgccctggatgatggccggcgggaccccagcagcaatgacatcaatggaggcatggagcccacccccagcacagtgtccacccccagccccagcgctgacctgctgggcctgcgggccgcccctcctcctgctgcccccccagccagcgctggggccggcaacctgctggtggatgtgtttgatggccctgctgcccagcccagcctgggccccaccccagaggaggccttcctgtctgagctggagcccccagcccctgagagccccatggccctgctggccgaccctgccccagctgctgaccccggcccagaagatattggcccccccatccctgaggctgatgagctgctgaacaagtttgtgtgcaagaacaacggggtgctgtttgagaaccagctgctgcagattggagtgaagtctgagttccggcagaacctgggccgcatgtacctgttctacggcaacaagacctctgtgcagttccagaacttcagccccaccgtggtgcaccctggggacctgcagacccagctggccgtgcagaccaagagggtggccgcccaggtggatggaggagcccaggtgcagcaggtgctgaacattgaatgtctgcgggacttcctgaccccacccctgctgtctgtgcgcttccgctatggaggagccccccaggccctgaccctgaagctgcctgtgaccatcaacaagttcttccagcccacagagatggccgcccaggacttcttccagcgctggaagcagctgagcctgccccagcaggaggcccagaagatcttcaaggccaaccaccccatggatgctgaggtgaccaaggccaagctgctgggctttggaagtgccctgctggacaacgtggaccccaaccctgagaactttgtgggcgccggcatcatccagaccaaggccctgcaggtgggctgcctgctgcggctggagcccaatgcccaggcccagatgtaccgcctgaccctgcggaccagcaaggagcctgtgagccgccacctgtgtgagctgctggcccagcagttctag

SEQ ID NO: 142720 - DNA, 1404 bp, synthetic construct
  misc_feature 1..1404: note = Description of Artificial Sequence: Synthetic coding sequence
  source 1..1404: mol_type = other DNA
atgggcctggccctgcactgcatcgcctctgtgggcagccgggagatggccgaggcctttgctggggagatccccaaggtgctggtggccggggacaccatggacagcgtgaagcagagcgctgccctgtgcctgctgcggctgtaccgcaccagcccagacctggtgcccatgggagactggaccagccgggtggtgcacctgctgaatgaccagcacctgggcgtggtgacagctgccaccagcctcatcaccaccctggcccagaagaaccctgaggagttcaagacctctgtgtccctggccgtgtcccggctgagcagaattgtgaccagcgccagcacagacctgcaggactacacctactactttgtgcctgccccctggctgtctgtgaagctgctgcggctgctgcagtgctacccacctccagaccctgctgtgcggggccgcctgacagagtgcctggagaccatcctgaacaaggcccaggagccccccaagagcaagaaggtgcagcacagcaatgccaagaatgctgtgctgtttgaggccatcagcctcatcatccaccacgacagcgagcccaacctgctggtgcgggcctgcaaccagctgggccagttcctgcagcaccgggagaccaacctgcgctacctggccctggagagcatgtgcaccctggccagcagcgagttcagccatgaagctgtgaagacccacatcgagaccgtcatcaatgccctgaagacagaaagagatgtgtctgtgctgccccccaccccacccaggagcctgtgggagcagcagtgccactgtgcctggaggggcctgagcctgggcgtgtggcccagctggtggctgcacacctggaggcggcccggccccctgggcggggcccagctgaccctggtgctgctgcagagccagctggactgcttcccccggcaggacttcaacctggagttcaggaacatctgcatctgcaatgacttctggcagaagcacgtgtcctggccagatgtgacagtgctgctgagccagctgctgtttgtgaagggcgtgtgctacgccccagctgtggccgaggccctggatgtgcagcctggagaggagaggcctgctggccctgctggccccccaggcctgcagggcaaggtgtgggccggcggggcccggctgcggggcgtgctggtgtccttcctgtctgagtgggccagccctggccacggggccggcctgagccccagcacaggccctgtgcagagcagcctggagggcctgtggaggagagatgcctctgtgtggagcggcagcgagggcgccatcggccgcatgccctgtgccacctgtggcctgtgcctgacctgccacctggacagcgccccccggctgcacgtgtag

SEQ ID NO: 142721 - DNA, 2823 bp, synthetic construct
  misc_feature 1..2823: note = Description of Artificial Sequence: Synthetic coding sequence
  source 1..2823: mol_type = other DNA
atgcctgctgtgtccaaaggagatggcatgaggggcctggccgtgttcatcagtgacatccggaactgcaagagcaaggaggccgagatcaagaggatcaacaaggagctggccaacatccgcagcaagttcaagggggacaaggccctggatggctacagcaagaagaagtatgtgtgcaagctgctcttcatcttcctgctgggccatgacatcgactttggccacatggaggccgtgaacctgctgagcagcaaccgctacacagagaagcagatcggctacctgttcatctctgtgctggtgaacagcaacagcgagctgatccgcctcatcaacaatgccatcaagaatgacctggccagcaggaaccccaccttcatgggcctggccctgcactgcatcgcctctgtgggcagccgggagatggccgaggcctttgctggggagatccccaaggtgctggtggccggggacaccatggattctgtgaagcagagcgctgccctgtgcctgctgcggctgtaccgcaccagcccagacctggtgcccatgggagactggaccagccgggtggtgcacctgctgaatgaccagcacctgggcgtggtgacagctgccaccagcctcatcaccaccctggcccagaagaaccctgaggagttcaagacctctgtgtccctggccgtgtcccggctgagccgcatcgtgaccagcgccagcacagacctgcaggactacacctactactttgtgcctgccccctggctgtctgtgaagctgctgcggctgctgcagtgctacccacctcctgaggaccctgctgtgcggggccgcctgacagagtgcctggagaccatcctgaacaaggcccaggagccccccaagagcaagaaggtgcagcacagcaatgccaagaatgctgtgctgtttgaggccatcagcctcatcatccaccacgacagcgagcccaacctgctggtgcgggcctgcaaccagctgggccagttcctgcagcaccgggagaccaacctgcgctacctggccctggagagcatgtgcaccctggccagcagcgagttcagccatgaagctgtgaagacccacatcgagaccgtcatcaatgccctgaagacagaaagagatgtgtctgtgcggcagagagctgtggacctgctgtatgccatgtgtgacaggagcaatgccccccagatcgtggccgagatgctgagctacctggagacagctgactacagcatccgggaggagatcgtgctgaaggtggccatcctggccgagaagtatgctgtggactacacctggtacgtggacaccatcctgaacctgatcagaattgctggggactatgtgtctgaggaggtgtggtacagagtcatccagatcgtcatcaacagagatgatgtgcagggctatgctgccaagacagtgtttgaggccctgcaggccccagcctgccacgagaacctggtgaaggtgggcggctacatcctgggggagtttggaaacctgattgctggggaccccaggagcagccccctcatccagttccacctgctgcacagcaagttccacctgtgcagcgtgcccacccgggccctgctgctgagcacctacatcaagtttgtgaacctcttccctgaggtgaagcccaccatccaggatgtgctgcggagtgacagccagctgagaaatgctgatgtggagctgcagcagagagctgtggagtacctgcggctgagcacagtggccagcacagacatcctggccaccgtgctggaggagatgccacccttccctgagcgggagagcagcatcctggccaagctgaagaagaagaagggccccagcacagtgacagacctggaggacaccaagagggacagatctgtggatgtgaatggaggccctgagcccgccccagccagcaccagcgctgtgtccacccccagccccagcgctgacctgctgggcctgggcgccgcccccccagccccagctggccccccacccagcagcggcggcagcggcctgctggtggatgtgttcagtgacagcgcctctgtggtggcccccctggcccctggcagcgaggacaactttgccaggtttgtgtgcaagaacaatggagtgctgtttgagaaccagctgctgcagatcggcctgaagtctgagttccggcagaacctgggccgcatgttcatcttctacggcaacaagaccagcacccagttcctgaacttcacccccaccctcatctgcagtgatgacctgcagcccaacctgaacctgcagaccaagcctgtggaccccaccgtggagggcggggcccaggtgcagcaggtggtgaacattgaatgtgtgtctgacttcacagaggcccctgtgctgaacatccagttccgctatggaggcaccttccagaatgtgtctgtgcagctgcccatcaccctgaacaagttcttccagcccacagagatggccagccaggacttcttccagcgctggaagcagctgagcaacccccagcaggaggtgcagaacatcttcaaggccaagcaccccatggacacagaggtgaccaaggccaagatcatcggcttcggcagcgccctgctggaggaggtggaccccaacccagccaactttgtgggcgccggcatcatccacaccaagaccacccagatcggctgcctgctgcggctggagcccaacctgcaggcccagatgtaccgcctgaccctgcggaccagcaaggaggccgtgtcccagaggctgtgtgagctgctgagcgcccagttctag

SEQ ID NO: 142722 - DNA, 1062 bp, synthetic construct
  misc_feature 1..1062: note = Description of Artificial Sequence: Synthetic coding sequence
  source 1..1062: mol_type = other DNA
atgcctgctgtgtccaaaggagatggcatgaggggcctggccgtgttcatcagtgacatccggaactgcaagagcaaggaggccgagatcaagaggatcaacaaggagctggccaacatccgcagcaagttcaagggggacaaggccctggatggctacagcaagaagaagtatgtgtgcaagctgctcttcatcttcctgctgggccatgacatcgactttggccacatggaggccgtgaacctgctgagcagcaaccgctacacagagaagcagatcggctacctgttcatctctgtgctggtgaacagcaacagcgagctgatccgcctcatcaacaatgccatcaagaatgacctggccagcaggaaccccaccttcatgggcctggccctgcactgcatcgcctctgtgggcagccgggagatggccgaggcctttgctggggagatccccaaggtgctggtggccggggacaccatggattctgtgaagcagagcgctgccctgtgcctgctgcggctgtaccgcaccagcccagacctggtgcccatgggagactggaccagccgggtggtgcacctgctgaatgaccagcacctgggcgtggtgacagctgccaccagcctcatcaccaccctggcccagaagaaccctgaggagttcaagacctctgtgtccctggccgtgtcccggctgagccgcatcgtgaccagcgccagcacagacctgcaggactacacctactactttgtgcctgccccctggctgtctgtgaagctgctgcggctgctgcagtgctacccacctccagaccctgctgtgcggggccgcctgacagaatgtctggagaccatcctgaacaaggcccaggagccccccaagagcaagaaggtgcagcacagcaatgccaagaatgctgtgctgtttgaggccatcagcctcatcatccaccacgaccgggagcccaacctgcaggcccagatgtaccgcctgaccctgcggaccagcaaggaggccgtgtcccagaggctgtgtgagctgctgagcgcccagttctag

SEQ ID NO: 142723 - DNA, 1971 bp, synthetic construct
  misc_feature 1..1971: note = Description of Artificial Sequence: Synthetic coding sequence
  source 1..1971: mol_type = other DNA
atgcctgctgtgtccaaaggagatggcatgaggggcctggccgtgttcatcagtgacatccggaactgcaagagcaaggaggccgagatcaagaggatcaacaaggagctggccaacatccgcagcaagttcaagggggacaaggccctggatggctacagcaagaagaagtatgtgtgcaagctgctcttcatcttcctgctgggccatgacatcgactttggccacatggaggccgtgaacctgctgagcagcaaccgctacacagagaagcagatcggctacctgttcatctctgtgctggtgaacagcaacagcgagctgatccgcctcatcaacaatgccatcaagaatgacctggccagcaggaaccccaccttcatgggcctggccctgcactgcatcgcctctgtgggcagccgggagatggccgaggcctttgctggggagatccccaaggtgctggtggccggggacaccatggattctgtgaagcagagcgctgccctgtgcctgctgcggctgtaccgcaccagcccagacctggtgcccatgggagactggaccagccgggtggtgcacctgctgaatgaccagcacctgggcgtggtgacagctgccaccagcctcatcaccaccctggcccagaagaaccctgaggagttcaagacctctgtgtccctggccgtgtcccggctgagccgcatcgtgaccagcgccagcacagacctgcaggactacacctactactttgtgcctgccccctggctgtctgtgaagctgctgcggctgctgcagtgctacccacctcctgaggaccctgctgtgcggggccgcctgacagagtgcctggagaccatcctgaacaaggcccaggagccccccaagagcaagaaggtgcagcacagcaatgccaagaatgctgtgctgtttgaggccatcagcctcatcatccaccacgacagcgagcccaacctgctggtgcgggcctgcaaccagctgggccagttcctgcagcaccgggagaccaacctgcgctacctggccctggagagcatgtgcaccctggccagcagcgagttcagccatgaagctgtgaagacccacatcgagaccgtcatcaatgccctgaagacagaaagagatgtgtctgtgcggcagagagctgtggacctgctgtatgccatgtgtgacaggagcaatgccccccagatcgtggccgagatgctgagctacctggagacagctgactacagcatccgggaggagatcgtgctgaaggtggccatcctggccgagaagtatgctgtggactacacctggtacgtggacaccatcctgaacctgatcagaattgctggggactatgtgtctgaggaggtgtggtacagagtcatccagatcgtcatcaacagagatgatgtgcagggctatgctgccaagacagtgtttgaggccctgcaggccccagcctgccacgagaacctggtgaaggtgggcggctacatcctgggggagtttggaaacctgattgctggggaccccaggagcagccccctcatccagttccacctgctgcacagcaagttccacctgtgcagcgtgcccacccgggccctgctgctgagcacctacatcaagtttgtgaacctcttccctgaggtgaagcccaccatccaggatgtgctgcggagtgacagccagctgagaaatgctgatgtggagctgcagcagagagctgtggagtacctgcggctgagcacagtggccagcacagacatcctggccaccgtgctggaggagatgccacccttccctgagcgggagagcagcatcctggccaagctgaagaagaagaagggccccagcacagtgacagacctggaggacaccaagagggacagatctgtggatgtgaatggaggccctgagcccgccccagccagcaccagcgctgtgctgtgcctgtag

SEQ ID NO: 142724 - DNA, 2820 bp, synthetic construct
  misc_feature 1..2820: note = Description of Artificial Sequence: Synthetic coding sequence
  source 1..2820: mol_type = other DNA
atgcctgctgtgtccaaaggagatggcatgaggggcctggccgtgttcatcagtgacatccggaactgcaagagcaaggaggccgagatcaagaggatcaacaaggagctggccaacatccgcagcaagttcaagggggacaaggccctggatggctacagcaagaagaagtatgtgtgcaagctgctcttcatcttcctgctgggccatgacatcgactttggccacatggaggccgtgaacctgctgagcagcaaccgctacacagagaagcagatcggctacctgttcatctctgtgctggtgaacagcaacagcgagctgatccgcctcatcaacaatgccatcaagaatgacctggccagcaggaaccccaccttcatgggcctggccctgcactgcatcgcctctgtgggcagccgggagatggccgaggcctttgctggggagatccccaaggtgctggtggccggggacaccatggattctgtgaagcagagcgctgccctgtgcctgctgcggctgtaccgcaccagcccagacctggtgcccatgggagactggaccagccgggtggtgcacctgctgaatgaccagcacctgggcgtggtgacagctgccaccagcctcatcaccaccctggcccagaagaaccctgaggagttcaagacctctgtgtccctggccgtgtcccggctgagccgcatcgtgaccagcgccagcacagacctgcaggactacacctactactttgtgcctgccccctggctgtctgtgaagctgctgcggctgctgcagtgctacccacctccagaccctgctgtgcggggccgcctgacagaatgtctggagaccatcctgaacaaggcccaggagccccccaagagcaagaaggtgcagcacagcaatgccaagaatgctgtgctgtttgaggccatcagcctcatcatccaccatgattctgagcccaacctgctggtgcgggcctgcaaccagctgggccagttcctgcagcaccgggagaccaacctgcgctacctggccctggagagcatgtgcaccctggccagcagcgagttcagccatgaggccgtgaagacccacattgaaacagtcatcaatgccctgaagacagaaagagatgtgtctgtgcggcagagagctgtggacctgctgtatgccatgtgtgacaggagcaatgccccccagatcgtggccgagatgctgagctacctggagacagctgactacagcatccgggaggagatcgtgctgaaggtggccatcctggccgagaagtatgctgtggactacacctggtacgtggacaccatcctgaacctgatcagaattgctggggactatgtgtctgaggaggtgtggtacagagtcatccagatcgtcatcaacagagatgatgtgcagggctacgccgccaagacagtgtttgaggccctgcaggccccagcctgccacgagaacctggtgaaggtgggcggctacatcctgggggagtttggaaacctgattgctggggaccccaggagcagccccctcatccagttccacctgctgcacagcaagttccacctgtgcagcgtgcccacccgggccctgctgctgagcacctacatcaagtttgtgaacctcttccctgaggtgaagcccaccatccaggatgtgctgcggagtgacagccagctgagaaatgctgatgtggagctgcagcagagagctgtggagtacctgcggctgagcacagtggccagcacagacatcctggccaccgtgctggaggagatgccacccttccctgagcgggagagcagcatcctggccaagctgaagaagaagaagggccccagcacagtgacagacctggaggacaccaagagggacagatctgtggatgtgaatggaggccctgagcccgccccagccagcaccagcgctgtgtccacccccagccccagcgctgacctgctgggcctgggcgccgcccccccagccccagctggccccccacccagcagcggcggcagcggcctgctggtggatgtgttcagtgacagcgcctctgtggtggcccccctggcccctggcagcgaggacaactttgccaggtttgtgtgcaagaacaacggggtgctgtttgagaaccagctgctgcagatcggcctgaagtctgagttccggcagaacctgggccgcatgttcatcttctacggcaacaagaccagcacccagttcctgaacttcacccccaccctcatctgcagtgatgacctgcagcccaacctgaacctgcagaccaagcctgtggaccccaccgtggagggcggggcccaggtgcagcaggtggtgaacattgaatgtgtgtctgacttcacagaggcccctgtgctgaacatccagttccgctatggaggcaccttccagaatgtgtctgtgcagctgcccatcaccctgaacaagttcttccagcccacagagatggccagccaggacttcttccagcgctggaagcagctgagcaacccccagcaggaggtgcagaacatcttcaaggccaagcaccccatggacacagaggtgaccaaggccaagatcattggatttggaagtgccctgctggaggaggtggaccccaacccagccaactttgtgggcgccggcatcatccacaccaagaccacccagatcggctgcctgctgcggctggagcccaacctgcaggcccagatgtaccgcctgaccctgcggaccagcaaggaggccgtgtcccagaggctgtgtgagctgctgagcgcccagttctag

SEQ ID NO: 142725 - DNA, 2040 bp, synthetic construct
  misc_feature 1..2040: note = Description of Artificial Sequence: Synthetic coding sequence
  source 1..2040: mol_type = other DNA
atgcctgctgtgtccaaaggagatggcatgaggggcctggccgtgttcatcagtgacatccggaactgcaagagcaaggaggccgagatcaagaggatcaacaaggagctggccaacatccgcagcaagttcaagggggacaaggccctggatggctacagcaagaagaagtatgtgtgcaagctgctcttcatcttcctgctgggccatgacatcgactttggccacatggaggccgtgaacctgctgagcagcaaccgctacacagagaagcagatcggctacctgttcatctctgtgctggtgaacagcaacagcgagctgatccgcctcatcaacaatgccatcaagacagaaagagatgtgtctgtgcggcagagagctgtggacctgctgtatgccatgtgtgacaggagcaatgccccccagatcgtggccgagatgctgagctacctggagacagctgactacagcatccgggaggagatcgtgctgaaggtggccatcctggccgagaagtatgctgtggactacacctggtacgtggacaccatcctgaacctgatcagaattgctggggactatgtgtctgaggaggtgtggtacagagtcatccagatcgtcatcaacagagatgatgtgcagggctacgccgccaagacagtgtttgaggccctgcaggccccagcctgccacgagaacctggtgaaggtgggcggctacatcctgggggagtttggaaacctgattgctggggaccccaggagcagccccctcatccagttccacctgctgcacagcaagttccacctgtgcagcgtgcccacccgggccctgctgctgagcacctacatcaagtttgtgaacctcttccctgaggtgaagcccaccatccaggatgtgctgcggagtgacagccagctgagaaatgctgatgtggagctgcagcagagagctgtggagtacctgcggctgagcacagtggccagcacagacatcctggccaccgtgctggaggagatgccacccttccctgagcgggagagcagcatcctggccaagctgaagaagaagaagggccccagcacagtgacagacctggaggacaccaagagggacagatctgtggatgtgaatggaggccctgagcccgccccagccagcaccagcgctgtgtccacccccagccccagcgctgacctgctgggcctgggcgccgcccccccagccccagctggccccccacccagcagcggcggcagcggcctgctggtggatgtgttcagtgacagcgcctctgtggtggcccccctggcccctggcagcgaggacaactttgccaggtttgtgtgcaagaacaacggggtgctgtttgagaaccagctgctgcagatcggcctgaagtctgagttccggcagaacctgggccgcatgttcatcttctacggcaacaagaccagcacccagttcctgaacttcacccccaccctcatctgcagtgatgacctgcagcccaacctgaacctgcagaccaagcctgtggaccccaccgtggagggcggggcccaggtgcagcaggtggtgaacattgaatgtgtgtctgacttcacagaggcccctgtgctgaacatccagttccgctatggaggcaccttccagaatgtgtctgtgcagctgcccatcaccctgaacaagttcttccagcccacagagatggccagccaggacttcttccagcgctggaagcagctgagcaacccccagcaggaggtgcagaacatcttcaaggccaagcaccccatggacacagaggtgaccaaggccaagatcattggatttggaagtgccctgctggaggaggtggaccccaacccagccaactttgtgggcgccggcatcatccacaccaagaccacccagatcggctgcctgctgcggctggagcccaacctgcaggcccagatgtaccgcctgaccctgcggaccagcaaggaggccgtgtcccagaggctgtgtgagctgctgagcgcccagttctag

SEQ ID NO: 142726 - DNA, 2031 bp, synthetic construct
  misc_feature 1..2031: note = Description of Artificial Sequence: Synthetic coding sequence
  source 1..2031: mol_type = other DNA
atgcctgctgtgtccaaaggagatggcatgaggggcctggccgtgttcatcagtgacatccggaactgcaagagcaaggaggccgagatcaagaggatcaacaaggagctggccaacatccgcagcaagttcaagggggacaaggccctggatggctacagcaagaagaagtatgtgtgcaagctgctcttcatcttcctgctgggccatgacatcgactttggccacatggaggccgtgaacctgctgagcagcaaccgctacacagagaagcagatcggctacctgttcatctctgtgctggtgaacagcaacagcgagctgatccgcctcatcaacaacacagaaagagatgtgtctgtgcggcagagagctgtggacctgctgtatgccatgtgtgacaggagcaatgccccccagatcgtggccgagatgctgagctacctggagacagctgactacagcatccgggaggagatcgtgctgaaggtggccatcctggccgagaagtatgctgtggactacacctggtacgtggacaccatcctgaacctgatcagaattgctggggactatgtgtctgaggaggtgtggtacagagtcatccagatcgtcatcaacagagatgatgtgcagggctatgctgccaagacagtgtttgaggccctgcaggccccagcctgccacgagaacctggtgaaggtgggcggctacatcctgggggagtttggaaacctgattgctggggaccccaggagcagccccctcatccagttccacctgctgcacagcaagttccacctgtgcagcgtgcccacccgggccctgctgctgagcacctacatcaagtttgtgaacctcttccctgaggtgaagcccaccatccaggatgtgctgcggagtgacagccagctgagaaatgctgatgtggagctgcagcagagagctgtggagtacctgcggctgagcacagtggccagcacagacatcctggccaccgtgctggaggagatgccacccttccctgagcgggagagcagcatcctggccaagctgaagaagaagaagggccccagcacagtgacagacctggaggacaccaagagggacagatctgtggatgtgaatggaggccctgagcccgccccagccagcaccagcgctgtgtccacccccagccccagcgctgacctgctgggcctgggcgccgcccccccagccccagctggccccccacccagcagcggcggcagcggcctgctggtggatgtgttcagtgacagcgcctctgtggtggcccccctggcccctggcagcgaggacaactttgccaggtttgtgtgcaagaacaatggagtgctgtttgagaaccagctgctgcagatcggcctgaagtctgagttccggcagaacctgggccgcatgttcatcttctacggcaacaagaccagcacccagttcctgaacttcacccccaccctcatctgcagtgatgacctgcagcccaacctgaacctgcagaccaagcctgtggaccccaccgtggagggcggggcccaggtgcagcaggtggtgaacattgaatgtgtgtctgacttcacagaggcccctgtgctgaacatccagttccgctatggaggcaccttccagaatgtgtctgtgcagctgcccatcaccctgaacaagttcttccagcccacagagatggccagccaggacttcttccagcgctggaagcagctgagcaacccccagcaggaggtgcagaacatcttcaaggccaagcaccccatggacacagaggtgaccaaggccaagatcatcggcttcggcagcgccctgctggaggaggtggaccccaacccagccaactttgtgggcgccggcatcatccacaccaagaccacccagatcggctgcctgctgcggctggagcccaacctgcaggcccagatgtaccgcctgaccctgcggaccagcaaggaggccgtgtcccagaggctgtgtgagctgctgagcgcccagttctag

SEQ ID NO: 142727 - DNA, 2814 bp, synthetic construct
  misc_feature 1..2814: note = Description of Artificial Sequence: Synthetic coding sequence
  source 1..2814: mol_type = other DNA
atgacagacagcaagtacttcaccaccaacaagaagggggagatctttgagctgaaggccgagctgaacaatgagaagaaggagaagaggaaggaggccgtgaagaaggtgattgctgccatgacagtgggcaaggatgtgagcagcctcttcccagatgtggtgaactgcatgcagacagacaacctggagctgaagaagctggtgtacctgtacctgatgaactatgccaagagccagcctgacatggccatcatggctgtgaacagctttgtgaaggactgtgaggaccccaaccccctcatccgggccctggccgtgaggaccatgggctgcatccgggtggacaagatcacagagtacctgtgtgagcccctgaggaagtgcctgaaggatgaggacccctacgtgaggaagacagctgctgtgtgtgtggccaagctgcatgacatcaatgcccagatggtggaggaccagggcttcctggacagcctgcgggacctgattgctgacagcaaccccatggtggtggccaatgctgtggccgccctgtctgagatcagcgagagccaccccaacagcaacctgctggacctgaacccccagaacatcaacaagctgctgacagccctgaatgaatgtacagagtggggccagatcttcatcctggactgcctgagcaactacaaccccaaggatgaccgggaggcccagagcatctgtgagcgggtgaccccccggctgagccacgccaacagcgctgtggtgctgtctgctgtgaaggtgctgatgaagttcctggagctgctgcccaaggacagcgactactacaacatgctgctgaagaagctggccccacccctggtgaccctgctgtctggagagcctgaggtgcagtatgtggccctgaggaacatcaacctgattgtgcagaagaggcctgagatcctgaagcaggagatcaaggtgttctttgtgaagtacaatgaccccatctacgtgaagctggagaagctggacatcatgatccggctggccagccaggccaacatcgcccaggtgctggccgagctgaaggagtatgccacagaggtggatgtggactttgtgaggaaggctgtgcgggccatcggccgctgtgccatcaaggtggagcagagcgctgagcgctgtgtgtccaccctgctggacctgatccagaccaaggtgaactacgtggtgcaggaggccatcgtggtgatccgggacatcttcaggaagtaccccaacaagtatgagagcatcatcgccaccctgtgtgagaacctggacagcctggatgagccagatgcccgggccgccatgatctggatcgtgggggagtatgcagagagaattgacaatgctgatgagctgctggagagcttcctggagggcttccatgatgagagcacccaggtgcagctgaccctgctgacagccatcgtgaagctgttcctgaagaagcccagcgagacccaggagctggtgcagcaggtgctgagcctggccacccaggacagcgacaacccagacctgcgggaccggggctacatctactggaggctgctgagcacagatcctgtgacagccaaggaggtggtgctgtctgagaagcccctcatcagcgaggagacagacctgattgagcccaccctgctggatgagctgatctgccacatcggcagcctggcctctgtgtaccacaagcccccaaatgcctttgtggagggcagccacggcatccacaggaagcacctgcccatccaccacggcagcacagatgctggggacagccctgtgggcaccaccacagccaccaacctggagcagccccaggtgatccccagccagggcgacctgctgggggacctgctgaacctggacctgggcccccctgtgaatgtgccccaggtgtcctccatgcagatgggcgctgtggacctgctgggcggcggcctggacagcctggtgggccagagcttcatccccagctctgtgcctgccacctttgcccccagccccaccccagctgtggtgagcagcggcctgaatgacctgtttgagctgagcacaggcatcggcatggcccctgggggctacgtggcccccaaggctgtgtggctgcctgctgtgaaggccaagggcctggagatcagcggcaccttcacccaccggcagggccacatctacatggagatgaacttcaccaacaaggccctgcagcacatgacagactttgccatccagttcaacaagaacagctttggagtcatccccagcacccccctggccatccacacccccctgatgcccaaccagagcattgatgtgtccctgcccctgaacaccctgggccctgtgatgaagatggagcccctgaacaacctgcaggtggccgtgaagaacaacattgatgtgttctacttcagctgcctgatccccctgaatgtgctgtttgtggaggatggcaagatggagcggcaggtgttcctggccacctggaaggacatccccaatgaaaatgagctgcagttccagatcaaggagtgccacctgaatgctgacacagtgagcagcaagctgcagaacaacaacgtgtacaccatcgccaagagaaatgtggagggccaggacatgctgtaccagagcctgaagctgaccaacggcatctggatcctggccgagctgcgcatccagcccggcaaccccaactacaccctgagcctgaagtgccgggcccctgaggtgtcccagtacatctaccaggtgtatgacagcatcctgaagaactag

SEQ ID NO: 142728 - DNA, 2856 bp, synthetic construct
  misc_feature 1..2856: note = Description of Artificial Sequence: Synthetic coding sequence
  source 1..2856: mol_type = other DNA
atgacagacagcaagtacttcaccaccaacaagaagggggagatctttgagctgaaggccgagctgaacaatgagaagaaggagaagaggaaggaggccgtgaagaaggtgattgctgccatgacagtgggcaaggatgtgagcagcctcttcccagatgtggtgaactgcatgcagacagacaacctggagctgaagaagctggtgtacctgtacctgatgaactatgccaagagccagcctgacatggccatcatggctgtgaacagctttgtgaaggactgtgaggaccccaaccccctcatccgggccctggccgtgaggaccatgggctgcatccgggtggacaagatcacagagtacctgtgtgagcccctgaggaagtgcctgaaggatgaggacccctacgtgaggaagacagctgctgtgtgtgtggccaagctgcatgacatcaatgcccagatggtggaggaccagggcttcctggacagcctgcgggacctgattgctgacagcaaccccatggtggtggccaatgctgtggccgccctgtctgagatcagcgagagccaccccaacagcaacctgctggacctgaacccccagaacatcaacaagctgctgacagccctgaatgaatgtacagagtggggccagatcttcatcctggactgcctgagcaactacaaccccaaggatgaccgggaggcccagagcatctgtgagcgggtgaccccccggctgagccacgccaacagcgctgtggtgctgtctgctgtgaaggtgctgatgaagttcctggagctgctgcccaaggacagcgactactacaacatgctgctgaagaagctggccccacccctggtgaccctgctgtctggagagcctgaggtgcagtatgtggccctgaggaacatcaacctgattgtgcagaagaggcctgagatcctgaagcaggagatcaaggtgttctttgtgaagtacaatgaccccatctacgtgaagctggagaagctggacatcatgatccggctggccagccaggccaacatcgcccaggtgctggccgagctgaaggagtatgccacagaggtggatgtggactttgtgaggaaggctgtgcgggccatcggccgctgtgccatcaaggtggagcagagcgctgagcgctgtgtgtccaccctgctggacctgatccagaccaaggtgaactacgtggtgcaggaggccatcgtggtgatccgggacatcttcaggaagtaccccaacaagtatgagagcatcatcgccaccctgtgtgagaacctggacagcctggatgagccagatgcccgggccgccatgatctggatcgtgggggagtatgcagagagaattgacaatgctgatgagctgctggagagcttcctggagggcttccatgatgagagcacccaggtgcagctgaccctgctgacagccatcgtgaagctgttcctgaagaagcccagcgagacccaggagctggtgcagcaggtgctgagcctggccacccaggacagcgacaacccagacctgcgggaccggggctacatctactggaggctgctgagcacagatcctgtgacagccaaggaggtggtgctgtctgagaagcccctcatcagcgaggagacagacctgattgagcccaccctgctggatgagctgatctgccacatcggcagcctggcctctgtgtaccacaagcccccaaatgcctttgtggagggcagccacggcatccacaggaagcacctgcccatccaccacggcagcacagatgctggggacagccctgtgggcaccaccacagccaccaacctggagcagccccaggtgatccccagccagggcgacctgctgggggacctgctgaacctggacctgggcccccctgtgaatgtgccccaggtgtcctccatgcagatgggcgctgtggacctgctgggcggcggcctggacagcctgctgggcagtgacctgggcggcggcatcggcggcagccctgctgtgggccagagcttcatccccagctctgtgcctgccacctttgcccccagccccaccccagctgtggtgagcagcggcctgaatgacctgtttgagctgagcacaggcatcggcatggcccctgggggctacgtggcccccaaggctgtgtggctgcctgctgtgaaggccaagggcctggagatcagcggcaccttcacccaccggcagggccacatctacatggagatgaacttcaccaacaaggccctgcagcacatgacagactttgccatccagttcaacaagaacagctttggagtcatccccagcacccccctggccatccacacccccctgatgcccaaccagagcattgatgtgtccctgcccctgaacaccctgggccctgtgatgaagatggagcccctgaacaacctgcaggtggccgtgaagaacaacattgatgtgttctacttcagctgcctgatccccctgaatgtgctgtttgtggaggatggcaagatggagcggcaggtgttcctggccacctggaaggacatccccaatgaaaatgagctgcagttccagatcaaggagtgccacctgaatgctgacacagtgagcagcaagctgcagaacaacaacgtgtacaccatcgccaagagaaatgtggagggccaggacatgctgtaccagagcctgaagctgaccaacggcatctggatcctggccgagctgcgcatccagcccggcaaccccaactacaccctgagcctgaagtgccgggcccctgaggtgtcccagtacatctaccaggtgtatgacagcatcctgaagaactag

SEQ ID NO: 142729 - DNA, 2856 bp, synthetic construct; identical to SEQ ID NO: 142728
  misc_feature 1..2856: note = Description of Artificial Sequence: Synthetic coding sequence
  source 1..2856: mol_type = other DNA

SEQ ID NO: 142730 - DNA, 2643 bp, synthetic construct
  misc_feature 1..2643: note = Description of Artificial Sequence: Synthetic coding sequence
  source 1..2643: mol_type = other DNA
atgcagacagacaacctggagctgaagaagctggtgtacctgtacctgatgaactatgccaagagccagcctgacatggccatcatggctgtgaacagctttgtgaaggactgtgaggaccccaaccccctcatccgggccctggccgtgaggaccatgggctgcatccgggtggacaagatcacagagtacctgtgtgagcccctgaggaagtgcctgaaggatgaggacccctacgtgaggaagacagctgctgtgtgtgtggccaagctgcatgacatcaatgcccagatggtggaggaccagggcttcctggacagcctgcgggacctgattgctgacagcaaccccatggtggtggccaatgctgtggccgccctgtctgagatcagcgagagccaccccaacagcaacctgctggacctgaacccccagaacatcaacaagctgctgacagccctgaatgaatgtacagagtggggccagatcttcatcctggactgcctgagcaactacaaccccaaggatgaccgggaggcccagagcatctgtgagcgggtgaccccccggctgagccacgccaacagcgctgtggtgctgtctgctgtgaaggtgctgatgaagttcctggagctgctgcccaaggacagcgactactacaacatgctgctgaagaagctggccccacccctggtgaccctgctgagcggggagcctgaggtgcagtatgtggccctgaggaacatcaacctgattgtgcagaagaggcctgagatcctgaagcaggagatcaaggtgttctttgtgaagtacaatgaccccatctacgtgaagctggagaagctggacatcatgatccggctggccagccaggccaacatcgcccaggtgctggccgagctgaaggagtatgccacagaggtggatgtggactttgtgaggaaggctgtgcgggccatcggccgctgtgccatcaaggtggagcagagcgctgagcgctgtgtgtccaccctgctggacctgatccagaccaaggtgaactacgtggtgcaggaggccatcgtggtgatccgggacatcttcaggaagtaccccaacaagtatgagagcatcatcgccaccctgtgtgagaacctggacagcctggatgagccagatgcccgggccgccatgatctggatcgtgggggagtatgcagagagaattgacaatgctgatgagctgctggagagcttcctggagggcttccatgatgagagcacccaggtgcagctgaccctgctgacagccatcgtgaagctgttcctgaagaagcccagcgagacccaggagctggtgcagcaggtgctgagcctggccacccaggacagcgacaacccagacctgcgggaccggggctacatctactggaggctgctgagcacagatcctgtgacagccaaggaggtggtgctgtctgagaagcccctcatcagcgaggagacagacctgattgagcccaccctgctggatgagctgatctgccacatcggcagcctggcctctgtgtaccacaagcccccaaatgcctttgtggagggcagccacggcatccacaggaagcacctgcccatccaccacggcagcacagatgctggggacagccctgtgggcaccaccacagccaccaacctggagcagccccaggtgatccccagccagggcgacctgctgggggacctgctgaacctggacctgggcccccctgtgaatgtgccccaggtgtcctccatgcagatgggcgctgtggacctgctgggcggcggcctggacagcctggtgggccagagcttcatccccagctctgtgcctgccacctttgcccccagccccaccccagctgtggtgagcagcggcctgaatgacctgtttgagctgagcactggaattggcatggcccctgggggctacgtggcccccaaggctgtgtggctgcctgctgtgaaggccaagggcctggagatcagcggcaccttcacccaccggcagggccacatctacatggagatgaacttcaccaacaaggccctgcagcacatgacagactttgccatccagttcaacaagaacagctttggagtcatccccagcacccccctggccatccacacccccctgatgcccaaccagagcattgatgtgtccctgcccctgaacaccctgggccctgtgatgaagatggagcccctgaacaacctgcaggtggccgtgaagaacaacattgatgtgttctacttcagctgcctgatccccctgaatgtgctgtttgtggaggatggcaagatggagcggcaggtgttcctggccacctggaaggacatccccaatgaaaatgagctgcagttccagatcaaggagtgccacctgaatgctgacacagtgagcagcaagctgcagaacaacaacgtgtacaccatcgccaagagaaatgtggagggccaggacatgctgtaccagagcctgaagctgaccaacggcatctggatcctggccgagctgcgcatccagcccggcaaccccaactacaccctgagcctgaagtgccgggcccctgaggtgtcccagtacatctaccaggtgtatgacagcatcctgaagaactag

SEQ ID NO: 142731 - DNA, 2067 bp, synthetic construct
  misc_feature 1..2067: note = Description of Artificial Sequence: Synthetic coding sequence
  source 1..2067: mol_type = other DNA
atgaagttcctggagctgctgcccaaggacagcgactactacaacatgctgctgaagaagctggccccacccctggtgaccctgctgagcggggagcctgaggtgcagtatgtggccctgaggaacatcaacctgattgtgcagaagaggcctgagatcctgaagcaggagatcaaggtgttctttgtgaagtacaatgaccccatctacgtgaagctggagaagctggacatcatgatccggctggccagccaggccaacatcgcccaggtgctggccgagctgaaggagtatgccacagaggtggatgtggactttgtgaggaaggctgtgcgggccatcggccgctgtgccatcaaggtggagcagagcgctgagcgctgtgtgtccaccctgctggacctgatccagaccaaggtgaactacgtggtgcaggaggccatcgtggtgatccgggacatcttcaggaagtaccccaacaagtatgagagcatcatcgccaccctgtgtgagaacctggacagcctggatgagccagatgcccgggccgccatgatctggatcgtgggggagtatgcagagagaattgacaatgctgatgagctgctggagagcttcctggagggcttccatgatgagagcacccaggtgcagctgaccctgctgacagccatcgtgaagctgttcctgaagaagcccagcgagacccaggagctggtgcagcaggtgctgagcctggccacccaggacagcgacaacccagacctgcgggaccggggctacatctactggaggctgctgagcacagatcctgtgacagccaaggaggtggtgctgtctgagaagcccctcatcagcgaggagacagacctgattgagcccaccctgctggatgagctgatctgccacatcggcagcctggcctctgtgtaccacaagcccccaaatgcctttgtggagggcagccacggcatccacaggaagcacctgcccatccaccacggcagcacagatgctggggacagccctgtgggcaccaccacagccaccaacctggagcagccccaggtgatccccagccagggcgacctgctgggggacctgctgaacctggacctgggcccccctgtgaatgtgccccaggtgtcctccatgcagatgggcgctgtggacctgctgggcggcggcctggacagcctgctgggcagtgacctgggcggcggcattggaggcagccctgctgtgggccagagcttcatccccagctctgtgcctgccacctttgcccccagccccaccccagctgtggtgagcagcggcctgaatgacctgtttgagctgagcactggaattggcatggcccctgggggctacgtggcccccaaggctgtgtggctgcctgctgtgaaggccaagggcctggagatcagcggcaccttcacccaccggcagggccacatctacatggagatgaacttcaccaacaaggccctgcagcacatgacagactttgccatccagttcaacaagaacagctttggagtcatccccagcacccccctggccatccacacccccctgatgcccaaccagagcattgatgtgtccctgcccctgaacaccctgggccctgtgatgaagatggagcccctgaacaacctgcaggtggccgtgaagaacaacattgatgtgttctacttcagctgcctgatccccctgaatgtgctgtttgtggaggatggcaagatggagcggcaggtgttcctggccacctggaaggacatccccaatgaaaatgagctgcagttccagatcaaggagtgccacctgaatgctgacacagtgagcagcaagctgcagaacaacaacgtgtacaccatcgccaagagaaatgtggagggccaggacatgctgtaccagagcctgaagctgaccaacggcatctggatcctggccgagctgcgcatccagcccggcaaccccaactacaccctgagcctgaagtgccgggcccctgaggtgtcccagtacatctaccaggtgtatgacagcatcctgaagaactag

SEQ ID NO: 142732 - DNA, 1308 bp, synthetic construct
  misc_feature 1..1308: note = Description of Artificial Sequence: Synthetic coding sequence
  source 1..1308: mol_type = other DNA
atgattggaggcctcttcatctacaaccacaagggggaggtgctgatcagccgggtgtacagagatgacatcggcagaaatgctgtggatgccttccgggtgaatgtcatccacgcccggcagcaggtgcgcagccctgtgaccaacatcgcccggaccagcttcttccacgtgaagaggagcaacatctggctggccgctgtgaccaagcagaatgtgaatgctgccatggtgtttgagttcctgtacaagatgtgtgatgtgatggccgcctactttgggaagatcagcgaggagaacatcaagaacaactttgtgctgatctatgagctgctggatgagatcctggactttggctacccccagaacagcgagaccggggccctgaagaccttcatcacccagcagggcatcaagagccagcaccagaccaaggaggagcagagccagatcaccagccaggtgacaggccagatcggctggaggcgggagggcatcaagtacagaagaaatgaactcttcctggatgtgctggagagcgtgaacctgctgatgagcccccagggccaggtgctgagcgcccacgtgtctggccgggtggtgatgaagagctacctgagcggcatgcctgagtgcaagtttggcatgaatgacaagatcgtcatcgagaagcagggcaaaggaacagcagatgagaccagcaagagcggcaagcagagcatcgccattgatgactgcaccttccaccagtgtgtgcggctgagcaagtttgattctgagaggagcatctccttcatccccccagatggagaatttgagctgatgagataccgcaccaccaaggacatcatcctgcccttccgggtcatccccctggtgcgggaggtgggccgcaccaagctggaggtgaaggtggtgatcaagagcaacttcaagcccagcctgctggcccagaagattgaggtgcgcatccccacccccctgaacaccagcggcgtgcaggtgatctgcatgaagggcaaggccaagtacaaggcctctgaaaatgccatcgtgtggaagatcaagaggatggccggcatgaaggagagccagatctctgctgagattgagctgctgcccaccaatgacaagaagaagtgggcccggccccccatctccatgaactttgaggtgccctttgcccccagcggcctgaaggtgcgctacctgaaggtgtttgagcccaagctgaactacagcgaccatgatgtgatcaagtgggtgcgctacatcggccgcagcggcatctatgagacccgctgctag

SEQ ID NO: 142733 - DNA, 1302 bp, synthetic construct
  misc_feature 1..1302: note = Description of Artificial Sequence: Synthetic coding sequence
  source 1..1302: mol_type = other DNA
atgattggaggcctcttcatctacaaccacaagggggaggtgctgatcagccgggtgtacagagatgacatcggcagaaatgctgtggatgccttccgggtgaatgtcatccacgcccggcagcaggtgcgcagccctgtgaccaacatcgcccggaccagcttcttccacgtgaagaggagcaacatctggctggccgctgtgaccaagcagaatgtgaatgctgccatggtgtttgagttcctgtacaagatgtgtgatgtgatggccgcctactttgggaagatcagcgaggagaacatcaagaacaactttgtgctgatctatgagctgctggatgagatcctggactttggctacccccagaacagcgagaccggggccctgaagaccttcatcacccagcagggcatcaagagccagaccaaggaggagcagagccagatcaccagccaggtgacaggccagatcggctggaggcgggagggcatcaagtacagaagaaatgaactcttcctggatgtgctggagagcgtgaacctgctgatgagcccccagggccaggtgctgagcgcccacgtgtctggccgggtggtgatgaagagctacctgagcggcatgcctgagtgcaagtttggcatgaatgacaagatcgtcatcgagaagcagggcaaaggaacagcagatgagaccagcaagagcggcaagcagagcatcgccattgatgactgcaccttccaccagtgtgtgcggctgagcaagtttgattctgagaggagcatctccttcatccccccagatggagaatttgagctgatgagataccgcaccaccaaggacatcatcctgcccttccgggtcatccccctggtgcgggaggtgggccgcaccaagctggaggtgaaggtggtgatcaagagcaacttcaagcccagcctgctggcccagaagattgaggtgcgcatccccacccccctgaacaccagcggcgtgcaggtgatctgcatgaagggcaaggccaagtacaaggcctctgaaaatgccatcgtgtggaagatcaagaggatggccggcatgaaggagagccagatctctgctgagattgagctgctgcccaccaatgacaagaagaagtgggcccggccccccatctccatgaactttgaggtgccctttgcccccagcggcctgaaggtgcgctacctgaaggtgtttgagcccaagctgaactacagcgaccatgatgtgatcaagtgggtgcgctacatcggccgcagcggcatctatgagacccgctgctag

SEQ ID NO: 142734 - DNA, 1302 bp, synthetic construct; identical to SEQ ID NO: 142733
  misc_feature 1..1302: note = Description of Artificial Sequence: Synthetic coding sequence
  source 1..1302: mol_type = other DNA

SEQ ID NO: 142735 - DNA, 342 bp, synthetic construct
  misc_feature 1..342: note = Description of Artificial Sequence: Synthetic coding sequence
  source 1..342: mol_type = other DNA
atgattggaggcctcttcatctacaaccacaagggggaggtgctgatcagccgggtgtacagagatgacatcggcagaaatgctgtggatgccttccgggtgaatgtcatccacgcccggcagcaggtgcgcagccctgtgaccaacatcgcccggaccagcttcttccacgtgaagaggagcaacatctggctggccgctgtgaccaagcagaatgtgaatgctgccatggtgtttgagttcctgtacaagatgtgtgatgtgatggccgcctactttgggaagatcagcgaggagaacatcaagaacaactttgtgctgatctatgagctgctggactag

SEQ ID NO: 142736 - DNA, 1263 bp, synthetic construct
  misc_feature 1..1263: note = Description of Artificial Sequence: Synthetic coding sequence
  source 1..1263: mol_type = other DNA
atgattggaggcctcttcatctacaaccacaagggggaggtgctgatcagccgggtgtacagagatgacatcggcagaaatgctgtggatgccttccgggtgaatgtcatccacgcccggcagcaggtgcgcagccctgtgaccaacatctggctggccgctgtgaccaagcagaatgtgaatgctgccatggtgtttgagttcctgtacaagatgtgtgatgtgatggccgcctactttgggaagatcagcgaggagaacatcaagaacaactttgtgctgatctatgagctgctggatgagatcctggactttggctacccccagaacagcgagactggagccctgaagaccttcatcacccagcagggcatcaagagccagaccaaggaggagcagagccagatcaccagccaggtgacaggccagatcggctggaggcgggagggcatcaagtacagaagaaatgagctgttcctggatgtgctggagagcgtgaacctgctgatgagcccccagggccaggtgctgagcgcccacgtgtctggccgggtggtgatgaagagctacctgagcggcatgcctgagtgcaagtttggcatgaatgacaagatcgtgattgagaagcagggcaagggcacagcagatgagaccagcaagagcggcaagcagagcatcgccattgatgactgcaccttccaccagtgtgtgcggctgagcaagtttgacagcgagaggagcatctccttcatccccccagatggagaatttgagctgatgagataccgcaccaccaaggacatcatcctgcccttccgggtcatccccctggtgcgggaggtgggccgcaccaagctggaggtgaaggtggtgatcaagagcaacttcaagcccagcctgctggcccagaagattgaggtgcgcatccccacccccctgaacaccagcggcgtgcaggtgatctgcatgaagggcaaggccaagtacaaggcctctgaaaatgccatcgtgtggaagatcaagaggatggccggcatgaaggagagccagatctctgctgagattgagctgctgcccaccaatgacaagaagaagtgggcccggccccccatctccatgaactttgaggtgccctttgcccccagcggcctgaaggtgcgctacctgaaggtgtttgagcccaagctgaactacagcgaccatgatgtgatcaagtgggtgcgctacatcggccgcagcggcatctatgagacccgctgctag

SEQ ID NO: 142737 - DNA, 1128 bp, synthetic construct
  misc_feature 1..1128: note = Description of Artificial Sequence: Synthetic coding sequence
  source 1..1128: mol_type = other DNA
atgattggaggcctcttcatctacaaccacaagggggaggtgctgatcagccgggtgtacagagatgacatcggcagaaatgctgtggccgcctactttgggaagatcagcgaggagaacatcaagaacaactttgtgctgatctatgagctgctggatgagatcctggactttggctacccccagaacagcgagaccggggccctgaagaccttcatcacccagcagggcatcaagagccagcaccagaccaaggaggagcagagccagatcaccagccaggtgacaggccagatcggctggaggcgggagggcatcaagtacagaagaaatgaactcttcctggatgtgctggagagcgtgaacctgctgatgagcccccagggccaggtgctgagcgcccacgtgtctggccgggtggtgatgaagagctacctgagcggcatgcctgagtgcaagtttggcatgaatgacaagatcgtcatcgagaagcagggcaaaggaacagcagatgagaccagcaagagcggcaagcagagcatcgccattgatgactgcaccttccaccagtgtgtgcggctgagcaagtttgattctgagaggagcatctccttcatccccccagatggagaatttgagctgatgagataccgcaccaccaaggacatcatcctgcccttccgggtcatccccctggtgcgggaggtgggccgcaccaagctggaggtgaaggtggtgatcaagagcaacttcaagcccagcctgctggcccagaagattgaggtgcgcatccccacccccctgaacaccagcggcgtgcaggtgatctgcatgaagggcaaggccaagtacaaggcctctgaaaatgccatcgtgtggaagatcaagaggatggccggcatgaaggagagccagatctctgctgagattgagctgctgcccaccaatgacaagaagaagtgggcccggccccccatctccatgaactttgaggtgccctttgcccccagcggcctgaaggtgcgctacctgaaggtgtttgagcccaagctgaactacagcgaccatgatgtgatcaagtgggtgcgctacatcggccgcagcggcatctatgagacccgctgctag

SEQ ID NO: 142738 - DNA, 429 bp, synthetic construct
  misc_feature 1..429: note = Description of Artificial Sequence: Synthetic coding sequence
  source 1..429: mol_type = other DNA
atgatccgcttcatcctgatccagaacagagctgggaagacccggctggccaagtggtacatgcagtttgatgatgatgagaagcagaagctgattgaggaggtgcatgctgtggtgacagtgagagatgccaagcacaccaactttgtggagttcaggaacttcaagatcatctaccgccgctatgccggcctgtacttctgcatctgtgtggatgtgaatgacaacaacctggcctacctggaggccatccacaactttgtggaggtgctgaatgagtacttccacaacgtgtgtgagctggacctggtgttcaacttctacaaggtgtacacagtggtggatgagatgttcctggccggggagatccgggagaccagccagaccaaggtgctgaagcagctgctgatgctgcagagcctggagtag

SEQ ID NO: 142739 - DNA, 315 bp, synthetic construct; identical to SEQ ID NO: 142717
  misc_feature 1..315: note = Description of Artificial Sequence: Synthetic coding sequence
  source 1..315: mol_type = other DNA

SEQ ID NO: 142740 - DNA, 3285 bp, synthetic construct
  misc_feature 1..3285: note = Description of Artificial Sequence: Synthetic coding sequence
  source 1..3285: mol_type = other DNA
atgagcagcaacagcttcccctacaatgagcagagcggcggcggggaggccacagagctgggccaggaggccaccagcaccatcagccccagcggggccttcggcctcttcagcagtgacctgaagaagaatgaagacctgaagcagatgctggagagcaacaaggacagcgccaagctggatgccatgaagagaattgtgggcatgattgccaagggcaagaatgccagcgagctgtttcctgctgtggtgaagaatgtggccagcaagaacatcgagatcaagaagctggtgtatgtgtacctggtgcgctatgcagaggagcagcaggacctggccctgctgagcatcagcaccttccagagggccctgaaggaccccaaccagctgatccgggccagcgccctgcgggtgctgagcagcatccgggtgcccatcatcgtgcccatcatgatgctggccatcaaggaggccagcgctgacctgagcccctacgtgaggaagaatgctgcccacgccatccagaagctgtacagcctggaccctgagcagaaggagatgctgattgaagtcatcgagaagctgctgaaggacaagagcaccctggtggccggctctgtggtgatggcctttgaggaggtgtgcccagacagaattgacctgatccacaagaactacaggaagctgtgcaacctgctggtggatgtggaggagtggggccaggtggtgatcatccacatgctgaccaggtatgcccggacccagtttgtgagcccctggaaggagggagatgagctggaggacaatggcaagaacttctatgaaagtgatgatgaccagaaggagaagacagacaagaagaagaagccctacaccatggaccctgaccaccggctgctgatccggaacaccaagcccctgctgcagagcagaaatgctgctgtggtgatggctgtggcccagctgtactggcacatcagccccaagtctgaggccggcatcatcagcaagagcctggtgcggctgctgcggagcaaccgggaggtgcagtacatcgtgctgcagaacatcgccaccatgagcatccagaggaagggcatgtttgagccctacctgaagagcttctacgtgcgcagcacagaccccaccatgatcaagaccctgaagctggagatcctgaccaacctggccaatgaggccaacatcagcaccctgctgcgggagttccagacctacgtgaagagccaggacaagcagtttgctgctgccaccatccagaccatcggccgctgtgccaccaacatcctggaggtgacagacacctgcctgaatggcctggtgtgcctgctgagcaacagagatgagatcgtggtggccgagagcgtggtggtgatcaagaagctgctgcagatgcagcctgcccagcacggggagatcatcaagcacatggccaagctgctggacagcatcaccgtgcctgtggcccgggccagcatcctgtggctgattggagagaactgtgagcgggtgcccaagatcgccccagatgtgctgaggaagatggccaagagcttcaccagtgaagatgacctggtgaagctgcagatcctgaacctgggcgccaagctgtacctgaccaacagcaagcagaccaagctgctgacccagtacatcctgaacctgggcaagtatgaccagaactatgacatccgggacaggacccgcttcatccggcagctgattgtgcccaacgtgaagagcggggccctgagcaaatatgccaagaagatcttcctggcccagaagccagcccccctgctggagagccccttcaaggaccgggaccacttccagctgggcaccctgagccacaccctgaacatcaaggccaccggctacctggagctgagcaactggccagaggtggccccagaccccagcgtgagaaatgtggaggtgattgagctggccaaggagtggaccccagctgggaaggccaagcaggagaacagcgccaagaagttctacagcgagagcgaggaggaggaggacagcagtgacagcagcagtgacagcgagagcgagagcggcagcgagagcggggagcagggcgagagcggggaggagggggacagcaatgaagacagcagcgaggacagcagcagcgagcaggacagcgagagcggccgggagagcggcctggagaacaagaggacagccaagaggaacagcaaggccaagggcaagagtgacagtgaagatggagagaaggaaaatgagaagagcaagaccagtgacagcagcaatgatgagagcagcagcattgaggacagcagcagtgacagcgagagcgagagcgagcctgagagcgagagcgagagcagaagagtgaccaaggagaaggagaagaagaccaagcaggacaggacccccctgaccaaggatgtgtccctgctggacctggatgacttcaaccctgtgtccacccctgtggccctgcccaccccagccctgagccccagcctgatggctgacctggagggcctgcacctgagcaccagcagcagcgtcatctctgtgtccaccccagcctttgtgcccaccaagacccacgtgctgctgcacaggatgtctgggaagggcctggccgcccactacttcttcccccggcagccctgcatctttggagacaagatggtgtccatccagatcaccctgaacaacaccacagacaggaagattgagaacatccacatcggggagaagaagctgcccatcggcatgaagatgcacgtgttcaaccccatcgacagcctggagcctgagggcagcatcaccgtgtccatgggcatcgacttctgtgacagcacccagacagccagcttccagctgtgcaccaaggatgactgcttcaacgtgaacatccagccccctgtgggggagctgctgctgcctgtggccatgtctgagaaggacttcaagaaggagcagggcgtgctgaccggcatgaatgagaccagcgctgtgatcatcgccgccccccagaacttcacccccagcgtcatcttccagaaggtggtgaatgtggccaacgtgggcgctgtgcccagcggccaggacaacatccacagatttgctgccaagacagtgcacagcggcagcctgatgctggtgacagtggagctgaaggagggcagcacagcccagctgatcatcaacacagagaagacagtgattggctctgtgctgctgcgggagctgaagcctgtgctgagccagggctag

SEQ ID NO: 142741 - DNA, 1698 bp, synthetic construct
  misc_feature 1..1698: note = Description of Artificial Sequence: Synthetic coding sequence
  source 1..1698: mol_type = other DNA
atgagcagcaacagcttcccctacaatgagcagagcggcggcggggaggccacagagctgggccaggaggccaccagcaccatcagccccagcggggccttcggcctcttcagcagtgacctgaagaagaatgaagacctgaagcagatgctggagagcaacaaggacagcgccatcaaggaggccagcgctgacctgagcccctacgtgaggaagaatgctgcccacgccatccagaagctgtacagcctggaccctgagcagaaggagatgctgattgaagtcatcgagaagctgctgaaggacaagagcaccctggtggccggctctgtggtgatggcctttgaggaggtgtgcccagacagaattgacctgatccacaagaactacaggaagctgtgcaacctgctggtggatgtggaggagtggggccaggtggtgatcatccacatgctgaccaggtatgcccggacccagtttgtgagcccctggaaggagggagatgagctggaggacaatggcaagaacttctatgaaagtgatgatgaccagaaggagaagacagacaagaagaagaagccctacaccatggaccctgaccaccggctgctgatccggaacaccaagcccctgctgcagagcagaaatgctgctgtggtgatggctgtggcccagctgtactggcacatcagccccaagtctgaggccggcatcatcagcaagagcctggtgcggctgctgcggagcaaccgggaggtgcagtacatcgtgctgcagaacatcgccaccatgagcatccagaggaagggcatgtttgagccctacctgaagagcttctacgtgcgcagcacagaccccaccatgatcaagaccctgaagctggagatcctgaccaacctggccaatgaggccaacatcagcaccctgctgcgggagttccagacctacgtgaagagccaggacaagcagtttgctgctgccaccatccagaccatcggccgctgtgccaccaacatcctggaggtgacagacacctgcctgaatggcctggtgtgcctgctgagcaacagagatgagatcgtggtggccgagagcgtggtggtgatcaagaagctgctgcagatgcagcctgcccagcacggggagatcatcaagcacatggccaagctgctggacagcatcaccgtgcctgtggcccgggccagcatcctgtggctgattggagagaactgtgagcgggtgcccaagatcgccccagatgtgctgaggaagatggccaagagcttcaccagtgaagatgacctggtgaagctgcagatcctgaacctgggcgccaagctgtacctgaccaacagcaagcagaccaagctgctgacccagtacatcctgaacctgggcaagtatgaccagaactatgacatccgggacaggacccgcttcatccggcagctgattgtgcccaacgtgaagagcggggccctgagcaaatatgccaagaagatcttcctggcccagaagccagcccccctgctggagagccccttcaaggaccgggaccacttccagctgggcaccctgagccacaccctgaacatcaaggccaccggctacctggagctgagcaactggccagaggtggccccagaccccagcgtgagaaatgtggaggtgattgagctggtggtgctgtctgagtag

SEQ ID NO: 142742 - DNA, 2403 bp, synthetic construct
  misc_feature 1..2403: note = Description of Artificial Sequence: Synthetic coding sequence
  source 1..2403: mol_type = other DNA
atgagcagcaacagcttcccctacaatgagcagagcggcggcggggaggccacagagctgggccaggaggccaccagcaccatcagccccagcggggccttcggcctcttcagcagtgacctgaagaagaatgaagacctgaagcagatgctggagagcaacaaggacagcgccaagctggatgccatgaagagaattgtgggcatgattgccaagggcaagaatgccagcgagctgtttcctgctgtggtgaagaatgtggccagcaagaacatcgagatcaagaagctggtgtatgtgtacctggtgcgctatgcagaggagcagcaggacctggccctgctgagcatcagcaccttccagagggccctgaaggaccccaaccagctgatccgggccagcgccctgcgggtgctgagcagcatccgggtgcccatcatcgtgcccatcatgatgctggccatcaaggaggccagcgctgacctgagcccctacgtgaggaagaatgctgcccacgccatccagaagctgtacagcctggaccctgagcagaaggagatgctgattgaagtcatcgagaagctgctgaaggacaagagcaccctggtggccggctctgtggtgatggcctttgaggaggtgtgcccagacagaattgacctgatccacaagaactacaggaagctgtgcaacctgctggtggatgtggaggagtggggccaggtggtgatcatccacatgctgaccaggtatgcccggacccagtttgtgagcccctggaaggagggagatgagctggaggacaatggcaagaacttctatgaaagtgatgatgaccagaaggagaagacagacaagaagaagaagccctacaccatggaccctgaccaccggctgctgatccggaacaccaagcccctgctgcagagcagaaatgctgctgtggtgatggctgtggcccagctgtactggcacatcagccccaagtctgaggccggcatcatcagcaagagcctggtgcggctgctgcggagcaaccgggaggtgcagtacatcgtgctgcagaacatcgccaccatgagcatccagaggaagggcatgtttgagccctacctgaagagcttctacgtgcgcagcacagaccccaccatgatcaagaccctgaagctggagatcctgaccaacctggccaatgaggccaacatcagcaccctgctgcgggagttccagacctacgtgaagagccaggacaagcagtttgctgctgccaccatccagaccatcggccgctgtgccaccaacatcctggaggtgacagacacctgcctgaatggcctggtgtgcctgctgagcaacagagatgagatcgtggtggccgagagcgtggtggtgatcaagaagctgctgcagatgcagcctgcccagcacggggagatcatcaagcacatggccaagctgctggacagcatcaccgtgcctgtggcccgggccagcatcctgtggctgattggagagaactgtgagcgggtgcccaagatcgccccagatgtgctgaggaagatggccaagagcttcaccagtgaagatgacctggtgaagctgcagatcctgaacctgggcgccaagctgtacctgaccaacagcaagcagaccaagctgctgacccagtacatcctgaacctgggcaagtatgaccagaactatgacatccgggacaggacccgcttcatccggcagctgattgtgcccaacgtgaagagcggggccctgagcaaatatgccaagaagatcttcctggcccagaagccagcccccctgctggagagccccttcaaggaccgggaccacttccagctgggcaccctgagccacaccctgaacatcaaggccaccggctacctggagctgagcaactggccagaggtggccccagaccccagcgtgagaaatgtggaggtgattgagctggccaaggagtggaccccagctgggaaggccaagcaggagaacagcgccaagaagttctacagcgagagcgaggaggaggaggacagcagtgacagcagcagtgacagcgagagcgagagcggcagcgagagcggggagcagggcgagagcggggaggagggggacagcaatgaagacagcagcgaggacagcagcagcgagcaggacagcgagagcggccgggagagcggcctggagaacaagaggacagccaagaggaacagcaaggccaagggcaagagtgacagtgaagatggagagaaggaaaatgagaagagcaagaccagtgacagcagcaatgatgagagcagcagcattgaggacagcagcagtgacagcgagagcgagagcgagcctgagagcgagagcgagagcagaagagtgaccaaggagtag

SEQ ID NO: 142743 - DNA, 582 bp, synthetic construct
  misc_feature 1..582: note = Description of Artificial Sequence: Synthetic coding sequence
  source 1..582: mol_type = other DNA
atgatcaaggccatcctgatcttcaacaaccacggcaagccccggctgagcaagttctaccagccctacagcgaggacacccagcagcagatcatccgggagaccttccacctggtgtccaagagagatgaaaatgtgtgcaacttcctggagggcggcctgctgattggaggcagtgacaacaagctgatctaccgccactacgccaccctgtactttgtgttctgtgtggacagcagcgagagcgagctgggcatcctggacctgatccaggtgtttgtggagaccctggacaagtgctttgaaaatgtgtgtgagctggacctgatcttccacgtggacaaggtgcacaacatcctggccgagatggtgatgggcggcatggtgctggagaccaacatgaatgaaattgtgacccagattgatgcccagaacaagctggagaagtctgaggccggcctggccggggccccagcccgggctgtgtctgctgtgaagaacatgaacctgcctgagatccccaggaacatcaacattggagacatcagcatcaaggtgcccaacctgcccagcttcaagtag

SEQ ID NO: 142744 - DNA, 450 bp, synthetic construct
  misc_feature 1..450: note = Description of Artificial Sequence: Synthetic coding sequence
  source 1..450: mol_type = other DNA
atgatcaagttcttcctgatggtgaacaagcagggccagacccggctgagcaagtactatgagcacgtggacatcaacaagaggaccctgctggagacagaggtgatcaagagctgcctgagccgcagcaatgagcagtgcagcttcatcgagtacaaggacttcaagctgatctaccggcagtatgctgccctcttcatcgtggtgggcgtgaatgacacagaaaatgagatggccatctatgagttcatccacaactttgtggaggtgctggatgagtacttcagccgggtgtctgagctggatgtgtccttcttcaacacagtgttccacagcacctggcagatgcacagcggcccctaccagaccaggagctgcagcgtgacccaggccggcgtgcagagatgtgaccacggcagcctgcaccctggcagccctggcctgaagtag

SEQ ID NO: 142745 - DNA, 408 bp, synthetic construct
  misc_feature 1..408: note = Description of Artificial Sequence: Synthetic coding sequence
  source 1..408: mol_type = other DNA
atgatcaagttcttcctgatggtgaacaagcagggccagacccggctgagcaagtactatgagcacgtggacatcaacaagaggaccctgctggagacagaggtgatcaagagctgcctgagccgcagcaatgagcagtgcagcttcatcgagtacaaggacttcaagctgatctaccggcagtatgctgccctcttcatcgtggtgggcgtgaatgacacagaaaatgagatggccatctatgagttcatccacaactttgtggaggtgctggatgagtacttcagccgggtggagcccattgatgagctgcccaagatctgcagcgccctggagccccagcagacctgcttctccccagacagcagcagcttcaagggggccgccagcaccacccccatctactag

SEQ ID NO: 142746 - DNA, 2220 bp, synthetic construct
  misc_feature 1..2220: note = Description of Artificial Sequence: Synthetic coding sequence
  source 1..2220: mol_type = other DNA
atgccctacctgggctctgaagatgtggtgaaggagctgaagaaggccctgtgcaacccccacatccaggccgaccggctgcgctacagaaatgtcatccagagggtcatccgctacatgacccagggcctggacatgtctggagtcttcatggagatggtgaaggccagcgccaccgtggacatcgtgcagaagaagctggtgtacctgtacatgtgcacctacgcccccctgaagccagacctggccctgctggccatcaacaccctgtgcaaggactgcagcgaccccaaccccatggtgcggggcctggccctgcgctccatgtgcagcctgaggatgcctggggtgcaggagtacatccagcagcccatcctgaatggcctgcgggacaaggccagctatgtgagaagagtggccgtgctgggctgtgccaagatgcacaacctgcatggagacagcgaggtggatggagccctggtgaatgagctgtacagcctgctgcgggaccaggaccccatcgtggtggtgaactgcctgcggagcctggaggagatcctgaagcaggagggcggcgtggtgatcaacaagcccatcgcccaccacctgctgaacaggatgagcaagctggaccagtggggccaggccgaggtgctgaacttcctgctgcgctaccagcccaggtctgaggaggagctgtttgacatcctgaacctgctggacagcttcctgaagagcagcagccctggggtggtgatgggcgccaccaagctgttcctgatcctggccaagatgttcccccacgtgcagacagatgtgctggtgcgggtgaagggccccctgctggccgcctgcagcagcgagagccgggagctgtgctttgtggccctgtgccacgtgcggcagatcctgcacagcctgcccggccacttcagcagccactacaagaagttcttctgcagctacagcgagccccactacatcaagctgcagaaggtggaggtgctgtgtgagctggtgaatgatgaaaatgtgcagcaggtgctggaggagctgcggggctactgcacagatgtgtctgctgactttgcccaggccgccatctttgccatcggcggcatcgcccggacctacacagaccagtgtgtgcagatcctgacagagctgctgggcctgcggcaggagcacatcaccaccgtggtggtgcagaccttccgggacctggtgtggctgtgcccccagtgcacagaggccgtgtgccaggccctgcccggctgtgaggagaacatccaggacagcgagggcaagcaggccctgatctggctgctgggcgtgcacggggagcgcatccccaatgccccctacgtgctggaggactttgtggagaatgtgaagtctgagaccttccctgctgtgaagatggagctgctgacagccctgctgcggctcttcctgagcaggcctgctgagtgccaggacatgctgggccgcctgctgtactactgcatcgaggaggagaaggacatggctgtgcgggaccggggcctcttctactaccgcctgctgctggtgggcattgatgaggtgaagaggatcctgtgcagccccaagagtgaccccaccctgggcctgctggaggaccctgctgagaggcctgtgaacagctgggccagtgacttcaacaccctggtgcctgtgtatggcaaggcccactgggccaccatcagcaagtgccagggcgctgagcgctgtgaccctgagctgcccaagaccagcagctttgctgccagcggccccctcatccctgaggagaacaaggagcgggtgcaggagctgcctgattctggggccctgatgctggtgcccaaccggcagctgacagctgactactttgagaagacctggctgagcctgaaggtggcccaccagcaggtgctgccctggagaggagagttccacccagacaccctgcagatggccctgcaggtggtgaacatccagaccatcgccatgagccgggccggcagccggccctggaaggcctacctgagcgcccaggatgacaccggctgcctcttcctgacagagctgctgctggagcccggcaacagcgagatgcagatctctgtgaagcagaatgaggccaggacagagaccctgaacagcttcatctctgtgctggagaccgtgattggcaccatcgaggagatcaagagctag

SEQ ID NO: 142747 - DNA, 891 bp, synthetic construct
  misc_feature 1..891: note = Description of Artificial Sequence: Synthetic coding sequence
  source 1..891: mol_type = other DNA
atgccctacctgggctctgaagatgtggtgaaggagctgaagaaggccctgtgcaacccccacatccaggccgaccggctgcgctacagaaatgtcatccagagggtcatccgcatgcctggggtgcaggagtacatccagcagcccatcctgaatggcctgcgggacaaggccagctatgtgcggcgggtggccgtgctgggctgtgccaagatgcacaacctgcacggggacagcgaggtggatggagccctggtgaatgagctgtacagcctgctgcgggaccaggaccccatcgtggtggtgaactgcctgcggagcctggaggagatcctgaagcaggagggcggcgtggtgatcaacaagcccatcgcccaccacctgctgaacaggatgagcaagctggaccagtggggccaggccgaggtgctgaacttcctgctgcgctaccagcccaggtctgaggaggagctgtttgacatcctgaacctgctggacagcttcctgaagagcagcagccctggggtggtgatgggcgccaccaagctgttcctgatcctggccaagatgttcccccacgtgcagacagatgtgctggtgcgggtgaagggccccctgctggccgcctgcagcagcgagagccgggagctgtgctttgtggccctgtgccacgtgcggcagatcctgcacagcctgcccggccacttcagcagccactacaagaagttcttctgcagctacagcgagccccactacatcaagctgcagaaggtggaggtgctgtgtgagctggtgaatgatgaaaatgtgcagcaggtgctggaggagctgcggggctactgcacagatgtgtctgctgactttgcccaggccgccatctttgccatctag

SEQ ID NO: 142748 - DNA, 909 bp, synthetic construct
  misc_feature 1..909: note = Description of Artificial Sequence: Synthetic coding sequence
  source 1..909: mol_type = other DNA
atgccctacctgggctctgaagatgtggtgaaggagctgaagaaggccctgtgcaacccccacatccaggccgaccggctgcgctacagaaatgtcatccagagggtcatccgctacatgacccagggcctggacatgtctggagtcttcatggagatggtgaaggccagcgccaccgtggacatcgtgcagaagaagctggtgtacctgtacatgtgcacctacgcccccctgaagccagacctggccctgctggccatcaacaccctgtgcaaggactgcagcgaccccaaccccatggtgcggggcctggccctgcgctccatgtgcagcctgaggatgagcaagctggaccagtggggccaggccgaggtgctgaacttcctgctgcgctaccagcccaggtctgaggaggagctgtttgacatcctgaacctgctggacagcttcctgaagagcagcagccctggggtggtgatgggcgccaccaagctgttcctgatcctggccaagatgttcccccacgtgcagacagatgtgctggtgcgggtgaagggccccctgctggccgcctgcagcagcgagagccgggagctgtgctttgtggccctgtgccacgtgcggcagatcctgcacagcctgcccggccacttcagcagccactacaagaagttcttctgcagctacagcgagccccactacatcaagctgcagaaggtggaggtgctgtgtgagctggtgaatgatgaaaatgtgcagcaggtgctggaggagctgcggggctactgcacagatgtgtctgctgactttgcccaggccgccatctttgccatcggccgctgcctgctgctcttcctgctggagaacctggaccagcctgccaggaagctgtggctggaggagccctag

SEQ ID NO: 142749 - DNA, 1716 bp, synthetic construct
  misc_feature 1..1716: note = Description of Artificial Sequence: Synthetic coding sequence
  source 1..1716: mol_type = other DNA
atgccctacctgggctctgaagatgtggtgaaggagctgaagaaggccctgtgcaacccccacatccaggccgaccggctgcgctacagaaatgtcatccagagggtcatccgcatgagcaagctggaccagtggggccaggccgaggtgctgaacttcctgctgcgctaccagcccaggtctgaggaggagctgtttgacatcctgaacctgctggacagcttcctgaagagcagcagccctggggtggtgatgggcgccaccaagctgttcctgatcctggccaagatgttcccccacgtgcagacagatgtgctggtgcgggtgaagggccccctgctggccgcctgcagcagcgagagccgggagctgtgctttgtggccctgtgccacgtgcggcagatcctgcacagcctgcccggccacttcagcagccactacaagaagttcttctgcagctacagcgagccccactacatcaagctgcagaaggtggaggtgctgtgtgagctggtgaatgatgaaaatgtgcagcaggtgctggaggagctgcggggctactgcacagatgtgtctgctgactttgcccaggccgccatctttgccatcggcggcatcgcccggacctacacagaccagtgtgtgcagatcctgacagagctgctgggcctgcggcaggagcacatcaccaccgtggtggtgcagaccttccgggacctggtgtggctgtgcccccagtgcacagaggccgtgtgccaggccctgcccggctgtgaggagaacatccaggacagcgagggcaagcaggccctgatctggctgctgggcgtgcacggggagcgcatccccaatgccccctacgtgctggaggactttgtggagaatgtgaagtctgagaccttccctgctgtgaagatggagctgctgacagccctgctgcggctcttcctgagcaggcctgctgagtgccaggacatgctgggccgcctgctgtactactgcatcgaggaggagaaggacatggctgtgcgggaccggggcctcttctactaccgcctgctgctggtgggcattgatgaggtgaagaggatcctgtgcagccccaagagtgaccccaccctgggcctgctggaggaccctgctgagaggcctgtgaacagctgggccagtgacttcaacaccctggtgcctgtgtatggcaaggcccactgggccaccatcagcaagtgccagggcgctgagcgctgtgaccctgagctgcccaagaccagcagctttgctgccagcggccccctcatccctgaggagaacaaggagcgggtgcaggagctgcctgattctggggccctgatgctggtgcccaaccggcagctgacagctgactactttgagaagacctggctgagcctgaaggtggcccaccagcaggtgctgccctggagaggagagttccacccagacaccctgcagatggccctgcaggtggtgaacatccagaccatcgccatgagccgggccggcagccggccctggaaggcctacctgagcgcccaggatgacaccggctgcctcttcctgacagagctgctgctggagcccggcaacagcgagatgcagatctctgtgaagcagaatgaggccaggacagagaccctgaacagcttcatctctgtgctggagaccgtgattggcaccatcgaggagatcaagagctag

SEQ ID NO: 142750 - DNA, 2220 bp, synthetic construct; identical to SEQ ID NO: 142746
  misc_feature 1..2220: note = Description of Artificial Sequence: Synthetic coding sequence
  source 1..2220: mol_type = other DNA

SEQ ID NO: 142751 - DNA, 789 bp, synthetic construct
  misc_feature 1..789: note = Description of Artificial Sequence: Synthetic coding sequence
  source 1..789: mol_type = other DNA
atgccctacctgggctctgaagatgtggtgaaggagctgaagaaggccctgtgcaacccccacatccaggccgaccggctgcgctacagaaatgtcatccagagggtcatccgctacatgacccagggcctggacatgtctggagtcttcatggagatggtgaaggccagcgccaccgtggacatcgtgcagaagaagctggtgtacctgtacatgtgcacctacgcccccctgaagccagacctggccctgctggccatcaacaccctgtgcaaggactgcagcgaccccaaccccatggtgcggggcctggccctgcgctccatgtgcagcctgaggatgcctggggtgcaggagtacatccagcagcccatcctgaatggcctgcgggacaaggccagctatgtgagaagagtggccgtgctgggctgtgccaagatgcacaacctgcatggagacagcgaggtggatggagccctggtgaatgagctgtacagcctgctgcgggaccaggaccccatcgtggtggtgaactgcctgcggagcctggaggagatcctgaagcaggagggcggcgtggtgatcaacaagcccatcgcccaccacctgctgaacaggatgagcaagctggaccagtggggccaggccgaggtgctgaacttcctgctgcgctaccagcccaggtctgaggaggagctgtttgacatcctgaacctgctggacagcttcctgaagagcagcagccctggggtggtgatgggcgccaccaagctgttcctgatcctgtag

SEQ ID NO: 142752 - DNA, 528 bp, synthetic construct
  misc_feature 1..528: note = Description of Artificial Sequence: Synthetic coding sequence
  source 1..528: mol_type = other DNA
atgccctacctgggctctgaagatgtggtgaaggagctgaagaaggccctgtgcaacccccacatccaggccgaccggctgcgctacagaaatgtcatccagagggtcatccgcatgagcaagctggaccagtggggccaggccgaggtgctgaacttcctgctgcgctaccagcccaggtctgaggaggagctgtttgacatcctgaacctgctggacagcttcctgaagagcagcagccctggggtggtgatgggcgccaccaagctgttcctgatcctggccaagatgttcccccacgtgcagacagatgtgctggtgcgggtgaagggccccctgctggccgcctgcagcagcgagagccgggagctgtgctttgtggccctgtgccacgtgcggcagatcctgcacagcctgcccggccacttcagcagccactacaagaagttcttctgcagctacagcgagccccactacatcaagctgcagaaggtggaggtgctgtgtgagctggtgaatgatgaatag

SEQ ID NO: 142753 - DNA, 3414 bp, synthetic construct
  misc_feature 1..3414: note = Description of Artificial Sequence: Synthetic coding sequence
  source 1..3414: mol_type = other DNA
atgtctgacatcgtggagaagaccctgacagccctgcccggcctcttcctgcagaaccagcccggcggcggccctgctgctgccaaggccagcttcagcagccggctgggcagcctggtgcggggcatcacagccctgaccagcaagcatgaggaggagaagctgatccagcaggagctgagcagcctgaaggccaccgtgtctgcccccaccaccaccctgaagatgatgaaggagtgcatggtgcggctcatctactgtgagatgctgggctatgatgccagctttggctacatccacgccatcaagctggcccagcagggcaacctgctggagaagagggtgggctacctggccgtgtccctcttcctgcacgagagccatgagctgctgctgctgctggtgaacacagtggtgaaggacctgcagagcaccaacctggtggaggtgtgcatggccctgactgtggtgtcccagatcttcccctgtgagatgatcccagctgtgctgcccctgattgaggacaagctgcagcacagcaaggagatcgtgcggaggaaggctgtgctggccctgtacaagttccacctgattgcccccaaccaggtgcagcacatccacatcaagttcaggaaggccctgtgtgacagagatgtgggcgtgatggccgccagcctgcacatctacctgaggatgatcaaggagaacagcagcggctacaaggacctgaccggcagctttgtgaccatcctgaagcaggtggtgggcggcaagctgcctgtggagttcaactaccacagcgtgcctgccccctggctgcagatccagctgctgcgcatcctgggcctgctgggcaaggatgaccagaggaccagcgagctgatgtatgatgtgctggatgagagcctgcggcgggcagagctgaaccacaacgtgacctacgccatcctgtttgaatgtgtgcacacagtgtacagcatctaccccaagtctgagctgctggagaaggccgccaagtgcatcggcaagtttgtgctgagccccaagatcaacctgaagtacctgggcctgaaggccctgacctacgtgatccagcaggaccccaccctggccctgcagcaccagatgaccatcatcgagtgcctggaccacccagaccccatcatcaagcgggagaccctggagctgctgtaccgcatcaccaatgcccagaacatcaccgtgattgtgcagaagatgctggagtacctgcaccagagcaaggaggagtatgtgattgtgaacctggtgggcaagattgctgagctggccgagaagtatgccccagacaatgcctggttcatccagaccatgaatgctgtgttttctgtgggcggagatgtgatgcacccagacatccccaacaacttcctgcggctgctggccgagggctttgatgatgaaacagaggaccagcagctgcggctgtatgctgtgcagagctacctgaccctgctggacatggagaatgtgttctacccccagcgcttcctgcaggtgatgtcctgggtgctgggggagtacagctacctgctggacaaggagaccccagaggaggtgattgccaagctgtacaagctgctgatgaatgattctgtgagcagcgagaccaaggcctggctgattgctgctgtgaccaagctgaccagccaggcccacagcagcaacacagtggagcggctcatccacgagttcaccatcagcctggacacctgcatgaggcagcacgcctttgagctgaagcacctgcatgaaaatgtggagctgatgaagagcctgctgcctgtggacaggagctgtgaggacctggtggtggatgccagcctgtccttcctggatggctttgtggccgagggcctgagccagggcgccgccccctacaagccaccccaccagaggcaggaggagaagctgagccaggagaaggtgctgaactttgagccctacggcctgtccttcagcagcagcggcttcaccggccggcagagccctgctggcatcagcctgggcagtgatgtgtctggcaacagcgctgagaccggcctgaaggagaccaacagcctgaagctggagggcatcaagaagctgtggggcaaggagggctacctgcccaagaaggagagcaagacaggagatgaaagtggggccctgcctgtgccccaggagagcatcatggagaatgtggaccaggccatcaccaagaaggaccagagccaggtgctgacccagagcaaggaggagaaggagaagcagctgctggccagcagcctgtttgtgggcctgggcagcgagagcaccatcaacctgctgggcaaggctgacacagtgagccacaagttccggaggaagagcaaggtgaaggaggccaagagcggggagaccaccagcacccacaacatgacctgcagcagcttcagcagcctgagcaatgtggcctatgaagatgactactacagcaacaccctgcatgacaccggggacaaggagctgaagaagttcagcctgaccagcgagctgctggacagcgagagcctgacagagctgcccctggtggagaagttctcctactgcagcctgagcacccccagcctgtttgccaacaacaacatggagatcttccaccccccccagagcacagctgcctctgtggccaaggagagcagcctggccagcagcttcctggaggagaccacagagtacatccacagcaatgccatggaggtgtgcaacaatgagaccatctctgtgtcctcctacaagatctggaaggatgactgcctgctgatggtgtggagcgtgaccaacaagagcggcctggagctgaagtctgctgacctggagatcttccctgctgagaacttcaaggtgacagagcagcccggctgctgcctgcctgtgatggaggccgagagcaccaagagcttccagtacagcgtgcagatcgagaagcccttcacagagggcaacctgaccggcttcatctcctaccacatgatggacacccacagcgcccagctggagttctctgtgaacctgagcctgctggacttcatccggcccctgaagatcagcagtgatgactttgggaagctgtggctgagctttgccaatgatgtgaagcagaatgtgaagatgtctgagagccaggccgccctgcccagcgccctgaagaccctgcagcagaagctgcggctgcacatcatcgagatcattggaaatgaaggcctgctggcctgccagctgctgcccagcatcccctgcctgctgcactgccgggtgcatgctgatgtgctggccctgtggttccgcagcagctgcagcaccctgcctgactacctgctgtaccagtgccagaaggtgatggagggcagctag

SEQ ID NO: 142754 - DNA, 1362 bp, synthetic construct
  misc_feature 1..1362: note = Description of Artificial Sequence: Synthetic coding sequence
  source 1..1362: mol_type = other DNA
atgatcagccagttcttcatcctgagcagcaaaggagaccccctcatctacaaggacttccggggggacagcggcggcagagatgtggccgagctgttctacaggaagctgaccggcctgcctggagatgagagccctgtggtgatgcaccaccacggccgccacttcatccacatccgccacagcggcctgtacctggtggtgaccaccagtgaaaatgtgagccccttcagcctgctggagctgctgagccggctggccaccctgctgggggactactgcggcagcctgggggagggcaccatcagcagaaatgtggccctggtgtatgagctgctggatgaggtgctggactatggctacgtgcagaccaccagcacagagatgctgaggaacttcatccagacagaggccgtggtgtccaagcccttcagcctgtttgacctgagctctgtgggcctgtttggagctgagacccagcagagcaaggtggcccccagcagcgctgccagcaggcctgtgctgagcagcagaagtgaccagagccagaagaatgaggtgttcctggatgtggtggagcggctgtctgtgctgattgccagcaatggcagcctgctgaaggtggatgtgcagggcgagatccggctgaagagcttcctgcccagcggcagcgagatgagaattggcctgacagaggagttctgtgtgggcaagtctgagctgcggggctacggccctggcatccgggtggatgaggtgtccttccacagctctgtgaacctggatgaatttgagagccaccgcatcctgcggctgcagcccccccagggcgagctgactgtgatgagataccagctgagtgatgacctgcccagccccctgcccttccgcctcttccccagcgtgcagtgggaccggggcagcggccgcctgcaggtgtacctgaagctgcgctgtgacctgctgagcaagagccaggccctgaatgtgcggctgcacctgcccctgccccggggcgtggtgtccctgagccaggagctgagcagccctgagcagaaggccgagctggccgagggcgccctgcgctgggacctgccccgggtgcagggcggcagccagctgagcggcctcttccagatggatgtgcccggccccccaggcccccccagccacggcctgagcaccagcgccagccccctgggcctgggccctgccagcctgagctttgagctgcccaggcacacctgcagcggcctgcaggtgcgcttcctgcggctggccttccggccctgtggaaatgccaacccccacaagtgggtgcgccacctgagccacagtgatgcctacgtgatccgcatctag

SEQ ID NO: 142755 - DNA, 1362 bp, synthetic construct; identical to SEQ ID NO: 142754
  misc_feature 1..1362: note = Description of Artificial Sequence: Synthetic coding sequence
  source 1..1362: mol_type = other DNA

SEQ ID NO: 142756 - DNA, 1653 bp, synthetic construct
  misc_feature 1..1653: note = Description of Artificial Sequence: Synthetic coding sequence
  source 1..1653: mol_type = other DNA
atgtctgctgcctggatcccagccctgggcctgggcgtgtgcctgctgctgctgcccggccctgctggcagcgagggcgccgcccccatcgccatcacctgcttcacccggggcctggacatcaggaaggagaaggcagatgtgctgtgccctgggggctgccccctggaggagttctctgtgtatggcaacatcgtgtatgcctctgtgagcagcatctgtggggctgctgtgcacagaggagtcatcagcaacagcggcggccctgtgcgggtgtacagcctgcccggccgggagaactacagctctgtggatgccaacggcatccagagccagatgctgagccgctggagcgccagcttcaccgtgaccaagggcaagagcagcacccaggaggccaccggccaggccgtgtccacagcccaccccccaacaggcaagaggctgaagaagaccccagagaagaagacaggcaacaaggactgcaaggctgacatcgccttcctgattgatggcagcttcaacatcggccagaggcgcttcaacctgcagaagaactttgtgggcaaggtggccctgatgctgggcattggaacagagggcccccacgtgggcctggtgcaggccagcgagcaccccaagattgagttctacctgaagaacttcaccagcgccaaggatgtgctgtttgccatcaaggaggtgggcttccggggcggcaacagcaacacaggcaaggccctgaagcacacagcccagaagttcttcaccgtggatgctggggtgaggaagggcatccccaaggtggtggtggtgttcattgatggctggcccagtgatgacatcgaggaggccggcatcgtggcccgggagtttggagtgaatgtgttcatcgtgtctgtggccaagcccatccctgaggagctgggcatggtgcaggatgtgacctttgtggacaaggctgtgtgcaggaacaacggcttcttctcctaccacatgcccaactggtttggcaccaccaagtatgtgaagcccctggtgcagaagctgtgcacccatgagcagatgatgtgcagcaagacctgctacaacagcgtgaacatcgccttcctgattgatggcagcagctctgtgggggacagcaacttccggctgatgctggagtttgtgagcaacatcgccaagacctttgagatcagtgacatcggggccaagattgctgctgtgcagttcacctatgaccagaggacagagttctccttcacagactacagcaccaaggaaaatgtgctggccgtcatccggaacatccgctacatgtctgggggcacagccactggagatgccatctccttcaccgtgagaaatgtgtttggccccatccgggagagccccaacaagaacttcctggtgattgtgacagatggccagagctatgatgatgtgcagggccctgctgctgctgcccatgatgctggcatcaccatcttctctgtgggcgtggcctgggcccccctggatgacctgaaggacatggccagcaagcccaaggagagccacgccttcttcacccgggagttcaccggcctggagcccatcgtgtctgatgtgatccggggcatctgccgggacttcctggagagccagcagtag

SEQ ID NO: 142757 - DNA, 435 bp, synthetic construct
  misc_feature 1..435: note = Description of Artificial Sequence: Synthetic coding sequence
  source 1..435: mol_type = other DNA
atgatcaagttcttcctgatggtgaacaagcagggccagacccggctgagcaagtactatgagcacgtggacatcaacaagaggaccctgctggagacagaggtgatcaagagctgcctgagccgcagcaatgagcagtgcagcttcatcgagtacaaggacttcaagctgatctaccggcagtatgctgccctcttcatcgtggtgggcgtgaatgacacagaaaatgagatggccatctatgagttcatccacaactttgtggaggtgctggatgagtacttcagccgggtggtgaagggccacatcatgttcaacctggacaaggtgcacatcatcctggatgagatggtgctgaatggctgcatcgtggagaccaacagagcccgcatcctggcccccctgctgatcctggacaagatgtctgagagctag

SEQ ID NO: 142758 - DNA, 435 bp, synthetic construct
  misc_feature 1..435: note = Description of Artificial Sequence: Synthetic coding sequence
  source 1..435: mol_type = other DNA
atgatcaagttcttcctgatggtgaacaagcagggccagacccggctgagcaagtactatgagcacgtggacatcaacaagaggaccctgctggagacagaggtgatcaagagctgcctgagccgcagcaatgagcagtgcagcttcatcgagtacaaggacttcaagctgatctaccggcagtatgctgccctcttcatcgtggtgggcgtgaatgacacagaaaatgagatggccatctatgagttcatccacaactttgtggaggtgctggatgagtacttcagccgggtgtctgagctggacatcatgttcaacctggacaaggtgcacatcatcctggatgagatggtgctgaatggctgcatcgtggagaccaacagagcccgcatcctggcccccctgctgatcctggacaagatgtctgagagctag

SEQ ID NO: 142759 - DNA, 27 bp, synthetic construct
  misc_feature 1..27: note = Description of Artificial Sequence: Synthetic coding sequence
  source 1..27: mol_type = other DNA
atgatcaagttcttcctgatggtgtag

SEQ ID NO: 142760 - DNA, 297 bp, synthetic construct
  misc_feature 1..297: note = Description of Artificial Sequence: Synthetic coding sequence
  source 1..297: mol_type = other DNA
atgatcaagttcttcctgatggtgaacaagcagggccagacccggctgagcaagtactatgagcacgtggacatcaacaagaggaccctgctggagacagaggtgatcaagagctgcctgagccgcagcaatgagcagtgcagcttcatcgagtacaaggacttcaagctgatctaccggcagtatgctgccctcttcatcgtggtgggcgtgaatgacacagaaaatgagatggccatctatgagttcatccacaactttgtggaggtgctggatgagtacttcagccgggtgtag

SEQ ID NO: 142761 - DNA, 402 bp, synthetic construct
  misc_feature 1..402: note = Description of Artificial Sequence: Synthetic coding sequence
  source 1..402: mol_type = other DNA
atgatcaagttcttcctgatggtgaacaagcagggccagacccggctgagcaagtactatgagcacgtggacatcaacaagaggaccctgctggagacagaggtgatcaagagctgcctgagccgcagcaatgagcagtgcagcttcatcgagtacaaggacttcaagctgatctaccggcagtatgctgccctcttcatcgtggtgggcgtgaatgacacagaaaatgagatggccatctatgagttcatccacaactttgtggaggtgctggatgagtacttcagccgggtgtctgagctggacatcatgttcaacctggacaaggtgcacatcatcctggatgagatggtgctgaatggctgcatcgtggagaccaacagagcccgcatcctggcctag

SEQ ID NO: 142762 - DNA, 4611 bp, synthetic construct
  misc_feature 1..4611: note = Description of Artificial Sequence: Synthetic coding sequence
  source 1..4611: mol_type = other DNA
atgggcgtggtgaactttgtgttccgggccagcgaggacctgcaggtgctggagaactacagtgatgcccccatgacccccaagcagatcctgcaggtgattgaggccgagggcctgaaggagatgagcggcaccagccccctggcctgcctgaatgccatgctgcacagcaacagcagaggaggagagggcctcttctacaagctgcccggccgcatcagcctcttcaccctgaagaaggatgccctgcagtggagccgccacccagccaccgtggagggggaggagcctgaggacacagcagatgtggagagctgtggcagcaatgaggccagcacagtgtctggagaaaatgatgtgtccctggatgagaccagcagcaatgccagctgcagcacagagagccagagccggcccctgagcaacccccgggacagctaccgggccagcagccaggccaacaagcagaagaagaagacaggagtgatgctgccccgggtggtgctgacccccctgaaggtgaatggagcccacgtggagagcgccagcggcttcagcggctgccacgcagatggagagagcggcagccccagcagcagcagcagcggcagcctggccctgggcagcgctgccatccggggccaggccgaggtgacccaggaccctgcccccctgctgcggggcttcaggaagccagccaccggccagatgaagaggaacagaggagaggagattgactttgagaccccaggcagcatcctggtgaacaccaacctgcgggccctgatcaacagcaggaccttccacgccctgcccagccacttccagcagcagctgctcttcctgctgcctgaggtggaccggcaggtgggcacagatggcctgctgcggctgagcagcagcgccctgaacaatgagttcttcacccatgctgcccagagctggagggagcggctggctgatggagagttcacccatgagatgcaggtgcgcatccggcaggagatggagaaggagaagaaggtggagcagtggaaggagaagttctttgaggactactacggccagaagctgggcctgaccaaggaggagagcctgcagcagaatgtgggccaggaggaggccgagatcaagagcggcctgtgtgtgcctggagagagcgtgcgcatccagaggggccctgccacccggcagagagatggccacttcaagaagaggagcaggccagacctgcggacccgggcccggaggaacctgtacaagaagcaggagagcgagcaggccggcgtggccaaggatgccaagtctgtggccagtgatgtgcccctgtacaaggatggagaggccaagacagatcctgctggcctgagcagcccccacctgcccggcaccagcagcgctgccccagacctggagggccctgagttccctgtggagagcgtggccagccgcatccaggccgagccagacaacctggcccgggccagcgccagcccagaccgcatccccagcctgccccaggagaccgtggaccaggagcccaaggaccagaagaggaagagctttgagcaggccgccagcgccagcttccctgagaagaagccccggctggaggaccggcagagcttcaggaacaccattgaatctgtgcacacagagaagccccagcccaccaaggaggagcccaaggtgccccccatccgcatccagctgagccgcatcaagccaccctgggtggtgaagggccagcccacctaccagatctgcccccgcatcatccccaccacagagagcagctgccggggctggacaggagcccggaccctggccgacatcaaggcccgggccctgcaggtgcggggggcccggggccaccactgccaccgggaggccgccaccacagccatcggcggcggcggcggccctgggggcggcggcggcggggccacagatgaaggaggcggccggggcagcagcagtggagatggaggagaggcctgtggccaccctgagccccggggcggccccagcaccccaggcaagtgcaccagtgacctgcagaggacccagctgctgcccccctaccccctgaatggagagcacacccaggccggcacagccatgagccgggcccggcgggaggacctgcccagcctgaggaaggaggagagctgcctgctgcagagggccaccgtgggcctgacagatggcctgggagatgccagccagctgcctgtggcccccactggagaccagccctgccaggccctgcccctgctgagcagccagacctctgtggccgagcggctggtggagcagccccagctgcacccagatgtgaggacagaatgtgagagcggcaccacctcctgggagagtgatgatgaggagcagggccccaccgtgcctgctgacaatggccccatcctgagcctggtgggagatgacaccctggagaagggcaccggccaggccctggacagccaccccaccatgaaggaccctgtgaatgtgacccccagcagcaccccagagagcagccccacagactgcctgcagaacagagcctttgatgatgagctgggcctgggcggcagctgcccccccatgagggagagtgacacccggcaggagaacctgaagaccaaggccctggtgagcaacagcagcctgcactggatccccatccccagcaatgatgaggtggtgaagcagcccaagccagagagccgggagcacatccccagcgtggagccccaggtgggggaggagtgggagaaggccgcccccaccccaccagccctgcccggggacctgacagctgaggagggcctggaccccctggacagcctgaccagcctgtggacagtgcccagcagaggaggcagtgacagcaatggcagctactgccagcaggtggacatcgagaagctgaagatcaatggagacagcgaggccctgagcccccacggggagagcacagacacagccagtgactttgagggccacctgacagaggacagcagcgaggccgacacccgggaggccgctgtgaccaagggcagctctgtggacaaggatgagaagcccaactggaaccagagcgcccccctgagcaaggtgaatggagacatgaggctggtgaccaggacagatggcatggtggccccccagagctgggtgtcccgggtgtgtgctgtgcggcagaagatcccagacagcctgctgctggccagcacagagtaccagcccagggctgtgtgcctgtccatgcctggcagctctgtggaggccaccaaccccctggtgatgcagctgctgcagggcagcctgcccctggagaaggtgctgcccccagcccatgatgacagcatgtctgagagcccccaggtgcccctgaccaaggaccagagccacggcagcctgaggatgggcagcctgcacggcctgggcaagaacagcggcatggtggatggcagcagccccagcagcctgcgggccctgaaggagcccctgctgcctgacagctgtgaaacaggaacaggcctggcccgcatcgaggccacccaggcccctggggccccccagaagaactgcaaggctgtgcccagctttgacagcctgcaccctgtgaccaaccccatcaccagcagcaggaagctggaggagatggacagcaaggagcagttcagcagcttcagctgtgaggaccagaaggaggtgcgggccatgagccaggacagcaacagcaatgctgcccctgggaagagccctggggacctgaccaccagcaggaccccccgcttcagcagccccaacgtcatcagctttggacctgagcagacaggccgggccctgggggaccagagcaatgtgacaggccagggcaagaagctgtttggcagcggaaatgtggccgccaccctgcagaggcccaggcctgctgaccccatgcccctgcctgctgagatcccccctgtgttccccagcggcaagctgggccccagcaccaacagcatgtctggaggagtgcagaccccccgggaggactgggcccccaagccccacgcctttgtgggctctgtgaagaatgagaagacctttgtgggcggccccctgaaggccaatgctgagaacaggaaggccaccggccacagccccctggagctggtgggccacctggagggcatgccctttgtgatggacctgcccttctggaagctgccccgggagcccgggaagggcctgtctgagcccctggagcccagcagcctgcccagccagctgagcatcaagcaggccttctacggcaagctgagcaagctgcagctgagcagcaccagcttcaactacagcagcagcagccccaccttccccaagggcctggccggctctgtggtgcagctgagccacaaggccaactttggagccagccacagcgccagcctgagcctgcagatgttcacagacagcagcacagtggagagcatcagcctgcagtgtgcctgcagcctgaaggccatgatcatgtgccagggctgtggggccttctgccatgatgactgcatcggccccagcaagctgtgtgtgctgtgcctggtggtgaggtag

SEQ ID NO: 142763 - DNA, 4626 bp, synthetic construct
  misc_feature 1..4626: note = Description of Artificial Sequence: Synthetic coding sequence
  source 1..4626: mol_type = other DNA
atgaaggacaagcagaagaagaagaaggagaggacctgggccgaggccgcccggctggtgctggagaactacagtgatgcccccatgacccccaagcagatcctgcaggtgattgaggccgagggcctgaaggagatgaggagcggcaccagccccctggcctgcctgaatgccatgctgcacagcaacagccggggcggggagggcctcttctacaagctgcccggccgcatcagcctcttcaccctgaagaaggatgccctgcagtggagccgccacccagccaccgtggagggggaggagcctgaggacacagcagatgtggagagctgtggcagcaatgaggccagcacagtgtctggagaaaatgatgtgtccctggatgagaccagcagcaatgccagctgcagcacagagagccagagccggcccctgagcaacccccgggacagctaccgggccagcagccaggccaacaagcagaagaagaagacaggagtgatgctgccccgggtggtgctgacccccctgaaggtgaatggagcccacgtggagagcgccagcggcttcagcggctgccacgcagatggagagagcggcagccccagcagcagcagcagcggcagcctggccctgggcagcgctgccatccggggccaggccgaggtgacccaggaccctgcccccctgctgcggggcttcaggaagccagccaccggccagatgaagaggaacagaggagaggagattgactttgagaccccaggcagcatcctggtgaacaccaacctgcgggccctgatcaacagcaggaccttccacgccctgcccagccacttccagcagcagctgctcttcctgctgcctgaggtggaccggcaggtgggcacagatggcctgctgcggctgagcagcagcgccctgaacaatgagttcttcacccacgccgcccagagctggagggagcggctggctgatggagagttcacccatgagatgcaggtgcgcatccggcaggagatggagaaggagaagaaggtggagcagtggaaggagaagttctttgaggactactacggccagaagctgggcctgaccaaggaggagagcctgcagcagaatgtgggccaggaggaggccgagatcaagagcggcctgtgtgtgcctggagagagcgtgcgcatccagaggggccctgccacccggcagagagatggccacttcaagaagaggagcaggccagacctgcggacccgggcccggaggaacctgtacaagaagcaggagagcgagcaggccggcgtggccaaggatgccaagtctgtggccagtgatgtgcccctgtacaaggatggagaggccaagacagatcctgctggcctgagcagcccccacctgcccggcaccagcagcgctgccccagacctggagggccctgagttccctgtggagagcgtggccagccgcatccaggccgagccagacaacctggcccgggccagcgccagcccagaccgcatccccagcctgccccaggagaccgtggaccaggagcccaaggaccagaagaggaagagctttgagcaggccgccagcgccagcttccctgagaagaagccccggctggaggaccggcagagcttcaggaacaccatcgagagcgtgcacacagagaagccccagcccaccaaggaggagcccaaggtgccccccatccgcatccagctgagccgcatcaagccaccctgggtggtgaagggccagcccacctaccagatctgcccccgcatcatccccaccacagagagcagctgccggggctggacaggagcccggaccctggccgacatcaaggcccgggccctgcaggtgcggggggcccggggccaccactgccaccgggaggccgccaccacagccatcggcggcggcggcggccctgggggcggcggcggcggggccacagatgagggcggcggccggggcagcagcagtggagatggaggagaggcctgtggccaccctgagccccggggcggccccagcacccctgggaagtgcaccagtgacctgcagaggacccagctgctgcccccctaccccctgaatggagagcacacccaggccggcacagccatgagccgggcccggcgggaggacctgcccagcctgaggaaggaggagagctgcctgctgcagagggccaccgtgggcctgacagatggcctgggagatgccagccagctgcctgtggcccccaccggggaccagccctgccaggccctgcccctgctgagcagccagacctctgtggccgagcggctggtggagcagccccagctgcacccagatgtgaggacagaatgtgagagcggcaccacctcctgggagagtgatgatgaggagcagggccccaccgtgcctgctgacaatggccccatcctgagcctggtgggagatgacaccctggagaagggcaccggccaggccctggacagccaccccaccatgaaggaccctgtgaatgtgacccccagcagcaccccagagagcagccccacagactgcctgcagaacagagcctttgatgatgagctgggcctgggcggcagctgcccccccatgagggagagtgacacccggcaggagaacctgaagaccaaggccctggtgagcaacagcagcctgcactggatccccatccccagcaatgatgaggtggtgaagcagcccaagccagagagccgggagcacatccccagcgtggagccccaggtgggggaggagtgggagaaggccgcccccaccccaccagccctgcccggggacctgacagctgaggagggcctggaccccctggacagcctgaccagcctgtggacagtgcccagccggggcggcagtgacagcaatggcagctactgccagcaggtggacatcgagaagctgaagatcaacggggacagcgaggccctgagcccccatggagagagcacagacacagccagtgactttgagggccacctgacagaggacagcagcgaggccgacacccgggaggccgctgtgaccaagggcagctctgtggacaaggatgagaagcccaactggaaccagagcgcccccctgagcaaggtgaatggagacatgaggctggtgaccaggacagatggcatggtggccccccagagctgggtgtcccgggtgtgtgctgtgcggcagaagatcccagacagcctgctgctggccagcacagagtaccagcccagggctgtgtgcctgtccatgcctggcagctctgtggaggccaccaaccccctggtgatgcagctgctgcagggcagcctgcccctggagaaggtgctgcccccagcccatgatgacagcatgtctgagagcccccaggtgcccctgaccaaggaccagagccacggcagcctgaggatgggcagcctgcacggcctgggcaagaacagcggcatggtggatggcagcagccccagcagcctgcgggccctgaaggagcccctgctgcctgacagctgtgagaccggcaccggcctggccagaattgaggccacccaggcccctggggccccccagaagaactgcaaggctgtgcccagctttgacagcctgcaccctgtgaccaaccccatcaccagcagcaggaagctggaggagatggacagcaaggagcagttcagcagcttcagctgtgaggaccagaaggaggtgcgggccatgagccaggacagcaacagcaatgctgcccctgggaagagccctggggacctgaccaccagcaggaccccccgcttcagcagccccaacgtcatcagctttggacctgagcagacaggccgggccctgggggaccagagcaatgtgacaggccagggcaagaagctgtttggaagtggaaatgtggccgccaccctgcagaggcccaggcctgctgaccccatgcccctgcctgctgagatcccccctgtgttccccagcggcaagctgggccccagcaccaacagcatgtctgggggcgtgcagaccccccgggaggactgggcccccaagccccacgcctttgtgggctctgtgaagaatgagaagacctttgtgggcggccccctgaaggccaatgcagaaaataggaaggccaccggccacagccccctggagctggtgggccacctggagggcatgccctttgtgatggacctgcccttctggaagctgccccgggagcccgggaagggcctgtctgagcccctggagcccagcagcctgcccagccagctgagcatcaagcaggccttctacggcaagctgagcaagctgcagctgagcagcaccagcttcaactacagcagcagcagccccaccttccccaagggcctggccggctctgtggtgcagctgagccacaaggccaactttggagccagccacagcgccagcctgagcctgcagatgttcacagacagcagcacagtggagagcatcagcctgcagtgtgcctgcagcctgaaggccatgatcatgtgccagggctgtggggccttctgccatgatgactgcatcggccccagcaagctgtgtgtgctgtgcctggtggtgaggtag

SEQ ID NO: 142764 - DNA, 4626 bp, synthetic construct; identical to SEQ ID NO: 142763
  misc_feature 1..4626: note = Description of Artificial Sequence: Synthetic coding sequence
  source 1..4626: mol_type = other DNA

SEQ ID NO: 142765 - DNA, 4389 bp, synthetic construct
  misc_feature 1..4389: note = Description of Artificial Sequence: Synthetic coding sequence
  source 1..4389: mol_type = other DNA
atgctgtccttccccaacctgaaccaggtgctggagaactacagtgatgcccccatgacccccaagcagatcctgcaggtgattgaggccgagggcctgaaggagatgagcagcggcaccagccccctggcctgcctgaatgccatgctgcacagcaacagccggggcggggagggcctcttctacaagctgcccggccgcatcagcctcttcaccctgaagaaggatgccctgcagtggagccgccacccagccaccgtggagggggaggagcctgaggacacagcagatgtggagagctgtggcagcaatgaggccagcacagtgtctggagaaaatgatgtgtccctggatgagaccagcagcaatgccagctgcagcacagagagccagagccggcccctgagcaacccccgggacagctaccgggccagcagccaggccaacaagcagaagaagaagacaggagtgatgctgccccgggtggtgctgacccccctgaaggtgaatggagcccacgtggagagcgccagcggccagatgaagaggaacagaggagaggagattgactttgagaccccaggcagcatcctggtgaacaccaacctgcgggccctgatcaacagcaggaccttccacgccctgcccagccacttccagcagcagctgctcttcctgctgcctgaggtggaccggcaggtgggcacagatggcctgctgcggctgagcagcagcgccctgaacaatgagttcttcacccatgctgcccagagctggagggagcggctggctgatggagagttcacccatgagatgcaggtgcgcatccggcaggagatggagaaggagaagaaggtggagcagtggaaggagaagttctttgaggactactacggccagaagctgggcctgaccaaggaggagagcctgcagcagaatgtgggccaggaggaggccgagatcaagagcggcctgtgtgtgcctggagagagcgtgcgcatccagaggggccctgccacccggcagagagatggccacttcaagaagaggagcaggccagacctgcggacccgggcccggaggaacctgtacaagaagcaggagagcgagcaggccggcgtggccaaggatgccaagtctgtggccagtgatgtgcccctgtacaaggatggagaggccaagacagatcctgctggcctgagcagcccccacctgcccggcaccagcagcgctgccccagacctggagggccctgagttccctgtggagagcgtggccagccgcatccaggccgagccagacaacctggcccgggccagcgccagcccagaccgcatccccagcctgccccaggagaccgtggaccaggagcccaaggaccagaagaggaagagctttgagcaggccgccagcgccagcttccctgagaagaagccccggctggaggaccggcagagcttcaggaacaccattgaatctgtgcacacagagaagccccagcccaccaaggaggagcccaaggtgccccccatccgcatccagctgagccgcatcaagccaccctgggtggtgaagggccagcccacctaccagatctgcccccgcatcatccccaccacagagagcagctgccggggctggacaggagcccggaccctggccgacatcaaggcccgggccctgcaggtgcggggggcccggggccaccactgccaccgggaggccacagatgaaggaggcggccggggcagcagcagtggagatggaggagaggcctgtggccaccctgagccccggggcggccccagcaccccaggcaagtgcaccagtgacctgcagaggacccagctgctgcccccctaccccctgaatggagagcacacccaggccggcacagccatgagccgggcccggcgggaggacctgcccagcctgaggaaggaggagagctgcctgctgcagagggccaccgtgggcctgacagatggcctgggagatgccagccagctgcctgtggcccccactggagaccagccctgccaggccctgcccctgctgagcagccagacctctgtggccgagcggctggtggagcagccccagctgcacccagatgtgaggacagaatgtgagagcggcaccacctcctgggagagtgatgatgaggagcagggccccaccgtgcctgctgacaatggccccatcctgagcctggtgggagatgacaccctggagaagggcaccggccaggccctggacagccaccccaccatgaaggaccctgtgaatgtgacccccagcagcaccccagagagcagccccacagactgcctgcagaacagagcctttgatgatgagctgggcctgggcggcagctgcccccccatgagggagagtgacacccggcaggagaacctgaagaccaaggccctggtgagcaacagcagcctgcactggatccccatccccagcaatgatgaggtggtgaagcagcccaagccagagagccgggagcacatccccagcgtggagccccaggtgggggaggagtgggagaaggccgcccccaccccaccagccctgcccggggacctgacagctgaggagggcctggaccccctggacagcctgaccagcctgtggacagtgcccagcagaggaggcagtgacagcaatggcagctactgccagcaggtggacatcgagaagctgaagatcaatggagacagcgaggccctgagcccccacggggagagcacagacacagccagtgactttgagggccacctgacagaggacagcagcgaggccgacacccgggaggccgctgtgaccaagggcagctctgtggacaaggatgagaagcccaactggaaccagagcgcccccctgagcaaggtgaatggagacatgaggctggtgaccaggacagatggcatggtggccccccagagctgggtgtcccgggtgtgtgctgtgcggcagaagatcccagacagcctgctgctggccagcacagagtaccagcccagggctgtgtgcctgtccatgcctggcagctctgtggaggccaccaaccccctggtgatgcagctgctgcagggcagcctgcccctggagaaggtgctgcccccagcccatgatgacagcatgtctgagagcccccaggtgcccctgaccaaggaccagagccacggcagcctgaggatgggcagcctgcacggcctgggcaagaacagcggcatggtggatggcagcagccccagcagcctgcgggccctgaaggagcccctgctgcctgacagctgtgaaacaggaacaggcctggcccgcatcgaggccacccaggcccctggggccccccagaagaactgcaaggctgtgcccagctttgacagcctgcaccctgtgaccaaccccatcaccagcagcaggaagctggaggagatggacagcaaggagcagttcagcagcttcagctgtgaggaccagaaggaggtgcgggccatgagccaggacagcaacagcaatgctgcccctgggaagagccctggggacctgaccaccagcaggaccccccgcttcagcagccccaacgtcatcagctttggacctgagcagacaggccgggccctgggggaccagagcaatgtgacaggccagggcaagaagctgtttggcagcggaaatgtggccgccaccctgcagaggcccaggcctgctgaccccatgcccctgcctgctgagatcccccctgtgttccccagcggcaagctgggccccagcaccaacagcatgtctggaggagtgcagaccccccgggaggactgggcccccaagccccacgcctttgtgggctctgtgaagaatgagaagacctttgtgggcggccccctgaaggccaatgctgagaacaggaaggccaccggccacagccccctggagctggtgggccacctggagggcatgccctttgtgatggacctgcccttctggaagctgccccgggagcccgggaagggcctgtctgagcccctggagcccagcagcctgcccagccagctgagcatcaagcaggccttctacggcaagctgagcaagctgcagctgagcagcaccagcttcaactacagcagcagcagccccaccttccccaagggcctggccggctctgtggtgcagctgagccacaaggccaactttggagccagccacagcgccagcctgagcctgcagatgttcacagacagcagcacagtggagagcatcagcctgcagtgtgcctgcagcctgaaggccatgatcatgtgccagggctgtggggccttctgccatgatgactgcatcggccccagcaagctgtgtgtgctgtgcctggtggtgaggtag

SEQ ID NO: 142766 - DNA, 4626 bp, synthetic construct; identical to SEQ ID NO: 142763
  misc_feature 1..4626: note = Description of Artificial Sequence: Synthetic coding sequence
  source 1..4626: mol_type = other DNA

SEQ ID NO: 142767 - DNA, 225 bp, synthetic construct
  misc_feature 1..225: note = Description of Artificial Sequence: Synthetic coding sequence
  source 1..225: mol_type = other DNA
tgatgggccgaggccgcccggctggtgctggagaactacagtgatgcccccatgacccccaagcagatcctgcaggtgattgaagctgagggcctgaaggagatgaggagcggcaccagccccctggcctgcctgaatgccatgctgcacagcaacagcagaggaggagagggcctcttctacaagctgcccggccgcatcagcctcttcaccctgaaggtgtag

SEQ ID NO: 142768 - DNA, 258 bp, synthetic construct
  misc_feature 1..258: note = Description of Artificial Sequence: Synthetic coding sequence
  source 1..258: mol_type = other DNA
atgaaggacaagcagaagaagaagaaggagaggacctgggccgaggccgcccggctggtgctggagaactacagtgatgcccccatgacccccaagcagatcctgcaggtgattgaggccgagggcctgaaggagatgaggagcggcaccagccccctggcctgcctgaatgccatgctgcacagcaacagccggggcggggagggcctcttctacaagctgcccggccgcatcagcctcttcaccctgaaggtgtag

SEQ ID NO: 142769 - DNA, 255 bp, synthetic construct
  misc_feature 1..255: note = Description of Artificial Sequence: Synthetic coding sequence
  source 1..255: mol_type = other DNA
atgaaggacaagcagaagaagaagaaggagaggacctgggccgaggccgcccggctggtgctggagaactacagtgatgcccccatgacccccaagcagatcctgcaggtgattgaggccgagggcctgaaggagatgagcggcaccagccccctggcctgcctgaatgccatgctgcacagcaacagcagaggaggagagggcctcttctacaagctgcccggccgcatcagcctcttcaccctgaagaggtag

SEQ ID NO: 142770 - DNA, 2757 bp, synthetic construct
  misc_feature 1..2757: note = Description of Artificial Sequence: Synthetic coding sequence
  source 1..2757: mol_type = other DNA
atgaagaggaccaagtgtgccgacattgatgtggagaccccagacagcatcctggtgaacaccaacctgcgggccctgatcaacaagcacaccttctctgtgctgcccggggactgccagcagaggctgctgctgctgctgcctgaggtggaccggcaggtgggcccagatggcctgatgaagctgaatggaagtgccctgaacaatgagttcttcaccagcgctgcccagggctggaaggagcggctgtctgagggggagttcaccccagagatgcaggtgcgcatccggcaggagattgagaaggagaagaaggtggagccctggaaggagcagttctttgagagctactacggccagagcagcggcctgagcctggaggacagcaagaagctgacagccagccccagcgaccccaaggtgaagaagaccccagctgagcagcccaagtccatgcctgtgtctgaggccagcctcatccgcatcgtgcctgtggtgtcccagagcgagtgcaaggaggaggccctgcagatgagcagccctggcaggaaggaggagtgtgagagccagggcgaggtgcagcccaacttcagcaccagcagcgagcccctgctgagcagcgccctgaacacccatgagctgagcagcatcctgcccatcaagtgccccaaggatgaggacctgctggagcagaagcctgtgaccagcgctgagcaggagagcgagaagaaccacctgaccacagccagcaactacaacaagtctgagagccaggagagcctggtgaccagccccagcaagcccaagagccctggggtggagaagcccatcgtgaagcccacagctggggccggcccccaggagaccaacatgaaggagcccctggccaccctggtggaccagagccctgagagcctgaagaggaagagcagcctgacccaggaggaggcccctgtgtcctgggagaagaggccccgggtgacagaaaatcggcagcaccagcagcccttccaggtgagcccccagcccttcctgaacagaggagaccgcatccaggtgaggaaggtgccccccctgaagatccctgtgagccgcatcagccccatgcccttccaccccagccaggtgagcccccgggcccgcttccctgtgtccatcaccagccccaacagaactggagcccggaccctggccgacatcaaggccaaggcccagctggtgaaggcccagagagctgctgctgctgctgctgctgctgctgctgctgctgcctctgtgggcggcaccatccctggccctggccctgggggcggccagggccctggagagggcggggagggccagacagcccggggcggcagccctggcagtgacagagtgtctgaaacaggcaagggccccaccctggagctggccggcaccggcagccggggcggcacccgggagctgctgccctgtggccctgagacccagccccagagcgagaccaagaccacccccagccaggcccagccccacagcgtgtctggggcccagctgcagcagaccccacctgtgccccccaccccagctgtgtctggggcctgcacctctgtgcccagccctgcccacatcgagaagctggacaatgagaagctgaaccccacccgggccacagccaccgtggcctctgtgagccacccccagggccccagcagctgccggcaggagaaggcccccagccccaccggcttccagctggaggacatcagcaccagccagcgcttcatgctgggctttgctggccgccgcaccagcaagccagccatggccggccactacctgctgaacatcagcacctacggccggggcagcgagagcttccggaggacccacagcgtgaaccctgaggaccgcttctgcctgagcagccccacagaggccctgaagatgggctacacagactgcaagaatgccactggagagagcagcagcagcaaagaagatgacacagatgaggagagcactggagatgagcaggagagcgtgacagtgaaggaggagccccaggtgtcccagagcgctgggaagggggacaccagcagcggcccccacagccgggagaccctgagcaccagtgactgcctggccagcaagaatgtgaaggccgagatccccctgaatgagcagaccaccctgagcaaagaaaactacctgttcacccggggccagacctttgatgagaagaccctggcccgggacctgatccaggccgcccagaagcagatggcccatgctgtgcggggcaaggccatccgcagcagccctgagctgttcagcagcacagtgctgcccctgcctgctgacagccccacccaccagcccctgctgctgccccccctgcagacccccaagctgtatggcagccccacccagatcggccccagctaccggggcatgatcaacgtgtccaccagcagtgacatggaccacaacagcgctgtgcccggcagccaggtgagcagcaatgtgggagatgtgatgtccttctctgtgacagtgaccaccatcccagccagccaggccatgaaccccagcagccacggccagaccatccctgtgcaggccttctctgaagaaaattccattgagggcacccccagcaagtgctactgccgcctgaaggccatgatcatgtgcaagggctgtggggccttctgccatgatgactgcatcggccccagcaagctgtgtgtgtcctgcctggtggtgaggtag

SEQ ID NO: 142771 - DNA, 4224 bp, synthetic construct
  misc_feature 1..4224: note = Description of Artificial Sequence: Synthetic coding sequence
  source 1..4224: mol_type = other DNA
atgagccacaaggagatcctgcaggtgatccagcgggagggcctgaaggagatcagcagcggcaccagccccctggcctgcctgaatgccatgctgcacaccaacagcagaggagaggagggcatcttctacaaggtgcccggccgcatgggcgtgtacaccctgaagaaggatgtgcctgatggagtgaaggagctgtctgagggcagcgaggagagcagtgatggccagagcgacagccagagcagcgagaacagcagcagcagcagtgatggcggcagcaacaaggagggcaagaagagccgctggaagaggaaggtgagcagcagcagcccccagagcggctgccccagccccaccatcccagctgggaaggtgatcagccccagccagaagcacagcaagaaggccctgaagcaggccctgaagcagcagcagcagaagaagcagcagcagcagtgccggcccagcatcagcatcagcagcaaccagcacctgagcctgaagacagtgaaggccgccagtgacagcgtgcctgccaagccagccacctgggagggcaagcagagtgatggccagacaggcagcccccagaacagcaacagcagcttcagcagctctgtgaaggtggagaacaccctgctgggcctgggcaagaagagcttccagaggtctgagcggctgcacacccggcagatgaagaggaccaagtgtgccgacattgatgtggagaccccagacagcatcctggtgaacaccaacctgcgggccctgatcaacaagcacaccttctctgtgctgcccggggactgccagcagaggctgctgctgctgctgcctgaggtggaccggcaggtgggcccagatggcctgatgaagctgaatggaagtgccctgaacaatgagttcttcaccagcgctgcccagggctggaaggagcggctgtctgagggggagttcaccccagagatgcaggtgcgcatccggcaggagattgagaaggagaagaaggtggagccctggaaggagcagttctttgagagctactacggccagagcagcggcctgagcctggaggacagcaagaagctgacagccagccccagcgaccccaaggtgaagaagaccccagctgagcagcccaagtccatgcctgtgtctgaggccagcctcatccgcatcgtgcctgtggtgtcccagagcgagtgcaaggaggaggccctgcagatgagcagccctggcaggaaggaggagtgtgagagccagggcgaggtgcagcccaacttcagcaccagcagcgagcccctgctgagcagcgccctgaacacccatgagctgagcagcatcctgcccatcaagtgccccaaggatgaggacctgctggagcagaagcctgtgaccagcgctgagcaggagagcgagaagaaccacctgaccacagccagcaactacaacaagtctgagagccaggagagcctggtgaccagccccagcaagcccaagagccctggggtggagaagcccatcgtgaagcccacagctggggccggcccccaggagaccaacatgaaggagcccctggccaccctggtggaccagagccctgagagcctgaagaggaagagcagcctgacccaggaggaggcccctgtgtcctgggagaagaggccccgggtgacagaaaatcggcagcaccagcagcccttccaggtgagcccccagcccttcctgaacagaggagaccgcatccaggtgaggaaggtgccccccctgaagatccctgtgagccgcatcagccccatgcccttccaccccagccaggtgagcccccgggcccgcttccctgtgtccatcaccagccccaacagaactggagcccggaccctggccgacatcaaggccaaggcccagctggtgaaggcccagagagctgctgctgctgctgctgctgctgctgctgctgctgcctctgtgggcggcaccatccctggccctggccctgggggcggccagggccctggagagggcggggagggccagacagcccggggcggcagccctggcagtgacagagtgtctgaaacaggcaagggccccaccctggagctggccggcaccggcagccggggcggcacccgggagctgctgccctgtggccctgagacccagccccagagcgagaccaagaccacccccagccaggcccagccccacagcgtgtctggggcccagctgcagcagaccccacctgtgccccccaccccagctgtgtctggggcctgcacctctgtgcccagccctgcccacatcgagaagctggacaatgagaagctgaaccccacccgggccacagccaccgtggcctctgtgagccacccccagggccccagcagctgccggcaggagaaggcccccagccccaccggccctgccctgatcagcggggccagccctgtgcactgtgccgcagatggcaccgtggagctgaaggccggccccagcaagaacatccccaaccccagcgccagcagcaagacagatgcctctgtgcctgtggccgtgacccccagccccctgaccagcctgctgaccacagccaccctggagaagctgcctgtgccccaggtgtctgccaccacagccccagctggcagcgccccacccagcagcaccctgcctgctgccagcagcctgaagaccccaggcaccagcctgaacatgaatggccccaccctgcggcccaccagcagcatcccagccaacaaccccctggtgacccagctgctgcagggcaaggatgtgcccatggagcagatcctgcccaagcccctgaccaaggtggagatgaagacagtgcccctgacagccaaggaggagcggggcatgggcgccctgattgccaccaacaccacagagaacagcacccgggaggaggtgaatgaaaggcagagccacccagccacccagcagcagctgggcaagaccctgcagagcaagcagctgccccaggtgccccggcccctgcagctgttcagcgccaaggagctgcgggacagcagcattgacacccaccagtaccacgagggcctgagcaaggccacccaggaccagatcctgcagaccctcatccagagggtgcggcggcagaacctgctgtctgtggtgccccccagccagttcaactttgcccacagcggcttccagctggaggacatcagcaccagccagcgcttcatgctgggctttgctggaagaaggaccagcaagccagccatggccggccactacctgctgaacatcagcacctacggccggggcagcgagagcttccggaggacccacagcgtgaacccagaagatcgcttctgcctgagcagccccacagaggccctgaagatgggctacacagactgcaagaatgccaccggggagagcagcagcagcaaggaggatgacacagatgaggagagcactggagatgagcaggagagcgtgacagtgaaggaggagccccaggtgtcccagagcgctggaaaaggagacaccagcagcggcccccacagccgggagaccctgagcaccagtgactgcctggccagcaagaatgtgaaggccgagatccccctgaatgagcagaccaccctgagcaaggagaactacctgttcacccggggccagacctttgatgagaagaccctggcccgggacctgatccaggccgcccagaagcagatggcccatgctgtgcggggcaaggccatccgcagcagccctgagctgttcagcagcacagtgctgcccctgcctgctgacagccccacccaccagcccctgctgctgccccccctgcagacccccaagctgtatggcagccccacccagatcggccccagctaccggggcatgatcaacgtgtccaccagcagtgacatggaccacaacagcgctgtgcccggcagccaggtgagcagcaatgtgggagatgtgatgtccttctctgtgacagtgaccaccatcccagccagccaggccatgaaccccagcagccacggccagaccatccctgtgcaggccttcagcgaggagaacagcattgagggcacccccagcaagtgctactgccgcctgaaggccatgatcatgtgcaagggctgtggggccttctgccatgatgactgcatcggccccagcaagctgtgtgtgtcctgcctggtggtgaggtag

SEQ ID NO: 142772 - DNA, 2757 bp, synthetic construct; identical to SEQ ID NO: 142770
  misc_feature 1..2757: note = Description of Artificial Sequence: Synthetic coding sequence
  source 1..2757: mol_type = other DNA

SEQ ID NO: 142773 - DNA, 4308 bp, synthetic construct
  misc_feature 1..4308: note = Description of Artificial Sequence: Synthetic coding sequence
  source 1..4308: mol_type = other DNA
atgagggagaagggccgcaggaagaagggccgcacctgggccgaggccgccaagacagtgctggagaagtaccccaacacccccatgagccacaaggagatcctgcaggtgatccagcgggagggcctgaaggagatccgcagcggcaccagccccctggcctgcctgaatgccatgctgcacaccaacagcagaggagaggagggcatcttctacaaggtgcccggccgcatgggcgtgtacaccctgaagaaggatgtgcctgatggagtgaaggagctgtctgagggcagcgaggagagcagtgatggccagagcgacagccagagcagcgagaacagcagcagcagcagtgatggcggcagcaacaaggagggcaagaagagccgctggaagaggaaggtgagcagcagcagcccccagagcggctgccccagccccaccatcccagctgggaaggtgatcagccccagccagaagcacagcaagaaggccctgaagcaggccctgaagcagcagcagcagaagaagcagcagcagcagtgccggcccagcatcagcatcagcagcaaccagcacctgagcctgaagacagtgaaggccgccagtgacagcgtgcctgccaagccagccacctgggagggcaagcagagtgatggccagacaggcagcccccagaacagcaacagcagcttcagcagctctgtgaaggtggagaacaccctgctgggcctgggcaagaagagcttccagaggtctgagcggctgcacacccggcagatgaagaggaccaagtgtgccgacattgatgtggagaccccagacagcatcctggtgaacaccaacctgcgggccctgatcaacaagcacaccttctctgtgctgcccggggactgccagcagaggctgctgctgctgctgcctgaggtggaccggcaggtgggcccagatggcctgatgaagctgaatggaagtgccctgaacaatgagttcttcaccagcgctgcccagggctggaaggagcggctgtctgagggggagttcaccccagagatgcaggtgcgcatccggcaggagattgagaaggagaagaaggtggagccctggaaggagcagttctttgagagctactacggccagagcagcggcctgagcctggaggacagcaagaagctgacagccagccccagcgaccccaaggtgaagaagaccccagctgagcagcccaagtccatgcctgtgtctgaggccagcctcatccgcatcgtgcctgtggtgtcccagagcgagtgcaaggaggaggccctgcagatgagcagccctggcaggaaggaggagtgtgagagccagggcgaggtgcagcccaacttcagcaccagcagcgagcccctgctgagcagcgccctgaacacccatgagctgagcagcatcctgcccatcaagtgccccaaggatgaggacctgctggagcagaagcctgtgaccagcgctgagcaggagagcgagaagaaccacctgaccacagccagcaactacaacaagtctgagagccaggagagcctggtgaccagccccagcaagcccaagagccctggggtggagaagcccatcgtgaagcccacagctggggccggcccccaggagaccaacatgaaggagcccctggccaccctggtggaccagagccctgagagcctgaagaggaagagcagcctgacccaggaggaggcccctgtgtcctgggagaagaggccccgggtgacagaaaatcggcagcaccagcagcccttccaggtgagcccccagcccttcctgaacagaggagaccgcatccaggtgaggaaggtgccccccctgaagatccctgtgagccgcatcagccccatgcccttccaccccagccaggtgagcccccgggcccgcttccctgtgtccatcaccagccccaacagaactggagcccggaccctggccgacatcaaggccaaggcccagctggtgaaggcccagagagctgctgctgctgctgctgctgctgctgctgctgctgcctctgtgggcggcaccatccctggccctggccctgggggcggccagggccctggagagggcggggagggccagacagcccggggcggcagccctggcagtgacagagtgtctgaaacaggcaagggccccaccctggagctggccggcaccggcagccggggcggcacccgggagctgctgccctgtggccctgagacccagccccagagcgagaccaagaccacccccagccaggcccagccccacagcgtgtctggggcccagctgcagcagaccccacctgtgccccccaccccagctgtgtctggggcctgcacctctgtgcccagccctgcccacatcgagaagctggacaatgagaagctgaaccccacccgggccacagccaccgtggcctctgtgagccacccccagggccccagcagctgccggcaggagaaggcccccagccccaccggccctgccctgatcagcggggccagccctgtgcactgtgccgcagatggcaccgtggagctgaaggccggccccagcaagaacatccccaaccccagcgccagcagcaagacagatgcctctgtgcctgtggccgtgacccccagccccctgaccagcctgctgaccacagccaccctggagaagctgcctgtgccccaggtgtctgccaccacagccccagctggcagcgccccacccagcagcaccctgcctgctgccagcagcctgaagaccccaggcaccagcctgaacatgaatggccccaccctgcggcccaccagcagcatcccagccaacaaccccctggtgacccagctgctgcagggcaaggatgtgcccatggagcagatcctgcccaagcccctgaccaaggtggagatgaagacagtgcccctgacagccaaggaggagcggggcatgggcgccctgattgccaccaacaccacagagaacagcacccgggaggaggtgaatgaaaggcagagccacccagccacccagcagcagctgggcaagaccctgcagagcaagcagctgccccaggtgccccggcccctgcagctgttcagcgccaaggagctgcgggacagcagcattgacacccaccagtaccacgagggcctgagcaaggccacccaggaccagatcctgcagaccctcatccagagggtgcggcggcagaacctgctgtctgtggtgccccccagccagttcaactttgcccacagcggcttccagctggaggacatcagcaccagccagcgcttcatgctgggctttgctggaagaaggaccagcaagccagccatggccggccactacctgctgaacatcagcacctacggccggggcagcgagagcttccggaggacccacagcgtgaacccagaagatcgcttctgcctgagcagccccacagaggccctgaagatgggctacacagactgcaagaatgccaccggggagagcagcagcagcaaggaggatgacacagatgaggagagcactggagatgagcaggagagcgtgacagtgaaggaggagccccaggtgtcccagagcgctggaaaaggagacaccagcagcggcccccacagccgggagaccctgagcaccagtgactgcctggccagcaagaatgtgaaggccgagatccccctgaatgagcagaccaccctgagcaaggagaactacctgttcacccggggccagacctttgatgagaagaccctggcccgggacctgatccaggccgcccagaagcagatggcccatgctgtgcggggcaaggccatccgcagcagccctgagctgttcagcagcacagtgctgcccctgcctgctgacagccccacccaccagcccctgctgctgccccccctgcagacccccaagctgtatggcagccccacccagatcggccccagctaccggggcatgatcaacgtgtccaccagcagtgacatggaccacaacagcgctgtgcccggcagccaggtgagcagcaatgtgggagatgtgatgtccttctctgtgacagtgaccaccatcccagccagccaggccatgaaccccagcagccacggccagaccatccctgtgcaggccttcagcgaggagaacagcattgagggcacccccagcaagtgctactgccgcctgaaggccatgatcatgtgcaagggctgtggggccttctgccatgatgactgcatcggccccagcaagctgtgtgtgtcctgcctggtggtgaggtag

SEQ ID NO: 142774 - DNA, 6747 bp, synthetic construct
  misc_feature 1..6747: note = Description of Artificial Sequence: Synthetic coding sequence
  source 1..6747: mol_type = other DNA
atgaaggacaagaggaagaagaaggacaggacctgggccgaggccgcccggctggccctggagaagcaccccaacagccccatgacagccaagcagatcctggaggtgatccagaaggagggcctgaaggagaccagcggcaccagccccctggcctgcctgaatgccatgctgcacaccaacaccagaattggagatggcaccttcttcaagatccctgggaagagcggcctgtatgccctgaagaaggaggagagcagctgcccagcagatggcaccctggacctggtgtgtgagagcgagctggatggaacagacatggccgaggccaatgcccatggagaggagaatggagtgtgcagcaagcaggtgacagatgaggccagcagcacccgggacagcagcctgaccaacacagctgtgcagagcaagctggtgagcagcttccagcagcacaccaagaaggccctgaagcaggccctgcggcagcagcagaagagaagaaatggagtgtccatgatggtgaacaagacagtgccccgggtggtgctgacccccctgaaggtgtctgatgagcagagcgacagccccagcggcagcgagagcaagaatggagaggccgacagcagtgacaaggagatgaagcacggccagaagagccccaccgggaagcagaccagccagcacctgaagaggctgaagaagagcggcctgggccacctgaagtggaccaaggcagaagatattgatattgagaccccaggcagcatcctggtgaacaccaacctgcgggccctgatcaacaagcacacctttgccagcctgccccagcacttccagcagtacctgctgctgctgctgcctgaggtggaccggcagatgggcagtgatggcatcctgcggctgagcaccagcgccctgaacaatgagttctttgcctatgctgcccagggctggaagcagaggctggccgagggggagttcaccccagagatgcagctgcgcatccggcaggagattgagaaggagaagaagacagagccctggaaggagaagttctttgagcgcttctacggggagaagctgggcatgagccgggaggagagcgtgaagctgaccaccggccccaacaatgctggggcccagagcagcagcagctgtggcaccagcggcctgcctgtgtctgcccagacagccctggccgagcagcagcccaagtccatgaagagccctgccagccctgagcccggcttctgtgccaccctgtgccccatggtggagatcccccccaaggacatcatggccgagctggagagcgaggacatcctgatccctgaggagagcgtcatccaggaggagattgctgaggaggtggagaccagcatctgtgagtgccaggatgagaaccacaagaccatccctgagttcagcgaggaggccgagagcctgaccaacagccatgaggagccccagatcgcccctcctgaggacaacctggagagctgtgtgatgatgaatgatgtgctggagaccctgccccacatcgaggtgaagattgagggcaagtctgagagcccccaggaggagatgacagtggtgattgaccagctggaggtgtgtgacagcctcatccccagcaccagctccatgacccacgtgtctgacacagagcacaaggagagcgagacagctgtggagaccagcacccccaagatcaagacaggcagcagcagcctggagggccagttccccaatgaaggcatcgccatcgacatggagctgcagagcgaccctgaggagcagctgtctgaaaatgcctgcatcagcgagaccagcttcagcagcgagagccctgagggcgcctgcaccagcctgcccagccctggaggagagacccagagcaccagcgaggagagctgcaccccagccagcctggagaccaccttctgcagcgaggtgagcagcacagaaaatacagacaagtacaaccagaggaacagcacagatgagaacttccacgccagcctgatgtctgagatcagccccatcagcaccagccctgagatcagcgaggccagcctgatgagcaacctgcccctgaccagcgaggccagccctgtgagcaacctgcccctgaccagcgagaccagccccatgtctgacctgcccctgaccagcgagaccagctctgtgtcctccatgctgctgaccagcgagaccacctttgtgagcagcctgcccctgcccagcgagaccagccccatcagcaacagcagcatcaatgaaagaatggcccaccagcagaggaagagccccagcgtgtctgaggagcccctgagcccccagaaggatgagagcagcgccacagccaagcccctgggggagaacctgaccagccagcagaagaacctgagcaacaccccagagcccatcatcatgagcagcagcagcatcgcccctgaggccttccccagcgaggacctgcacaacaagaccctgagccagcagacctgcaagagccacgtggacacagagaagccctacccagccagcatccctgagctggccagcacagagatgatcaaggtgaagaaccacagcgtgctgcagaggacagagaagaaggtgctgcccagccccctggagctgagcgtcttcagcgagggcacagacaacaagggaaatgagctgcccagcgccaagctgcaggacaagcagtacatcagctctgtggacaaggcccccttcagcgagggcagcaggaacaagacccacaagcagggcagcacccagagccggctggagaccagccacaccagcaagagcagcgagcccagcaagagcccagatggcatcagaaatgaaagccgggacagcgagatcagcaagaggaagacagctgagcagcacagctttggcatctgcaaggagaagagggccagaattgaagatgaccagagcaccaggaacatcagcagcagcagccccccagagaaggagcagcccccccgggaggagccccgggtgccccccctgaagatccagctgagcaagattggcccccccttcatcatcaagagccagcctgtgtccaagccagagagccgggccagcaccagcacctctgtgtctgggggcagaaatactggagcccggaccctggccgacatcaaggcccgggcccagcaggcccgggcccagcgggaggccgctgctgctgctgctgtggccgctgctgccagcatcgtgtctggggccatgggcagccctggagagggcggcaagaccaggaccctggcccacatcaaggagcagaccaaggccaagctgtttgccaagcaccaggcccgggcccacctgttccagaccagcaaggagacccggctgcccccacccctgagcagcaaggagggcccccccaacctggaggtgagcagcaccccagagaccaagatggagggcagcactggagtcatcatcgtgaaccccaactgccgcagccccagcaacaagagcgcccacctgcgggagaccaccaccgtgctgcagcagagcctgaaccccagcaagctgcctgagacagccacagacctgtctgtgcacagcagtgatgagaacatccctgtgagccacctgtctgagaagatcgtgagcagcaccagcagcgagaacagctctgtgcccatgctgttcaacaagaacagcgtgcctgtgtctgtgtgcagcacagccatcagcggggccatcaaggagcacccctttgtgtcctctgtggacaagagctctgtgctgatgtctgtggacagcgccaacaccaccatcagcgcctgcaacatctccatgctgaagaccatccagggcacagacaccccctgcatcgccatcatccccaagtgcatcgagagcacccccatcagcgccaccacagagggcagcagcatcagcagctccatggatgacaagcagctgctgatcagcagcagcagcgccagcaacctggtgtccacccagtacacctctgtgcccacccccagcatcggcaacaacctgcccaacctgagcaccagctctgtgctgatcccccccatgggcatcaacaaccgcttccccagcgagaagatcgccatccctggcagcgaggagcaggccaccgtgtccatgggcaccaccgtgcgggccgccctgagctgcagcgacagcgtggccgtgacagacagcctggtggcccaccccaccgtggccatgttcaccggcaacatgctgaccatcaacagctatgacagcccccccaagctgtctgctgagagcctggacaagaacagcggccccaggaacagagctgacaacagcggcaagccccagcagcccccaggcggctttgccccagctgccatcaacagaagcatcccctgcaaggtgattgtggaccacagcaccaccctgaccagcagcctgagcctgactgtgtctgtggagagcagcgaggccagcctggacctgcagggccggcctgtgaggacagaggcctctgtgcagcctgtggcctgcccccaggtgtctgtcatcagcaggcctgagcctgtggccaatgaaggaattgaccacagcagcaccttcatcgccgccagcgctgccaagcaggacagcaagaccctgcctgccacctgcaccagcctgcgggagctgcccctggtgcctgacaagctgaatgagcccacagcccccagccacaactttgctgagcaggcccggggccctgcccccttcaagtctgaggccgacaccacctgcagcaaccagtacaaccccagcaaccgcatctgctggaatgatgatggcatgaggagcacaggccagcccctggtgacccacagcggcagcagcaagcagaaggagtacctggagcagagctgccccaaggccatcaagacagagcacgccaactacctgaatgtgtctgagctgcaccccaggaacctggtgaccaacgtggccctgcctgtgaagtctgagctgcatgaagctgacaagggcttcaggatggacacagaggacttccctggccctgagctgcccccacctgctgctgagggcgccagctctgtgcagcagacccagaacatgaaggccagcaccagcagccccatggaggaggccatcagcctggccacagatgccctgaagagggtgcctggagctggcagcagcggctgccgcctgagctctgtggaggccaacaaccccctggtgacccagctgctgcagggcaacctgcccctggagaaggtgctgccccagccccggctgggcgccaagctggagatcaaccggctgcccctgcccctgcagaccacctctgtgggcaagacagcccctgagagaaatgtggagatcccccccagcagccccaacccagatggcaagggctacctggccggcaccctggcccccctgcagatgaggaagcgggagaaccaccccaagaagagggtggccaggacagtgggggagcacacccaggtgaagtgtgagcccgggaagctgctggtggagccagatgtgaagggcgtgccctgtgtgatcagcagcggcatcagccagctgggccacagccagcccttcaagcaggagtggctgaacaagcacagcatgcagaaccgcatcgtgcacagccctgaggtgaagcagcagaagaggctgctgcccagctgcagcttccagcagaacctcttccacgtggacaagaatggaggcttccacacagatgctggcaccagccaccggcagcagttctaccagatgcctgtggccgcccggggccccatccccacagctgccctgctgcaggccagcagcaagacccctgtgggctgcaatgcctttgccttcaacagacacctggagcagaagggcctgggggaggtgtccctgagcagcgccccccaccagctgcggctggccaacatgctgagccccaacatgcccatgaaggagggagatgaggtgggcggcacagcccacaccatgcccaacaaggccctggtgcaccccccacctcctcctcctcctcctcctcctccacccctggccctgcccccacctcctcctcctcctccacccctgcccccacccctgcccaatgctgaggtgcccagcgaccagaagcagccccctgtgaccatggagaccaccaagaggctgtcctggccccagagcacaggcatctgcagcaacatcaagtctgagcccctgagctttgaggagggcctgagcagcagctgtgagctgggcatgaagcaggtgtcctatgaccagaatgagatgaaggagcagctgaaggcctttgccctgaagtctgctgacttcagcagctacctgctgtctgagccccagaagcccttcacccagctggccgcccagaagatgcaggtgcagcagcagcagcagctgtgtggcaactaccccaccatccacttcggcagcaccagcttcaagagagctgccagcgccatcgagaagagcatcggcatcctgggcagcggcagcaacccagccaccggcctgagcggccagaatgcccagatgcctgtgcagaactttgctgacagcagcaatgctgatgagctggagctgaagtgcagctgccgcctgaaggccatgattgtgtgcaagggctgtggggccttctgccatgatgactgcatcggccccagcaagctgtgtgtggcctgcctggtggtgaggtag

SEQ ID NO: 142775 - DNA, 2307 bp, synthetic construct
  misc_feature 1..2307: note = Description of Artificial Sequence: Synthetic coding sequence
  source 1..2307: mol_type = other DNA
atgaatggagacagcagagctgctgtggtgaccagccccccacccaccacagccccccacaaggagcgctactttgacagagtggatgagaacaaccctgagtacctgcgggagaggaacatggccccagacctgcggcaggacttcaacatgatggagcagaagaagagggtgtccatgatcctgcagagccctgccttctgtgaggagctggagagcatgatccaggagcagttcaagaagggcaagaaccccaccggcctgctggccctgcagcagattgctgacttcatgaccaccaacgtgcccaacgtgtacccagctgccccccagggcggcatggccgccctgaacatgagcctgggcatggtgacccctgtgaatgacctgcggggcagtgacagcatcgcctatgacaagggggagaagctgctgcgctgcaagctggccgccttctaccgcctggccgacctgtttggctggagccagctgatctacaaccacatcaccaccagggtgaacagcgagcaggagcacttcctgattgtgcccttcggcctgctgtacagcgaggtgacagccagcagcctggtgaagatcaacctgcagggcgacatcgtggaccggggcagcaccaacctgggcgtgaaccaggccggcttcaccctgcacagcgccatctatgctgcccggccagatgtgaagtgtgtggtgcacatccacaccccagctggagctgctgtgtctgccatgaagtgtggcctgctgcccatcagccctgaggccctgagcctgggggaggtggcctaccatgactaccacggcatcctggtggatgaggaggagaaggtgctgatccagaagaacctgggccccaagagcaaggtgctgatcctgaggaaccacggcctggtgtctgtgggggagagcgtggaggaggccttctactacatccacaacctggtggtggcctgtgagatccaggtgaggaccctggccagcgctgggggccctgacaacctggtgctgctgaaccctgagaagtacaaggccaagagccgcagccctggcagccctgtgggggagggcaccggcagcccccccaagtggcagatcggggagcaggagtttgaggccctgatgaggatgctggacaacctgggctacagaacaggctacccctaccgctacccagccctgcgggagaagagcaagaagtacagtgatgtggaggtgcctgcctctgtgacaggctacagctttgccagtgatggagacagcggcacctgcagccccctgcggcacagcttccagaagcagcagcgggagaagacccgctggctgaacagcggcagaggagatgaggccagcgaggagggccagaatggcagcagccccaagagcaagaccaaggtgtggaccaacatcacccatgaccacgtgaagcccctgctgcagagcctgagcagcggcgtgtgtgtgcccagctgcatcaccaactgcctgtggaccaaggaggatggccacaggaccagcaccagcgctgtgcccaacctgtttgtgcccctgaacaccaaccccaaggaggtgcaggagatgaggaacaagatccgggagcagaacctgcaggacatcaagacagctggcccccagagccaggtgctgtgtggggtggtgatggacaggagcctggtgcagggcgagctggtgacagccagcaaggccatcatcgagaaggagtaccagccccacgtgattgtgtccaccaccggccccaaccccttcaccaccctgacagaccgggagctggaggagtacagaagagaggtggagaggaagcagaagggcagcgaggagaacctggatgaggcccgggagcagaaggagaagagccccccagaccagcctgctgtgccccaccccccacccagcacccccatcaagctggaggaggacctggtgcctgagcccaccactggagatgacagtgatgctgccaccttcaagcccaccctgcctgacctgagcccagatgagcccagcgaggccctgggcttccccatgctggagaaggaggaggaggcccaccggccccccagccccacagaggcccccacagaggccagccctgagcccgccccagaccctgcccctgtggccgaggaggccgcccccagcgctgtggaggagggcgctgctgctgaccccggcagtgatggcagccctgggaagagccccagcaagaagaagaagaagttccgcacccccagcttcctgaagaagagcaagaagaagagtgacagctag

SEQ ID NO: 142776 - DNA, 1989 bp, synthetic construct
  misc_feature 1..1989: note = Description of Artificial Sequence: Synthetic coding sequence
  source 1..1989: mol_type = other DNA
atgaatggagacagcagagctgctgtggtgaccagccccccacccaccacagccccccacaaggagcgctactttgacagagtggatgagaacaaccctgagtacctgcgggagaggaacatggccccagacctgcggcaggacttcaacatgatggagcagaagaagagggtgtccatgatcctgcagagccctgccttctgtgaggagctggagagcatgatccaggagcagttcaagaagggcaagaaccccaccggcctgctggccctgcagcagattgctgacttcatgaccaccaacgtgcccaacgtgtacccagctgccccccagggcggcatggccgccctgaacatgagcctgggcatggtgacccctgtgaatgacctgcggggcagtgacagcatcgcctatgacaagggggagaagctgctgcgctgcaagctggccgccttctaccgcctggccgacctgtttggctggagccagctgatctacaaccacatcaccaccagggtgaacagcgagcaggagcacttcctgattgtgcccttcggcctgctgtacagcgaggtgacagccagcagcctggtgaagatcaacctgcagggcgacatcgtggaccggggcagcaccaacctgggcgtgaaccaggccggcttcaccctgcacagcgccatctatgctgcccggccagatgtgaagtgtgtggtgcacatccacaccccagctggagctgctgtgtctgccatgaagtgtggcctgctgcccatcagccctgaggccctgagcctgggggaggtggcctaccatgactaccacggcatcctggtggatgaggaggagaaggtgctgatccagaagaacctgggccccaagagcaaggtgctgatcctgaggaaccacggcctggtgtctgtgggggagagcgtggaggaggccttctactacatccacaacctggtggtggcctgtgagatccaggtgaggaccctggccagcgctgggggccctgacaacctggtgctgctgaaccctgagaagtacaaggccaagagccgcagccctggcagccctgtgggggagggcaccggcagcccccccaagtggcagatcggggagcaggagtttgaggccctgatgaggatgctggacaacctgggctacagaacaggctacccctaccgctacccagccctgcgggagaagagcaagaagtacagtgatgtggaggtgcctgcctctgtgacaggctacagctttgccagtgatggagacagcggcacctgcagccccctgcggcacagcttccagaagcagcagcgggagaagacccgctggctgaacagcggcagaggagatgaggccagcgaggagggccagaatggcagcagccccaagagcaagaccaagtggaccaaggaggatggccacaggaccagcaccagcgctgtgcccaacctgtttgtgcccctgaacaccaaccccaaggaggtgcaggagatgaggaacaagatccgggagcagaacctgcaggacatcaagacagctggcccccagagccaggtgctgtgtggggtggtgatggacaggagcctggtgcaggatgcccccctgagtgactgcacagagaccatcgagggcctggagctgacagagcagaccttcagccctgccaagagcctgtccttcaggaagggggagctggtgacagccagcaaggccatcatcgagaaggagtaccagccccacgtgattgtgtccaccaccggccccaaccccttcaccaccctgacagaccgggagctggaggagtacagaagagaggtggagaggaagcagaagggcagcgaggagaacctggatgaggcccgggagcagaaggagaagagccccccagaccagcctgctgtgccccaccccccacccagcacccccatcaagctggaggagggagatggctgtgcccgggagtacctgctgccctag

SEQ ID NO: 142777 - DNA, 1989 bp, synthetic construct
  misc_feature 1..1989: note = Description of Artificial Sequence: Synthetic coding sequence
  source 1..1989: mol_type = other DNA
atgaatggagacagcagagctgctgtggtgaccagccccccacccaccacagccccccacaaggagcgctactttgacagagtggatgagaacaaccctgagtacctgcgggagaggaacatggccccagacctgcggcaggacttcaacatgatggagcagaagaagagggtgtccatgatcctgcagagccctgccttctgtgaggagctggagagcatgatccaggagcagttcaagaagggcaagaaccccaccggcctgctggccctgcagcagattgctgacttcatgaccaccaacgtgcccaacgtgtacccagctgccccccagggcggcatggccgccctgaacatgagcctgggcatggtgacccctgtgaatgacctgcggggcagtgacagcatcgcctatgacaagggggagaagctgctgcgctgcaagctggccgccttctaccgcctggccgacctgtttggctggagccagctgatctacaaccacatcaccaccagggtgaacagcgagcaggagcacttcctgattgtgcccttcggcctgctgtacagcgaggtgacagccagcagcctggtgaagatcaacctgcagggcgacatcgtggaccggggcagcaccaacctgggcgtgaaccaggccggcttcaccctgcacagcgccatctatgctgcccggccagatgtgaagtgtgtggtgcacatccacaccccagctggagctgctgtgtctgccatgaagtgtggcctgctgcccatcagccctgaggccctgagcctgggggaggtggcctaccatgactaccacggcatcctggtggatgaggaggagaaggtgctgatccagaagaacctgggccccaagagcaaggtgctgatcctgaggaaccacggcctggtgtctgtgggggagagcgtggaggaggccttctactacatccacaacctggtggtggcctgtgagatccaggtgaggaccctggccagcgctgggggccctgacaacctggtgctgctgaaccctgagaagtacaaggccaagagccgcagccctggcagccctgtgggggagggcaccggcagcccccccaagtggcagatcggggagcaggagtttgaggccctgatgaggatgctggacaacctgggctacagaacaggctacccctaccgctacccagccctgcgggagaagagcaagaagtacagtgatgtggaggtgcctgcctctgtgacaggctacagctttgccagtgatggagacagcggcacctgcagccccctgcggcacagcttccagaagcagcagcgggagaagacccgctggctgaacagcggcagaggagatgaggccagcgaggagggccagaatggcagcagccccaagagcaagaccaaggtgtggaccaacatcacccatgaccacgtgaagcccctgctgcagagcctgagcagcggcgtgtgtgtgcccagctgcatcaccaactgcctgtggaccaaggaggatggccacaggaccagcaccagcgctgtgcccaacctgtttgtgcccctgaacaccaaccccaaggaggtgcaggagatgaggaacaagatccgggagcagaacctgcaggacatcaagacagctggcccccagagccaggtgctgtgtggggtggtgatggacaggagcctggtgcagggcgagctggtgacagccagcaaggccatcatcgagaaggagtaccagccccacgtgattgtgtccaccaccggccccaaccccttcaccaccctgacagaccgggagctggaggagtacagaagagaggtggagaggaagcagaagggcagcgaggagaacctggatgaggcccgggagcagaaggagaagagccccccagaccagcctgctgtgccccaccccccacccagcacccccatcaagctggaggagggagatggctgtgcccgggagtacctgctgccctag

SEQ ID NO: 142778 - DNA, 1203 bp, synthetic construct
  misc_feature 1..1203: note = Description of Artificial Sequence: Synthetic coding sequence
  source 1..1203: mol_type = other DNA
atgaatggagacagcagagctgctgtggtgaccagccccccacccaccacagccccccacaaggagcgctactttgacagagtggatgagaacaaccctgagtacctgcgggagaggaacatggccccagacctgcggcaggacttcaacatgatggagcagaagaagagggtgtccatgatcctgcagagccctgccttctgtgaggagctggagagcatgatccaggagcagttcaagaagggcaagaaccccaccggcctgctggccctgcagcagattgctgacttcatgaccaccaacgtgcccaacgtgtacccagctgccccccagggcggcatggccgccctgaacatgagcctgggcatggtgacccctgtgaatgacctgcggggcagtgacagcatcgcctatgacaagggggagaagctgctgcgctgcaagctggccgccttctaccgcctggccgacctgtttggctggagccagctgatctacaaccacatcaccaccagggtgaacagcgagcaggagcacttcctgattgtgcccttcggcctgctgtacagcgaggtgacagccagcagcctggtgaagatcaacctgcagggcgacatcgtggaccggggcagcaccaacctgggcgtgaaccaggccggcttcaccctgcacagcgccatctatgctgcccggccagatgtgaagtgtgtggtgcacatccacaccccagctggagctgctgtgtctgccatgaagtgtggcctgctgcccatcagccctgaggccctgagcctgggggaggtggcctaccatgactaccacggcatcctggtggatgaggaggagaaggtgctgatccagaagaacctgggccccaagagcaaggtgctgatcctgaggaaccacggcctggtgtctgtgggggagagcgtggaggaggccttctactacatccacaacctggtggtggcctgtgagatccaggtgaggaccctggccagcgctgggggccctgacaacctggtgctgctgaaccctgagaagtacaaggccaagagccgcagccctggcagccctgtgggggagggcaccggcagcccccccaagtggcagatcggggagcaggagtttgaggccctgatgaggatgctggacaacctgggctaccgcaccagcagcagcggccggcggcaggatggatag

SEQ ID NO: 142779 - DNA, 1989 bp, synthetic construct; identical to SEQ ID NO: 142777
  misc_feature 1..1989: note = Description of Artificial Sequence: Synthetic coding sequence
  source 1..1989: mol_type = other DNA

SEQ ID NO: 142780 - DNA, 2214 bp, synthetic construct
  misc_feature 1..2214: note = Description of Artificial Sequence: Synthetic coding sequence
  source 1..2214: mol_type = other DNA
atgaatggagacagcagagctgctgtggtgaccagccccccacccaccacagccccccacaaggagcgctactttgacagagtggatgagaacaaccctgagtacctgcgggagaggaacatggccccagacctgcggcaggacttcaacatgatggagcagaagaagagggtgtccatgatcctgcagagccctgccttctgtgaggagctggagagcatgatccaggagcagttcaagaagggcaagaaccccaccggcctgctggccctgcagcagattgctgacttcatgaccaccaacgtgcccaacgtgtacccagctgccccccagggcggcatggccgccctgaacatgagcctgggcatggtgacccctgtgaatgacctgcggggcagtgacagcatcgcctatgacaagggggagaagctgctgcgctgcaagctggccgccttctaccgcctggccgacctgtttggctggagccagctgatctacaaccacatcaccaccagggtgaacagcgagcaggagcacttcctgattgtgcccttcggcctgctgtacagcgaggtgacagccagcagcctggtgaagatcaacctgcagggcgacatcgtggaccggggcagcaccaacctgggcgtgaaccaggccggcttcaccctgcacagcgccatctatgctgcccggccagatgtgaagtgtgtggtgcacatccacaccccagctggagctgctgtgtctgccatgaagtgtggcctgctgcccatcagccctgaggccctgagcctgggggaggtggcctaccatgactaccacggcatcctggtggatgaggaggagaaggtgctgatccagaagaacctgggccccaagagcaaggtgctgatcctgaggaaccacggcctggtgtctgtgggggagagcgtggaggaggccttctactacatccacaacctggtggtggcctgtgagatccaggtgaggaccctggccagcgctgggggccctgacaacctggtgctgctgaaccctgagaagtacaaggccaagagccgcagccctggcagccctgtgggggagggcaccggcagcccccccaagtggcagatcggggagcaggagtttgaggccctgatgaggatgctggacaacctgggctacagaacaggctacccctaccgctacccagccctgcgggagaagagcaagaagtacagtgatgtggaggtgcctgcctctgtgacaggctacagctttgccagtgatggagacagcggcacctgcagccccctgcggcacagcttccagaagcagcagcgggagaagacccgctggctgaacagcggcagaggagatgaggccagcgaggagggccagaatggcagcagccccaagagcaagaccaagtggaccaaggaggatggccacaggaccagcaccagcgctgtgcccaacctgtttgtgcccctgaacaccaaccccaaggaggtgcaggagatgaggaacaagatccgggagcagaacctgcaggacatcaagacagctggcccccagagccaggtgctgtgtggggtggtgatggacaggagcctggtgcagggcgagctggtgacagccagcaaggccatcatcgagaaggagtaccagccccacgtgattgtgtccaccaccggccccaaccccttcaccaccctgacagaccgggagctggaggagtaccgccgggaggtggagaggaagcagaagggcagcgaggagaacctggatgaggcccgggagcagaaggagaagagccccccagaccagcctgctgtgccccaccccccacccagcacccccatcaagctggaggaggacctggtgcctgagcccaccactggagatgacagtgatgctgccaccttcaagcccaccctgcctgacctgagcccagatgagcccagcgaggccctgggcttccccatgctggagaaggaggaggaggcccacaggcctcccagccccacagaggcccccacagaggccagccctgagcccgccccagaccctgcccctgtggccgaggaggccgcccccagcgctgtggaggagggcgctgctgctgaccccggcagtgatggcagccctgggaagagccccagcaagaagaagaagaagttccgcacccccagcttcctgaagaagagcaagaagaagagtgacagctag

SEQ ID NO: 142781 - DNA, 2214 bp, synthetic construct; identical to SEQ ID NO: 142780
  misc_feature 1..2214: note = Description of Artificial Sequence: Synthetic coding sequence
  source 1..2214: mol_type = other DNA

SEQ ID NO: 142782 - DNA, 414 bp, synthetic construct
  misc_feature 1..414: note = Description of Artificial Sequence: Synthetic coding sequence
  source 1..414: mol_type = other DNA
atgaatggagacagcagagctgctgtggtgaccagccccccacccaccacagccccccacaaggagcgctactttgacagagtggatgagaacaaccctgagtacctgcgggagaggaacatggccccagacctgcggcaggacttcaacatgatggagcagaagaagagggtgtccatgatcctgcagagccctgccttctgtgaggagctggagagcatgatccaggagcagttcaagaagggcaagaaccccaccggcctgctggccctgcagcagattgctgacttcatgaccaccaacgtgcccaacgtgtacccagctgccccccagggcggcatggccgccctgaacatgagcctgggcatggtgacccctgtgaatgacctgcggggcagtgacagcatcgcctag

SEQ ID NO: 142783 - DNA, 1899 bp, synthetic construct
  misc_feature 1..1899: note = Description of Artificial Sequence: Synthetic coding sequence
  source 1..1899: mol_type = other DNA
atgaatggagacagcagagctgctgtggtgaccagccccccacccaccacagccccccacaaggagcgctactttgacagagtggatgagaacaaccctgagtacctgcgggagaggaacatggccccagacctgcggcaggacttcaacatgatggagcagaagaagagggtgtccatgatcctgcagagccctgccttctgtgaggagctggagagcatgatccaggagcagttcaagaagggcaagaaccccaccggcctgctggccctgcagcagattgctgacttcatgaccaccaacgtgcccaacgtgtacccagctgccccccagggcggcatggccgccctgaacatgagcctgggcatggtgacccctgtgaatgacctgcggggcagtgacagcatcgcctatgacaagggggagaagctgctgcgctgcaagctggccgccttctaccgcctggccgacctgtttggctggagccagctgatctacaaccacatcaccaccagggtgaacagcgagcaggagcacttcctgattgtgcccttcggcctgctgtacagcgaggtgacagccagcagcctggtgaagatcaacctgcagggcgacatcgtggaccggggcagcaccaacctgggcgtgaaccaggccggcttcaccctgcacagcgccatctatgctgcccggccagatgtgaagtgtgtggtgcacatccacaccccagctggagctgctgtgtctgccatgaagtgtggcctgctgcccatcagccctgaggccctgagcctgggggaggtggcctaccatgactaccacggcatcctggtggatgaggaggagaaggtgctgatccagaagaacctgggccccaagagcaaggtgctgatcctgaggaaccacggcctggtgtctgtgggggagagcgtggaggaggccttctactacatccacaacctggtggtggcctgtgagatccaggtgaggaccctggccagcgctgggggccctgacaacctggtgctgctgaaccctgagaagtacaaggccaagagccgcagccctggcagccctgtgggggagggcaccggcagcccccccaagtggcagatcggggagcaggagtttgaggccctgatgaggatgctggacaacctgggctacagaacaggctacccctaccgctacccagccctgcgggagaagagcaagaagtacagtgatgtggaggtgcctgcctctgtgacaggctacagctttgccagtgatggagacagcggcacctgcagccccctgcggcacagcttccagaagcagcagcgggagaagacccgctggctgaacagcggcagaggagatgaggccagcgaggagggccagaatggcagcagccccaagagcaagaccaagtggaccaaggaggatggccacaggaccagcaccagcgctgtgcccaacctgtttgtgcccctgaacaccaaccccaaggaggtgcaggagatgaggaacaagatccgggagcagaacctgcaggacatcaagacagctggcccccagagccaggtgctgtgtggggtggtgatggacaggagcctggtgcagggcgagctggtgacagccagcaaggccatcatcgagaaggagtaccagccccacgtgattgtgtccaccaccggccccaaccccttcaccaccctgacagaccgggagctggaggagtaccgccgggaggtggagaggaagcagaagggcagcgaggagaacctggatgaggcccgggagcagaaggagaagagccccccagaccagcctgctgtgccccaccccccacccagcacccccatcaagctggaggaggccggagatggctgtgcccgggagtacctgctgccctag

SEQ ID NO: 142784 - DNA, 1335 bp, synthetic construct
  misc_feature 1..1335: note = Description of Artificial Sequence: Synthetic coding sequence
  source 1..1335: mol_type = other DNA
tgagtgctgatcctgaggaaccacggcctggtgtctgtgggggagagcgtggaggaggccttctactacatccacaacctggtggtggcctgtgagatccaggtgaggaccctggccagcgctgggggccctgacaacctggtgctgctgaaccctgagaagtacaaggccaagagccgcagccctggcagccctgtgggggagggcaccggcagcccccccaagtggcagatcggggagcaggagtttgaggccctgatgaggatgctggacaacctgggctacagaacaggctacccctaccgctacccagccctgcgggagaagagcaagaagtacagtgatgtggaggtgcctgcctctgtgacaggctacagctttgccagtgatggagacagcggcacctgcagccccctgcggcacagcttccagaagcagcagcgggagaagacccgctggctgaacagcggcagaggagatgaggccagcgaggagggccagaatggcagcagccccaagagcaagaccaaggtgtggaccaacatcacccatgaccacgtgaagcccctgctgcagagcctgagcagcggcgtgtgtgtgcccagctgcatcaccaactgcctgtggaccaaggaggatggccacaggaccagcaccagcgctgtgcccaacctgtttgtgcccctgaacaccaaccccaaggaggtgcaggagatgaggaacaagatccgggagcagaacctgcaggacatcaagacagctggcccccagagccaggtgctgtgtggggtggtgatggacaggagcctggtgcagggcgagctggtgacagccagcaaggccatcatcgagaaggagtaccagccccacgtgattgtgtccaccaccggccccaaccccttcaccaccctgacagaccgggagctggaggagtacagaagagaggtggagaggaagcagaagggcagcgaggagaacctggatgaggcccgggagcagaaggagaagagccccccagaccagcctgctgtgccccaccccccacccagcacccccatcaagctggaggaggacctggtgcctgagcccaccactggagatgacagtgatgctgccaccttcaagcccaccctgcctgacctgagcccagatgagcccagcgaggccctgggcttccccatgctggagaaggaggaggaggcccaccggccccccagccccacagaggcccccacagaggccagccctgagcccgccccagaccctgcccctgtggccgaggaggccgcccccagcgctgtggaggagggcgctgctgctgaccccggcagctag

SEQ ID NO: 142785 - DNA, 2181 bp, synthetic construct
  misc_feature 1..2181: note = Description of Artificial Sequence: Synthetic coding sequence
  source 1..2181: mol_type = other DNA
atgtctgaggagaccgtgcctgaggccgccagccccccaccaccccagggccagccctactttgaccgcttctctgaagatgatcctgagtacatgaggctgaggaacagagctgctgacctgcggcaggacttcaacctgatggagcagaagaagagggtgaccatgatcctgcagagccccagcttccgggaggagctggagggcctcatccaggagcagatgaagaagggcaacaacagcagcaacatctgggccctgcggcagattgctgacttcatggccagcaccagccatgctgtgttccccaccagctccatgaatgtgtccatgatgacccccatcaatgacctgcacacagctgacagcctgaacctggccaagggggagcggctgatgcgctgcaagatcagctctgtgtaccgcctgctggacctgtatggctgggcccagctgagtgacacctacgtgaccctgcgggtgtccaaggagcaggaccacttcctgatcagccccaagggcgtgtcctgcagcgaggtgacagccagcagcctcatcaaggtgaacatcctgggggaggtggtggagaagggcagcagctgcttccctgtggacaccaccggcttctgcctgcacagcgccatctatgctgcccggccagatgtgcgctgcatcatccacctgcacaccccagccacagctgctgtgtctgccatgaagtggggcctgctgcctgtgagccacaatgccctgctggtgggggacatggcctactatgacttcaacggggagatggagcaggaggccgaccgcatcaacctgcagaagtgcctgggccccacctgcaagatcctggtgctgaggaaccacggcgtggtggccctgggggacacagtggaggaggccttctacaagatcttccacctgcaggccgcctgtgagatccaggtgtctgccctgagcagcgctggaggagtggagaacctgatcctgctggagcaggagaagcaccggccccatgaggtgggctctgtgcagtgggccggcagcaccttcggccccatgcagaagagccggctgggggagcatgaatttgaggccctgatgaggatgctggacaacctgggctacagaacaggctacacctaccgccacccctttgtgcaggagaagaccaagcacaagtctgaggtggagatcccagccaccgtgacagcctttgtgtttgaagaagatggagcccctgtgcctgccctgcggcagcacgcccagaagcagcagaaggagaagacccgctggctgaacacccccaacacctacctgcgggtgaatgtggctgatgaggtgcagaggtccatgggcagcccccggcccaagaccacctggatgaaggcagatgaggtggagaagagcagcagcggcatgcccatcagaattgagaaccccaaccagtttgtgcccctgtacacagacccccaggaggtgctggagatgaggaacaagatccgggagcagaaccggcaggatgtgaagtctgctggcccccagagccagctgctggcctctgtgattgctgagaagagccgcagccccagcacagagagccagctgatgagcaaaggagatgaggacaccaaggatgattctgaggagaccgtgcccaaccccttcagccagctgacagaccaggagctggaggagtacaagaaggaggtggagaggaagaagctggagctggatggagagaaggagacagcccctgaggagcccggcagccctgccaagagcgccccagccagccctgtgcagagccctgccaaggaggccgagaccaagagccccctggtgagccccagcaagagcctggaggagggcaccaagaagacagagaccagcaaggccgccaccacagagcctgagaccacccagcctgagggcgtggtggtgaatggccgggaggaggagcagacagctgaggagatcctgagcaagggcctgagccagatgaccaccagcgctgacacagatgtggacaccagcaaggacaagacagagagcgtgaccagcggccccatgagccctgagggcagccccagcaagagccccagcaagaagaagaagaagttccgcacccccagcttcctgaagaagagcaagaagaaggagaaggtggagagctag

SEQ ID NO: 142786 - DNA, 297 bp, synthetic construct
  misc_feature 1..297: note = Description of Artificial Sequence: Synthetic coding sequence
  source 1..297: mol_type = other DNA
atgtctgaggagaccgtgcctgaggccgccagccccccaccaccccagggccagccctactttgaccgcttctctgaagatgatcctgagtacatgaggctgaggaacagagctgctgacctgcggcaggacttcaacctgatggagcagaagaagagggtgaccatgatcctgcagagccccagcttccgggaggagctggagggcctcatccaggagcagatgaagaaggagtacaagaaggaggtggagaggaagaagctggagctggatgcccctggctggttcagcagctag

SEQ ID NO: 142787 - DNA, 1764 bp, synthetic construct
  misc_feature 1..1764: note = Description of Artificial Sequence: Synthetic coding sequence
  source 1..1764: mol_type = other DNA
atgtctgaggagaccgtgcctgaggccgccagccccccaccaccccagggccagccctactttgaccgcttctctgaagatgatcctgagtacatgaggctgaggaacagagctgctgacctgcggcaggacttcaacctgatggagcagaagaagagggtgaccatgatcctgcagagccccagcttccgggaggagctggagggcctcatccaggagcagatgaagaagggcaacaacagcagcaacatctgggccctgcggcagattgctgacttcatggccagcaccagccatgctgtgttccccaccagctccatgaatgtgtccatgatgacccccatcaatgacctgcacacagctgacagcctgaacctggccaagggggagcggctgatgcgctgcaagatcagctctgtgtaccgcctgctggacctgtatggctgggcccagctgagtgacacctacgtgaccctgcgggtgtccaaggagcaggaccacttcctgatcagccccaagggcgtgtcctgcagcgaggtgacagccagcagcctcatcaaggtgaacatcctgggggaggtggtggagaagggcagcagctgcttccctgtggacaccaccggcttctgcctgcacagcgccatctatgctgcccggccagatgtgcgctgcatcatccacctgcacaccccagccacagctgctgtgtctgccatgaagtggggcctgctgcctgtgagccacaatgccctgctggtgggggacatggcctactatgacttcaacggggagatggagcaggaggccgaccgcatcaacctgcagaagtgcctgggccccacctgcaagatcctggtgctgaggaaccacggcgtggtggccctgggggacacagtggaggaggccttctacaagatcttccacctgcaggccgcctgtgagatccaggtgtctgccctgagcagcgctggaggagtggagaacctgatcctgctggagcaggagaagcaccggccccatgaggtgggctctgtgcagtgggccggcagcaccttcggccccatgcagaagagccggctgggggagcatgaatttgaggccctgatgaggatgctggacaacctgggctacagaacaggctacacctaccgccacccctttgtgcaggagaagaccaagcacaagtctgaggtggagatcccagccaccgtgacagcctttgtgtttgaagaagatggagcccctgtgcctgccctgcggcagcacgcccagaagcagcagaaggagaagacccgctggctgaacacccccaacacctacctgcgggtgaatgtggctgatgaggtgcagaggtccatgggcagcccccggcccaagaccacctggatgaaggcagatgaggtggagaagagcagcagcggcatgcccatcagaattgagaaccccaaccagtttgtgcccctgtacacagacccccaggaggtgctggagatgaggaacaagatccgggagcagaaccggcaggatgtgaagtctgctggcccccagagccagctgctggcctctgtgattgctgagaagagccgcagccccagcacagagagccagctgatgagcaaaggagatgaggacaccaaggatgattctgaggagaccgtgcccaaccccttcagccagctgacagaccaggagctggaggagtacaagaaggaggtggagaggaagaagctggagctggatgcccctggctggttcagcagctag

SEQ ID NO: 142788 - DNA, 2181 bp, synthetic construct; identical to SEQ ID NO: 142785
  misc_feature 1..2181: note = Description of Artificial Sequence: Synthetic coding sequence
  source 1..2181: mol_type = other DNA

SEQ ID NO: 142789 - DNA, 2181 bp, synthetic construct; identical to SEQ ID NO: 142785
  misc_feature 1..2181: note = Description of Artificial Sequence: Synthetic coding sequence
  source 1..2181: mol_type = other DNA

SEQ ID NO: 142790 - DNA, 1680 bp, synthetic construct
  misc_feature 1..1680: note = Description of Artificial Sequence: Synthetic coding sequence
  source 1..1680: mol_type = other DNA
atgtctgaggagaccgtgcctgaggccgccagccccccaccaccccagggccagccctactttgaccgcttctctgaagatgatcctgagtacatgaggctgaggaacagagctgctgacctgcggcaggacttcaacctgatggagcagaagaagagggtgaccatgatcctgcagagccccagcttccgggaggagctggagggcctcatccaggagcagatgaagaagggcaacaacagcagcaacatctgggccctgcggcagattgctgacttcatggccagcaccagccatgctgtgttccccaccagctccatgaatgtgtccatgatgacccccatcaatgacctgcacacagctgacagcctgaacctggccaagggggagcggctgatgcgctgcaagatcagctctgtgtaccgcctgctggacctgtatggctgggcccagctgagtgacacctacgtgaccctgcgggtgtccaaggagcaggaccacttcctgatcagccccaagggcgtgtcctgcagcgaggtgacagccagcagcctcatcaaggtgaacatcctgggggaggtggtggagaagggcagcagctgcttccctgtggacaccaccggcttctgcctgcacagcgccatctatgctgcccggccagatgtgcgctgcatcatccacctgcacaccccagccacagctgctgtgtctgccatgaagtggggcctgctgcctgtgagccacaatgccctgctggtgggggacatggcctactatgacttcaacggggagatggagcaggaggccgaccgcatcaacctgcagaagtgcctgggccccacctgcaagatcctggtgctgaggaaccacggcgtggtggccctgggggacacagtggaggaggccttctacaagatcttccacctgcaggccgcctgtgagatccaggtgtctgccctgagcagcgctggaggagtggagaacctgatcctgctggagcaggagaagcaccggccccatgaggtgggctctgtgcagtgggccggcagcaccttcggccccatgcagaagagccggctgggggagcatgaatttgaggccctgatgaggatgctggacaacctgggctacagaacaggctacacctaccgccacccctttgtgcaggagaagaccaagcacaagtctgaggtggagatcccagccaccgtgacagcctttgtgtttgaagaagatggagcccctgtgcctgccctgcggcagcacgcccagaagcagcagaaggagaagacccgctggctgaacacccccaacacctacctgcgggtgaatgtggctgatgaggtgcagaggtccatgggcagcccccggcccaagaccacctggatgaaggcagatgaggtggagaagagcagcagcggcatgcccatcagaattgagaaccccaaccagtttgtgcccctgtacacagacccccaggaggtgctggagatgaggaacaagatccgggagcagaaccggcaggatgtgaagtctgctggcccccagagccagctgctggcctctgtgattgctgagaagagccgcagccctgtggagcagaggctgcccctgactggaggagagacctgcctgcccagcggcagctctgtgcctggggccggcctgcaggacccctag

SEQ ID NO: 142791 - DNA, 681 bp, synthetic construct
  misc_feature 1..681: note = Description of Artificial Sequence: Synthetic coding sequence
  source 1..681: mol_type = other DNA
atgtctgaggagaccgtgcctgaggccgccagccccccaccaccccagggccagccctactttgaccgcttctctgaagatgatcctgagtacatgaggctgaggaacagagctgctgacctgcggcaggacttcaacctgatggagcagaagaagagggtgaccatgatcctgcagagccccagcttccgggaggagctggagggcctcatccaggagcagatgaagaagggcaacaacagcagcaacatctgggccctgcggcagattgctgacttcatggccagcaccagccatgctgtgttccccaccagctccatgaatgtgtccatgatgacccccatcaatgacctgcacacagctgacagcctgaacctggccaagggggagcggctgatgcgctgcaagatcagctctgtgtaccgcctgctggacctgtatggctgggcccagctgagtgacacctacgtgaccctgcgggtgtccaaggagcaggaccacttcctgatcagccccaagggcgtgtcctgcagcgaggtgacagccagcagcctcatcaaggtgaacatcctgggggaggtggtggagaagggcagcagctgcttccctgtggacaccaccggcttctgcctgcacagcgccatctatgctgcccggccagatgtgcgctgcatcatctag

SEQ ID NO: 142792 - DNA, 432 bp, synthetic construct
  misc_feature 1..432: note = Description of Artificial Sequence: Synthetic coding sequence
  source 1..432: mol_type = other DNA
atgtctgaggagaccgtgcctgaggccgccagccccccaccaccccagggccagccctactttgaccgcttctctgaagatgatcctgagtacatgaggctgaggaacagagctgctgacctgcggcaggacttcaacctgatggagcagaagaagagggtgaccatgatcctgcagagccccagcttccgggaggagctggagggcctcatccaggagcagatgaagaagggcaacaacagcagcaacatctgggccctgcggcagattgctgacttcatggccagcaccagccatgctgtgttccccaccagctccatgaatgtgtccatgatgacccccatcaatgacctgcacacagctgacagcctgaacctggccaagggggagcggctgatgcgctgcaagatcagctctgtgtaccgcctgtag

SEQ ID NO: 142793 - DNA, 1728 bp, synthetic construct
  misc_feature 1..1728: note = Description of Artificial Sequence: Synthetic coding sequence
  source 1..1728: mol_type = other DNA
atgccccggcggcgggtgcctggggccaactgcaagcccaccgggaagatgtctgaggagaccgtgcctgaggccgccagccccccaccaccccagggccagccctactttgaccgcttctctgaagatgatcctgagtacatgaggctgaggaacagagctgctgacctgcggcaggacttcaacctgatggagcagaagaagagggtgaccatgatcctgcagagccccagcttccgggaggagctggagggcctcatccaggagcagatgaagaagggcaacaacagcagcaacatctgggccctgcggcagattgctgacttcatggccagcaccagccatgctgtgttccccaccagctccatgaatgtgtccatgatgacccccatcaatgacctgcacacagctgacagcctgaacctggccaagggggagcggctgatgcgctgcaagatcagctctgtgtaccgcctgctggacctgtatggctgggcccagctgagtgacacctacgtgaccctgcgggtgtccaaggagcaggaccacttcctgatcagccccaagggcgtgtcctgcagcgaggtgacagccagcagcctcatcaaggtgaacatcctgggggaggtggtggagaagggcagcagctgcttccctgtggacaccaccggcttctgcctgcacagcgccatctatgctgcccggccagatgtgcgctgcatcatccacctgcacaccccagccacagctgctgtgtctgccatgaagtggggcctgctgcctgtgagccacaatgccctgctggtgggggacatggcctactatgacttcaacggggagatggagcaggaggccgaccgcatcaacctgcagaagtgcctgggccccacctgcaagatcctggtgctgaggaaccacggcgtggtggccctgggggacacagtggaggaggccttctacaagatcttccacctgcaggccgcctgtgagatccaggtgtctgccctgagcagcgctggaggagtggagaacctgatcctgctggagcaggagaagcaccggccccatgaggtgggctctgtgcagtgggccggcagcaccttcggccccatgcagaagagccggctgggggagcatgaatttgaggccctgatgaggatgctggacaacctgggctacagaacaggctacacctaccgccacccctttgtgcaggagaagaccaagcacaagtctgaggtggagatcccagccaccgtgacagcctttgtgtttgaagaagatggagcccctgtgcctgccctgcggcagcacgcccagaagcagcagaaggagaagacccgctggctgaacacccccaacacctacctgcgggtgaatgtggctgatgaggtgcagaggtccatgggcagcccccggcccaagaccacctggatgaaggcagatgaggtggagaagagcagcagcggcatgcccatcagaattgagaaccccaaccagtttgtgcccctgtacacagacccccaggaggtgctggagatgaggaacaagatccgggagcagaaccggcaggatgtgaagtctgctggcccccagagccagctgctggcctctgtgattgctgagaagagccgcagccctgtggagcagaggctgcccctgactggaggagagacctgcctgcccagcggcagctctgtgcctggggccggcctgcaggacccctag

SEQ ID NO: 142794 - DNA, 54 bp, synthetic construct
  misc_feature 1..54: note = Description of Artificial Sequence: Synthetic coding sequence
  source 1..54: mol_type = other DNA
atgtctgaggagaccgtgcctgaggccgccagccccccaccaccccagggctag

SEQ ID NO: 142795 - DNA, 846 bp, synthetic construct
  misc_feature 1..846: note = Description of Artificial Sequence: Synthetic coding sequence
  source 1..846: mol_type = other DNA
atgtctgaggagaccgtgcctgaggccgccagccccccaccaccccagggccagccctactttgaccgcttctctgaagatgatcctgagtacatgaggctgaggaacagagctgctgacctgcggcaggacttcaacctgatggagcagaagaagagggtgaccatgatcctgcagagccccagcttccgggaggagctggagggcctcatccaggagcagatgaagaagggcaacaacagcagcaacatctgggccctgcggcagattgctgacttcatggccagcaccagccatgctgtgttccccaccagctccatgaatgtgtccatgatgacccccatcaatgacctgcacacagctgacagcctgaacctggccaagggggagcggctgatgcgctgcaagatcagctctgtgtaccgcctgctggacctgtatggctgggcccagctgagtgacacctacgtgaccctgcgggtgtccaaggagcaggaccacttcctgatcagccccaagggcgtgtcctgcagcgaggtgacagccagcagcctggtgtctgaggtgctggagatgaggaacaagatccgggagcagaaccggcaggatgtgaagtctgctggcccccagagccagctgctggcctctgtgattgctgagaagagccgcagccccagcacagagagccagctgatgagcaaaggagatgaggacaccaaggatgattctgaggagaccgtgcccaaccccttcagccagctgacagaccaggagctggaggagtacaagaaggaggtggagaggaagaagctggagctggatgcccctggctggttcagcagctag

SEQ ID NO: 142796 - DNA, 1932 bp, synthetic construct
  misc_feature 1..1932: note = Description of Artificial Sequence: Synthetic coding sequence
  source 1..1932: mol_type = other DNA
atgtctgaggagaccgtgcctgaggccgccagccccccaccaccccagggccagccctactttgaccgcttctctgaagatgatcctgagtacatgaggctgaggaacagagctgctgacctgcggcaggacttcaacctgatggagcagaagaagagggtgaccatgatcctgcagagccccagcttccgggaggagctggagggcctcatccaggagcagatgaagaagggcaacaacagcagcaacatctgggccctgcggcagattgctgacttcatggccagcaccagccatgctgtgttccccaccagctccatgaatgtgtccatgatgacccccatcaatgacctgcacacagctgacagcctgaacctggccaagggggagcggctgatgcgctgcaagatcagctctgtgtaccgcctgctggacctgtatggctgggcccagctgagtgacacctacgtgaccctgcgggtgtccaaggagcaggaccacttcctgatcagccccaagggcgtgtcctgcagcgaggtgacagccagcagcctcatcaaggtgaacatcctgggggaggtggtggagaagggcagcagctgcttccctgtggacaccaccggcttctgcctgcacagcgccatctatgctgcccggccagatgtgcgctgcatcatccacctgcacaccccagccacagctgctgtgtctgccatgaagtggggcctgctgcctgtgagccacaatgccctgctggtgggggacatggcctactatgacttcaacggggagatggagcaggaggccgaccgcatcaacctgcagaagtgcctgggccccacctgcaagatcctggtgctgaggaaccacggcgtggtggccctgggggacacagtggaggaggccttctacaagatcttccacctgcaggccgcctgtgagatccaggtgtctgccctgagcagcgctggaggagtggagaacctgatcctgctggagcaggagaagcaccggccccatgaggtgggctctgtgcagtgggccggcagcaccttcggccccatgcagaagagccggctgggggagcatgaatttgaggccctgatgaggatgctggacaacctgggctacagaacaggctacacctaccgccacccctttgtgcaggagaagaccaagcacaagtctgaggtggagatcccagccaccgtgacagcctttgtgtttgaagaagatggagcccctgtgcctgccctgcggcagcacgcccagaagcagcagaaggagaagacccgctggctgaacacccccaacacctacctgcgggtgaatgtggctgatgaggtgcagaggtccatgggcagcccccggcccaagaccacctggatgaaggcagatgaggtggagaagagcagcagcggcatgcccatcagaattgagaaccccaaccagtttgtgcccctgtacacagacccccaggaggtgctggagatgaggaacaagatccgggagcagaaccggcaggatgtgaagtctgctggcccccagagccagctgctggcctctgtgattgctgagaagagccgcagccccagcacagagagccagctgatgagcaaaggagatgaggacaccaaggatgattctgaggagaccgtgcccaaccccttcagccagctgacagaccaggagctggaggagtacaagaaggaggtggagaggaagaagctggagctggatgagaccggccaggagcgggagcccggcagcggccctgctgtgtgtgagttcttctctgtggccctgcacatctggagcaacatcctggagaggaagaagctgccccagaagagcctggcccacctgcagagcctgcacctgctgctgcagtgccgggcccagaggcggcggcagaggcagagggccctgtag

SEQ ID NO: 142797 - DNA, 2025 bp, synthetic construct
  misc_feature 1..2025: note = Description of Artificial Sequence: Synthetic coding sequence
  source 1..2025: mol_type = other DNA
atgagcagtgatgccagccagggcgtcatcaccaccccacctcctccttccatgccccacaaggagcgctactttgaccgcatcaatgaaaatgaccctgagtacatccgggagaggaacatgagcccagacctgcggcaggacttcaacatgatggagcagaggaagagggtgacccagatcctgcagagccctgccttccgggaggacctggagtgcctgatccaggagcagatgaagaagggccacaaccccaccggcctgctggccctgcagcagattgctgactacatcatggccaacagcttcagcggcttcagcagcccccccctgagcctgggcatggtgacccccatcaatgacctgcctggagctgacaccagcagctatgtgaagggggagaagctgacccgctgcaagctggccagcctgtaccgcctggtggacctgtttggctgggcccacctggccaacacctacatctctgtgcgcatcagcaaggagcaggaccacatcatcatcatcccccggggcctgtccttcagcgaggccacagccagcaacctggtgaaggtgaacatcattggagaggtggtggaccagggcagcaccaacctgaagattgaccacacaggcttcagcccccatgctgccatctacagcaccaggccagatgtgaagtgtgtgatccacatccacaccctggccacagctgctgtgtcctccatgaagtgtggcatcctgcccatcagccaggagagcctgctgctgggagatgtggcctactatgactaccagggcagcctggaggagcaggaggagcgcatccagctgcagaaggtgctgggccccagctgcaaggtgctggtgctgaggaaccacggcgtggtggccctgggggagaccctggaggaggccttccactacatcttcaacgtgcagctggcctgtgagatccaggtgcaggccctggccggggccggcggcgtggacaacctgcacgtgctggacttccagaagtacaaggccttcacctacacagtggccgccagcggcggcggcggcgtgaacatgggcagccaccagaagtggaaggtgggggagattgaatttgagggcctgatgaggaccctggacaacctgggctacagaacaggctacgcctaccgccaccccctcatccgggagaagcccaggcacaagagtgatgtggagatcccagccaccgtgacagccttctcctttgaagatgacacagtgcccctgagccccctgaagtacatggcccagaggcagcagcgggagaagacccgctggctgaacagccccaacacctacatgaaggtgaatgtgcctgaggagagcagaaatggagagaccagccccaggaccaagatcacctggatgaaggccgaggacagcagcaaggtgtctgggggcacccccatcaagattgaggaccccaaccagtttgtgcccctgaacaccaaccccaatgaggtgctggagaagaggaacaagatccgggagcagaacagatatgacctgaagacagctggcccccagagccagctgctggccggcatcgtggtggacaagccacccagcaccatgcagtttgaagatgatgaccacggccccccagccccacccaaccccttcagccacctgacagaaggagagctggaggagtacaagaggaccattgaaaggaagcagcagggcctggaggagaaccacgagctgttcagcaagagcttcatctccatggaggtgcctgtgatggtggtgaatggcaaggatgacatgcatgatgtggaggatgagctggccaagagggtgtcccggctgagcaccagcaccaccatcgagaacatcgagatcaccatcaagagccctgagaagattgaggaggtgctgagccctgagggcagccccagcaagagccccagcaagaagaagaagaagttccgcacccccagcttcctgaagaagaacaagaagaaggagaaggtggaggcctag

SEQ ID NO: 142798 - DNA, 2121 bp, synthetic construct
  misc_feature 1..2121: note = Description of Artificial Sequence: Synthetic coding sequence
  source 1..2121: mol_type = other DNA
atgagcagtgatgccagccagggcgtcatcaccaccccacctcctccttccatgccccacaaggagcgctactttgaccgcatcaatgaaaatgaccctgagtacatccgggagaggaacatgagcccagacctgcggcaggacttcaacatgatggagcagaggaagagggtgacccagatcctgcagagccctgccttccgggaggacctggagtgcctgatccaggagcagatgaagaagggccacaaccccaccggcctgctggccctgcagcagattgctgactacatcatggccaacagcttcagcggcttcagcagcccccccctgagcctgggcatggtgacccccatcaatgacctgcctggagctgacaccagcagctatgtgaagggggagaagctgacccgctgcaagctggccagcctgtaccgcctggtggacctgtttggctgggcccacctggccaacacctacatctctgtgcgcatcagcaaggagcaggaccacatcatcatcatcccccggggcctgtccttcagcgaggccacagccagcaacctggtgaaggtgaacatcattggagaggtggtggaccagggcagcaccaacctgaagattgaccacacaggcttcagcccccatgctgccatctacagcaccaggccagatgtgaagtgtgtgatccacatccacaccctggccacagctgctgtgtcctccatgaagtgtggcatcctgcccatcagccaggagagcctgctgctgggagatgtggcctactatgactaccagggcagcctggaggagcaggaggagcgcatccagctgcagaaggtgctgggccccagctgcaaggtgctggtgctgaggaaccacggcgtggtggccctgggggagaccctggaggaggccttccactacatcttcaacgtgcagctggcctgtgagatccaggtgcaggccctggccggggccggcggcgtggacaacctgcacgtgctggacttccagaagtacaaggccttcacctacacagtggccgccagcggcggcggcggcgtgaacatgggcagccaccagaagtggaaggtgggggagattgaatttgagggcctgatgaggaccctggacaacctgggctacagaacaggctacgcctaccgccaccccctcatccgggagaagcccaggcacaagagtgatgtggagatcccagccaccgtgacagccttctcctttgaagatgacacagtgcccctgagccccctgaagtacatggcccagaggcagcagcgggagaagacccgctggctgaacagccccaacacctacatgaaggtgaatgtgcctgaggagagcagaaatggagagaccagccccaggaccaagatcacctggatgaaggccgaggacagcagcaaggtgtctgggggcacccccatcaagattgaggaccccaaccagtttgtgcccctgaacaccaaccccaatgaggtgctggagaagaggaacaagatccgggagcagaacagatatgacctgaagacagctggcccccagagccagctgctggccggcatcgtggtggacaagccacccagcaccatgcagtttgaagatgatgaccacggccccccagccccacccaaccccttcagccacctgacagaaggagagctggaggagtacaagaggaccattgaaaggaagcagcagggcctggaggatgctgagcaggagctgctgagtgatgatgccagctctgtgtcccagatccagagccagacccagagcccccagaatgtgcctgagaagctggaggagaaccacgagctgttcagcaagagcttcatctccatggaggtgcctgtgatggtggtgaatggcaaggatgacatgcatgatgtggaggatgagctggccaagagggtgtcccggctgagcaccagcaccaccatcgagaacatcgagatcaccatcaagagccctgagaagattgaggaggtgctgagccctgagggcagccccagcaagagccccagcaagaagaagaagaagttccgcacccccagcttcctgaagaagaacaagaagaaggagaaggtggaggcctag

SEQ ID NO: 142799 - DNA, 2025 bp, synthetic construct; identical to SEQ ID NO: 142797
  misc_feature 1..2025: note = Description of Artificial Sequence: Synthetic coding sequence
  source 1..2025: mol_type = other DNA

SEQ ID NO: 142800 - DNA, 543 bp, synthetic construct
  misc_feature 1..543: note = Description of Artificial Sequence: Synthetic coding sequence
  source 1..543: mol_type = other DNA
atggctgacagcgagctgcagctggtggagcagaggatccgctccttcccagacttccccaccccaggagtggtgttccgggacatcagccctgtgctgaaggaccctgccagcttccgggccgccatcggcctgctggcccggcacctgaaggccacccacggcggcagaattgactacatcgccggcctggacagccggggcttcctgtttggccccagcctggcccaggagctgggcctgggctgtgtgctgatcaggaagaggggcaagctgcccggccccaccctgtgggccagctacagcctggagtatggcaaggccgagctggagatccagaaggatgccctggagcccggccagagggtggtggtggtggatgacctgctggccaccggcggcaccatgaatgctgcctgtgagctgctgggccgcctgcaggccgaggtgctggagtgtgtgtccctggtggagctgaccagcctgaagggccgggagaagctggcccctgtgcccttcttcagcctgctgcagtatgaatag

SEQ ID NO: 142801 - DNA, 405 bp, synthetic construct
  misc_feature 1..405: note = Description of Artificial Sequence: Synthetic coding sequence
  source 1..405: mol_type = other DNA
atggctgacagcgagctgcagctggtggagcagaggatccgctccttcccagacttccccaccccaggagtggtgttccgggacatcagccctgtgctgaaggaccctgccagcttccgggccgccatcggcctgctggcccggcacctgaaggccacccacggcggcagaattgactacatcgccggcctggacagccggggcttcctgtttggccccagcctggcccaggagctgggcctgggctgtgtgctgatcaggaagaggggcaagctgcccggccccaccctgtgggccagctacagcctggagtatggcaaggccgagctggagatccagaaggatgccctggagcccggccagagggtggtggtggtggatgacctgctggccaccggggtgtag

SEQ ID NO: 142802 - DNA, 555 bp, synthetic construct
  misc_feature 1..555: note = Description of Artificial Sequence: Synthetic coding sequence
  source 1..555: mol_type = other DNA
atggatggcctgcggcagagggtggagcacttcctggagcagaggaacctggtgacagaggtgctgggcgccctggaggccaagacaggagtggagaagcgctacctggccgccggggctgtgaccctgctgagcctgtacctgctgtttggctacggggccagcctgctgtgcaacctgattggatttgtgtacccagcctatgccagcatcaaggccatcgagagccccagcaaggatgatgacacagtgtggctgacctactgggtggtgtatgccctgtttggcctggccgagttcttcagtgacctgctgctgtcctggttccccttctactacgtgggcaaatgtgccttcctgctcttctgcatggccccccggccctggaatggagccctgatgctgtaccagagggtggtgcggcccctcttcctgcggcaccacggggctgtggaccgcatcatgaatgacctgagcggccgggccctggatgctgctgctggcatcaccagaaatgtgaagcccagccagaccccccagcccaaggacaagtag

SEQ ID NO: 142803 - DNA, 6090 bp, synthetic construct
  misc_feature 1..6090: note = Description of Artificial Sequence: Synthetic coding sequence
  source 1..6090: mol_type = other DNA
atggccagctctgtggccccctatgagcagctggtgcggcaggtggaggccctgaaggccgagaacagccacctgcggcaggagctgcgggacaacagcagccacctgagcaagctggagacagagaccagcggcatgaaggaggtgctgaagcacctgcagggcaagctggagcaggaggcccgggtgctggtgagcagcggccagacagaggtgctggagcagctgaaggccctgcagatggacatcaccagcctgtacaacctgaagttccagccccccaccctgggccctgagcctgctgcccggaccccagagggcagccctgtgcacggcagcggccccagcaaggacagctttggagagctgagccgggccaccatccggctgctggaggagctggaccgggagcgctgcttcctgctgaatgaaattgagaaggaggagaaggagaagctgtggtactacagccagctgcagggcctgagcaagaggctggatgagctgccccacgtggactatgagatgcacaagatgacccgggaccccctgaacctggccctgcggcgctatgccggcatgaccctgaccaacctgacctttggagatgtggccaacaaggccaccctgtgtgcccggcggggctgcatggaggccatcgtggcccagctggccagtgacagcgaggagctgcaccaggtggtgagcagcatcctgaggaacctgtcctggagggctgacatcaacagcaagaaggtgctgcgggaggccggctctgtgacagccctggtgcagtgtgtgctgcgggccaccaaggagagcaccctgaagtctgtgctgagcgccctgtggaacctgagcgcccacagcacagagaacaaggccgccatctgccaggtggatggagccctgggcttcctggtgtccaccctgacctacaagtgccagagcaacagcctggccatcattgaaagtggcggcggcatcctgagaaatgtgagcagcctggtggccacccgggaggactaccggcaggtgctgcgggaccacaactgcctgcagaccctgctgcagcacctgaccagccacagcctgaccatcgtgtccaatgcctgtggcaccctgtggaacctgagcgcccggagcgcccgggaccaggagctgctgtgggacctgggcgctgtgggcatgctgaggaacctggtgcacagcaagcacaagatgattgccatgggcagcgctgctgccctgaggaacctgctggcccacaggcctgccaagcaccaggccgccgccacagctgtgtccccaggcagctgtgtgcccagcctgtatgtgaggaagcagagggccctggaggccgagctggatgcccggcacctggcccaggccctggagcacctggagaagcagggccccccagctgctgaggccgccaccaagaagcccctgccccccctgcggcacctggatggcctggcccaggactatgccagtgacagcggctgctttgatgatgatgatgcccccagcagcctggccgctgctgctgccactggagagcccgccagccctgctgccctgagcctcttcctgggcagccccttcctgcagggccaggccctggcccggaccccacccaccaggagaggaggcaaggaggccgagaaggacaccagcggggaggccgctgtggccgccaaggccaaggccaagctggccctggccgtggccagaattgaccagctggtggaggacatcagcgccctgcacaccagcagtgatgacagcttcagcctgagcagcggggaccccggccaggaggccccccgggagggccgggcccagagctgcagcccctgccggggccctgagggcggccggcgggaggccggcagccgggcccaccccctgctgcggctgaaggccgcccacgccagcctgagcaatgacagcctgaacagcggcagcgccagtgatggctactgcccccgggagcacatgctgccctgccccctggccgccctggccagcagaagagaggacccccgctgtggccagccccggcccagccggctggacctggacctgcccggctgccaggccgagcccccagcccgggaggccaccagcgcagatgcccgggtgaggaccatcaagctgagccccacctaccagcacgtgcccctgctggagggcgccagcagagctggagctgagcccctggccggccctggcatcagccctggggccaggaagcaggcctggctgcctgctgaccacctgagcaaggtgcctgagaagctggccgccgcccccctgtctgtggccagcaaggccctgcagaagctggccgcccaggagggccccctgagcctgagccgctgcagcagcctgagcagcctgagcagcgctggccggcccggccccagcgagggcggggacctggatgacagcgacagcagcctggagggcctggaggaggccggccccagcgaggccgagctggacagcacctggagggcccctggggccaccagcctgcctgtggccatcccagcccccaggaggaacagaggccggggcctgggcgtggaggatgccacccccagcagcagcagtgaaaattatgtgcaggagacccccctggtgctgagccgctgcagctctgtgagcagcctgggcagctttgagagccccagcatcgccagcagcatccccagcgagccctgcagcggccagggcagcggcaccatcagccccagcgagctgcctgacagccctggccagaccatgccacccagccgcagcaagaccccacccctggccccagccccccagggccccccagaggccacccagttcagcctgcagtgggagagctatgtgaagcgcttcctggacattgctgactgccgggagcgctgccgcctgcccagcgagctggatgctggctctgtgcgcttcaccgtggagaagccagatgagaacttcagctgtgccagcagcctgagcgccctggccctgcacgagcactacgtgcagcaggatgtggagctgcggctgctgcccagcgcctgcccagagcggggcggcggggccggcggggccggcctgcactttgctggccacagaagaagagaggagggccctgcccccaccggcagccggcccagaggagctgctgaccaggagctggagctgctgagagaatgtctgggcgctgctgtgcctgcccggctgaggaaggtggccagcgccctggtgcccggccggcgggccctgcctgtgcctgtgtacatgctggtgcctgccccagccccagcccaggaggatgacagctgcacagacagcgctgagggcacccctgtgaacttcagcagcgctgccagcctgagtgatgagaccctgcagggccccccccgggaccagcccggcggccctgctggccggcagaggcccaccggccggcccaccagcgcccggcaggccatgggccaccgccacaaggccggcggggccggccgctctgctgagcagagcagaggagctgggaagaacagagctggcctggagctgcccctgggccggccccccagcgccccagctgacaaggatggcagcaagccaggccgcaccagaggagatggagccctgcagagcctgtgcctgaccacccccacagaggaggccgtgtactgcttctatggaaatgacagtgatgaggagcccccagctgctgcccccacccccacccacaggaggaccagcgccatcccccgggccttcacccgggagcggccccagggcaggaaggaggccccagcccccagcaaggccgccccagctgcccctcctccagcccggacccagcccagcctgattgctgatgagaccccaccctgctacagcctgagcagcagcgccagcagcctgtctgagcctgagcccagcgagcccccagctgtgcacccccggggccgggagcctgctgtgaccaaggaccccggccctgggggcggccgggacagcagccccagccccagggctgctgaggagctgctgcagcgctgcatcagcagcgccctgccccggcggcggccccctgtgtctggcctgcggcggaggaagccccgggccacccggctggatgagaggcctgctgagggcagccgggagcggggggaggaggccgccggcagtgaccgggccagtgacctggacagcgtggagtggagggccatccaggagggcgccaacagcatcgtgacctggctgcaccaggccgctgctgccacccgggaggccagcagcgagagtgacagcatcctgagctttgtgtctggcctgtctgtgggcagcaccctgcagccccccaagcacaggaagggccggcaggccgagggggagatgggcagcgcccggcggcctgagaagagaggagctgcctctgtgaagaccagcggcagccccaggagccctgctggccctgagaagccccggggcacccagaagaccaccccaggagtgcctgctgtgctgcggggccgcaccgtcatctacgtgcccagccctgccccccgggcccagcccaagggcaccccaggcccccgggccacccccaggaaggtggccccaccctgcctggcccagcctgctgccccagccaaggtgcccagccctggccagcagaggagccgcagcctgcacaggcctgccaagaccagcgagctggccaccctgagccagccccccaggtctgccaccccaccagcccggctggccaagacccccagcagcagcagcagccagaccagccctgccagccagcccctgcccaggaagaggcctcctgtgacccaggccgccggggccctgcccggccctggggccagccctgtgcccaagaccccagcccggaccctgctggccaagcagcacaagacccagaggagccctgtgcgcatccccttcatgcagaggcctgcccggcggggccccccacccctggcccgggctgtgcctgagcccggcccccggggccgggccggcacagaagctggccctggggcccggggcggccgcctgggcctggtgcgggtggccagcgccctgagcagcggcagcgagagcagtgacagaagtggcttccggcggcagctgaccttcatcaaggagagccctggcctgcggaggagaagaagtgagctgagcagcgctgagagcgctgccagcgccccccagggcgccagcccccggcggggccgcccagccctgcctgctgtgttcctgtgcagcagccgctgtgaggagctgcgggccgccccccggcagggccctgccccagcccggcagaggcctcctgctgcccggcccagccctggagagaggcctgcccggaggaccaccagcgagagccccagccggctgcctgtgcgggccccagctgcccggcctgagaccgtgaagagatatgccagcctgccccacatctctgtggcccggcggccagatggagctgtgcctgctgccccagccagcgcagatgctgcccggcgcagcagtgatggagagccccggcccctgccccgggtggccgcccctggcaccacctggaggcgcatcagagatgaagatgtgccccacatcctgcggagcaccctgcctgccacagccctgcccctgcggggcagcaccccagaagatgccccagctggccccccacccaggaagaccagtgatgctgtggtgcagacagaggaggtggccgcccccaagaccaacagcagcaccagccccagcctggagacccgggagcccccaggggccccagctgggggccagctgagcctgctgggcagtgatgtggatggccccagcctggccaaggcccccatcagcgccccctttgtgcatgagggcctgggcgtggccgtgggcggcttccctgccagcagacatggcagccccagccgcagcgcccgggtgccccccttcaactacgtgcccagccccatggtggtggccgccaccacagacagcgctgctgagaaggccccagccacagccagcgccaccctgctggagtag

SEQ ID NO: 142804 - DNA, 6912 bp, synthetic construct
  misc_feature 1..6912: note = Description of Artificial Sequence: Synthetic coding sequence
  source 1..6912: mol_type = other DNA
atggccagctctgtggccccctatgagcagctggtgcggcaggtggaggccctgaaggccgagaacagccacctgcggcaggagctgcgggacaacagcagccacctgagcaagctggagacagagaccagcggcatgaaggaggtgctgaagcacctgcagggcaagctggagcaggaggcccgggtgctggtgagcagcggccagacagaggtgctggagcagctgaaggccctgcagatggacatcaccagcctgtacaacctgaagttccagccccccaccctgggccctgagcctgctgcccggaccccagagggcagccctgtgcacggcagcggccccagcaaggacagctttggagagctgagccgggccaccatccggctgctggaggagctggaccgggagcgctgcttcctgctgaatgaaattgagaaggaggagaaggagaagctgtggtactacagccagctgcagggcctgagcaagaggctggatgagctgccccacgtggagacccagttctccatgcagatggacctgatccggcagcagctggagtttgaggcccagcacatccgcagcctgatggaggagcgcttcggcaccagtgatgagatggtgcagagggcccagatccgggccagccggctggagcagattgacaaggagctgctggaggcccaggacagagtgcagcagacagagccccaggccctgctggccgtgaagtctgtgcctgtggatgaagatcctgagacagaggtgcccacccacccagaagatggcaccccccagcccggcaacagcaaggtggaggtggtgttctggctgctgtccatgctggccacccgggaccaggaggacacagcccggaccctgctggccatgagcagcagccctgagagctgtgtggccatgagaagaagtggctgcctgcccctgctgctgcagatcctgcacggcacagaggccgccgccggcggccgggccggggcccctggggcccctggggccaaggatgccaggatgagggccaatgctgccctgcacaacatcgtgttcagccagcctgaccagggcctggccaggaaggagatgagggtgctgcacgtgctggagcagatccgggcctactgtgagacctgctgggactggctgcaggccagagatggcggccctgagggcggcggggccggcagcgcccccatccccatcgagccccagatctgccaggccacctgtgctgtgatgaagctgagctttgatgaggagtaccgccgggccatgaatgagctgggcggcctgcaggccgtggccgagctgctgcaggtggactatgagatgcacaagatgacccgggaccccctgaacctggccctgcggcgctatgccggcatgaccctgaccaacctgacctttggagatgtggccaacaaggccaccctgtgtgcccggcggggctgcatggaggccatcgtggcccagctggccagtgacagcgaggagctgcaccaggtggtgagcagcatcctgaggaacctgtcctggagggctgacatcaacagcaagaaggtgctgcgggaggccggctctgtgacagccctggtgcagtgtgtgctgcgggccaccaaggagagcaccctgaagtctgtgctgagcgccctgtggaacctgagcgcccacagcacagagaacaaggccgccatctgccaggtggatggagccctgggcttcctggtgtccaccctgacctacaagtgccagagcaacagcctggccatcattgaaagtggcggcggcatcctgagaaatgtgagcagcctggtggccacccgggaggactaccggcaggtgctgcgggaccacaactgcctgcagaccctgctgcagcacctgaccagccacagcctgaccatcgtgtccaatgcctgtggcaccctgtggaacctgagcgcccggagcgcccgggaccaggagctgctgtgggacctgggcgctgtgggcatgctgaggaacctggtgcacagcaagcacaagatgattgccatgggcagcgctgctgccctgaggaacctgctggcccacaggcctgccaagcaccaggccgccgccacagctgtgtccccaggcagctgtgtgcccagcctgtatgtgaggaagcagagggccctggaggccgagctggatgcccggcacctggcccaggccctggagcacctggagaagcagggccccccagctgctgaggccgccaccaagaagcccctgccccccctgcggcacctggatggcctggcccaggactatgccagtgacagcggctgctttgatgatgatgatgcccccagcagcctggccgctgctgctgccactggagagcccgccagccctgctgccctgagcctcttcctgggcagccccttcctgcagggccaggccctggcccggaccccacccaccaggagaggaggcaaggaggccgagaaggacaccagcggggaggccgctgtggccgccaaggccaaggccaagctggccctggccgtggccagaattgaccagctggtggaggacatcagcgccctgcacaccagcagtgatgacagcttcagcctgagcagcggggaccccggccaggaggccccccgggagggccgggcccagagctgcagcccctgccggggccctgagggcggccggcgggaggccggcagccgggcccaccccctgctgcggctgaaggccgcccacgccagcctgagcaatgacagcctgaacagcggcagcgccagtgatggctactgcccccgggagcacatgctgccctgccccctggccgccctggccagcagaagagaggacccccgctgtggccagccccggcccagccggctggacctggacctgcccggctgccaggccgagcccccagcccgggaggccaccagcgcagatgcccgggtgaggaccatcaagctgagccccacctaccagcacgtgcccctgctggagggcgccagcagagctggagctgagcccctggccggccctggcatcagccctggggccaggaagcaggcctggctgcctgctgaccacctgagcaaggtgcctgagaagctggccgccgcccccctgtctgtggccagcaaggccctgcagaagctggccgcccaggagggccccctgagcctgagccgctgcagcagcctgagcagcctgagcagcgctggccggcccggccccagcgagggcggggacctggatgacagcgacagcagcctggagggcctggaggaggccggccccagcgaggccgagctggacagcacctggagggcccctggggccaccagcctgcctgtggccatcccagcccccaggaggaacagaggccggggcctgggcgtggaggatgccacccccagcagcagcagtgaaaattatgtgcaggagacccccctggtgctgagccgctgcagctctgtgagcagcctgggcagctttgagagccccagcatcgccagcagcatccccagcgagccctgcagcggccagggcagcggcaccatcagccccagcgagctgcctgacagccctggccagaccatgccacccagccgcagcaagaccccacccctggccccagccccccagggccccccagaggccacccagttcagcctgcagtgggagagctatgtgaagcgcttcctggacattgctgactgccgggagcgctgccgcctgcccagcgagctggatgctggctctgtgcgcttcaccgtggagaagccagatgagaacttcagctgtgccagcagcctgagcgccctggccctgcacgagcactacgtgcagcaggatgtggagctgcggctgctgcccagcgcctgcccagagcggggcggcggggccggcggggccggcctgcactttgctggccacagaagaagagaggagggccctgcccccaccggcagccggcccagaggagctgctgaccaggagctggagctgctgagagaatgtctgggcgctgctgtgcctgcccggctgaggaaggtggccagcgccctggtgcccggccggcgggccctgcctgtgcctgtgtacatgctggtgcctgccccagccccagcccaggaggatgacagctgcacagacagcgctgagggcacccctgtgaacttcagcagcgctgccagcctgagtgatgagaccctgcagggccccccccgggaccagcccggcggccctgctggccggcagaggcccaccggccggcccaccagcgcccggcaggccatgggccaccgccacaaggccggcggggccggccgctctgctgagcagagcagaggagctgggaagaacagagctggcctggagctgcccctgggccggccccccagcgccccagctgacaaggatggcagcaagccaggccgcaccagaggagatggagccctgcagagcctgtgcctgaccacccccacagaggaggccgtgtactgcttctatggaaatgacagtgatgaggagcccccagctgctgcccccacccccacccacaggaggaccagcgccatcccccgggccttcacccgggagcggccccagggcaggaaggaggccccagcccccagcaaggccgccccagctgcccctcctccagcccggacccagcccagcctgattgctgatgagaccccaccctgctacagcctgagcagcagcgccagcagcctgtctgagcctgagcccagcgagcccccagctgtgcacccccggggccgggagcctgctgtgaccaaggaccccggccctgggggcggccgggacagcagccccagccccagggctgctgaggagctgctgcagcgctgcatcagcagcgccctgccccggcggcggccccctgtgtctggcctgcggcggaggaagccccgggccacccggctggatgagaggcctgctgagggcagccgggagcggggggaggaggccgccggcagtgaccgggccagtgacctggacagcgtggagtggagggccatccaggagggcgccaacagcatcgtgacctggctgcaccaggccgctgctgccacccgggaggccagcagcgagagtgacagcatcctgagctttgtgtctggcctgtctgtgggcagcaccctgcagccccccaagcacaggaagggccggcaggccgagggggagatgggcagcgcccggcggcctgagaagagaggagctgcctctgtgaagaccagcggcagccccaggagccctgctggccctgagaagccccggggcacccagaagaccaccccaggagtgcctgctgtgctgcggggccgcaccgtcatctacgtgcccagccctgccccccgggcccagcccaagggcaccccaggcccccgggccacccccaggaaggtggccccaccctgcctggcccagcctgctgccccagccaaggtgcccagccctggccagcagaggagccgcagcctgcacaggcctgccaagaccagcgagctggccaccctgagccagccccccaggtctgccaccccaccagcccggctggccaagacccccagcagcagcagcagccagaccagccctgccagccagcccctgcccaggaagaggcctcctgtgacccaggccgccggggccctgcccggccctggggccagccctgtgcccaagaccccagcccggaccctgctggccaagcagcacaagacccagaggagccctgtgcgcatccccttcatgcagaggcctgcccggcggggccccccacccctggcccgggctgtgcctgagcccggcccccggggccgggccggcacagaagctggccctggggcccggggcggccgcctgggcctggtgcgggtggccagcgccctgagcagcggcagcgagagcagtgacagaagtggcttccggcggcagctgaccttcatcaaggagagccctggcctgcggaggagaagaagtgagctgagcagcgctgagagcgctgccagcgccccccagggcgccagcccccggcggggccgcccagccctgcctgctgtgttcctgtgcagcagccgctgtgaggagctgcgggccgccccccggcagggccctgccccagcccggcagaggcctcctgctgcccggcccagccctggagagaggcctgcccggaggaccaccagcgagagccccagccggctgcctgtgcgggccccagctgcccggcctgagaccgtgaagagatatgccagcctgccccacatctctgtggcccggcggccagatggagctgtgcctgctgccccagccagcgcagatgctgcccggcgcagcagtgatggagagccccggcccctgccccgggtggccgcccctggcaccacctggaggcgcatcagagatgaagatgtgccccacatcctgcggagcaccctgcctgccacagccctgcccctgcggggcagcaccccagaagatgccccagctggccccccacccaggaagaccagtgatgctgtggtgcagacagaggaggtggccgcccccaagaccaacagcagcaccagccccagcctggagacccgggagcccccaggggccccagctgggggccagctgagcctgctgggcagtgatgtggatggccccagcctggccaaggcccccatcagcgccccctttgtgcatgagggcctgggcgtggccgtgggcggcttccctgccagcagacatggcagccccagccgcagcgcccgggtgccccccttcaactacgtgcccagccccatggtggtggccgccaccacagacagcgctgctgagaaggccccagccacagccagcgccaccctgctggagtag

SEQ ID NO: 142805 - DNA, 1545 bp, synthetic construct
  misc_feature 1..1545: note = Description of Artificial Sequence: Synthetic coding sequence
  source 1..1545: mol_type = other DNA
atgtcctggccccggcggctgctgctgcgctacctgtttcctgccctgctgctgcacggcctgggggagggcagcgccctgctgcacccagacagccgcagccaccccaggagcctggagaagagcgcctggagggccttcaaggagagccagtgccaccacatgctgaagcacctgcacaatggagcccgcatcaccgtgcagatgccacccaccatcgagggccactgggtgtccacaggctgtgaggtgcgcagcggccctgagttcatcaccaggagctaccgcttctaccacaacaacaccttcaaggcctaccagttctactacggcagcaaccgctgcaccaaccccacctacaccctcatcatccggggcaagatccggctgcggcaggcctcctggatcatccggggcggcacagaagctgactaccagctgcacaacgtgcaggtgatctgccacacagaggccgtggccgagaagctgggccagcaggtgaacagaacctgccccggcttcctggctgatggcggcccctgggtgcaggatgtggcctatgacctgtggagagaagaaaatggctgtgaatgtaccaaggctgtgaactttgccatgcatgagctgcagctgatccgggtggagaagcagtacctgcaccacaacctggaccacctggtggaggagctgttcctgggggacatccacacagatgccacccagaggatgttctaccggcccagcagctaccagccccccctgcagaatgccaagaaccacgaccacgcctgcatcgcctgccgcatcatctacagaagtgatgagcaccacccccccatcctgccccccaaggctgacctgaccatcggcctgcacggggagtgggtgtcccagagatgtgaggtgcggcctgaggtgctcttcctgaccaggcacttcatcttccatgacaacaacaacacctgggagggccactactaccactacagcgaccctgtgtgcaagcaccccaccttcagcatctatgcccggggccgctacagccggggcgtgctgagcagccgggtgatgggcggcacagaatttgtgttcaaggtgaaccacatgaaggtgacccccatggatgctgccacagccagcctgctgaatgtgttcaatggaaatgaatgtggggctgagggctcctggcaggtgggcatccagcaggatgtgacccacaccaacggctgtgtggccctgggcatcaagctgccccacacagaatatgagatcttcaagatggagcaggatgcccggggccgctacctgctcttcaacggccagaggcccagtgatggcagcagcccagacaggcctgagaagagggccaccagctaccagatgcccctggtgcagtgtgccagcagcagccccagggctgaggacctggccgaggacagcggcagcagcctgtatggccgggcccctggccgccacacctggagcctgctgctggccgccctggcctgcctggtgcccctgctgcactggaacatcagaagatag

SEQ ID NO: 142806 - DNA, 1698 bp, synthetic construct
  misc_feature 1..1698: note = Description of Artificial Sequence: Synthetic coding sequence
  source 1..1698: mol_type = other DNA
atgaagaggcgctgcagctgtggcggcggcggcggccactgcagcagcgagaggaggaggaccaggcctgaggccgagggccgggcccgggcccagctgcccggccaccagatcggggccaggagagctgggggcccccgggccggcctggagatgtcctggccccggcggctgctgctgcgctacctgtttcctgccctgctgctgcacggcctgggggagggcagcgccctgctgcacccagacagccgcagccaccccaggagcctggagaagagcgcctggagggccttcaaggagagccagtgccaccacatgctgaagcacctgcacaacggggcccgcatcaccgtgcagatgccacccaccatcgagggccactgggtgtccacaggctgtgaggtgcgcagcggccctgagttcatcaccaggagctaccgcttctaccacaacaacaccttcaaggcctaccagttctactacggcagcaaccgctgcaccaaccccacctacaccctcatcatccggggcaagatccggctgcggcaggcctcctggatcatccggggcggcacagaggccgactaccagctgcacaacgtgcaggtgatctgccacacagaagctgtggccgagaagctgggccagcaggtgaacagaacctgccccggcttcctggctgatggcggcccctgggtgcaggatgtggcctatgacctgtggagggaggagaatggctgtgagtgcaccaaggctgtgaactttgccatgcatgagctgcagctgatccgggtggagaagcagtacctgcaccacaacctggaccacctggtggaggagctgttcctgggggacatccacacagatgccacccagaggatgttctaccggcccagcagctaccagccccccctgcagaatgccaagaaccacgaccacgcctgcatcgcctgccgcatcatctacagaagtgatgagcaccacccccccatcctgccccccaaggctgacctgaccatcggcctgcatggagagtgggtgtcccagagatgtgaggtgcggcctgaggtgctcttcctgaccaggcacttcatcttccatgacaacaacaacacctgggagggccactactaccactacagcgaccctgtgtgcaagcaccccaccttcagcatctatgcccggggccgctacagcagaggagtgctgagcagccgggtgatgggcggcacagaatttgtgttcaaggtgaaccacatgaaggtgacccccatggatgctgccacagccagcctgctgaatgtgttcaatggaaatgaatgtggggctgagggctcctggcaggtgggcatccagcaggatgtgacccacaccaacggctgtgtggccctgggcatcaagctgccccacacagaatatgagatcttcaagatggagcaggatgcccggggccgctacctgctcttcaacggccagaggcccagtgatggcagcagcccagacaggcctgagaagagggccaccagctaccagatgcccctggtgcagtgtgccagcagcagccccagggctgaggacctggctgaagattctggcagcagcctgtatggccgggcccctggccgccacacctggagcctgctgctggccgccctggcctgcctggtgcccctgctgcactggaacatcagaagatag

SEQ ID NO: 142807 - DNA, 981 bp, synthetic construct
  misc_feature 1..981: note = Description of Artificial Sequence: Synthetic coding sequence
  source 1..981: mol_type = other DNA
atgccacccagcatcagcgccttccaggccgcctacatcggcatcgaggtgctgattgccctggtgtctgtgcctggaaatgtgctggtgatctgggccgtgaaggtgaaccaggccctgagagatgccaccttctgcttcatcgtgtccctggccgtggctgatgtggccgtgggcgccctggtgatccccctggccatcctgatcaacatcggcccccagacctacttccacacctgcctgatggtggcctgccctgtgctgatcctgacccagagcagcatcctggccctgctggccatcgctgtggaccgctacctgcgggtgaagatccccctgcgctacaagatggtggtgaccccccggcgggctgctgtggccatcgccggctgctggatcctgagctttgtggtgggcctgacccccatgtttggctggaacaacctgtctgctgtggagcgggcctgggccgccaacggctccatgggagagcctgtgatcaagtgtgaatttgagaaggtgatctccatggagtacatggtgtacttcaacttctttgtgtgggtgctgccccccctgctgctgatggtgctgatctacctggaggtgttctacctgatcaggaagcagctgaacaagaaggtgtctgccagcagcggggacccccagaagtactacggcaaggagctgaagatcgccaagagcctggccctgatcctcttcctgtttgccctgtcctggctgcccctgcacatcctgaactgcatcaccctcttctgccccagctgccacaagcccagcatcctgacctacatcgccatcttcctgacccacggcaacagcgccatgaaccccatcgtgtatgccttccgcatccagaagttccgggtgaccttcctgaagatctggaatgaccacttccgctgccagcctgccccacccattgatgaggacctgcctgaggagaggccagatgactag

SEQ ID NO: 142808 - DNA, 981 bp, synthetic construct; identical to SEQ ID NO: 142807
  misc_feature 1..981: note = Description of Artificial Sequence: Synthetic coding sequence
  source 1..981: mol_type = other DNA

SEQ ID NO: 142809 - DNA, 378 bp, synthetic construct
  misc_feature 1..378: note = Description of Artificial Sequence: Synthetic coding sequence
  source 1..378: mol_type = other DNA
atgccacccagcatcagcgccttccaggccgcctacatcggcatcgaggtgctgattgccctggtgtctgtgcctggaaatgtgctggtgatctgggccgtgaaggtgaaccaggccctgagagatgccaccttctgcttcatcgtgtccctggccgtggctgatgtggccgtgggcgccctggtgatccccctggccatcctgatcaacatcggcccccagacctacttccacacctgcctgatggtggcctgccctgtgctgatcctgacccagagcagcatcctggccctgctggccatcgctgtggaccgctacctgcgggtgaagatccccctgcggcgcatcagccagtgcatggccagcaccaagagctag

SEQ ID NO: 142810 - DNA, 981 bp, synthetic construct; identical to SEQ ID NO: 142807
  misc_feature 1..981: note = Description of Artificial Sequence: Synthetic coding sequence
  source 1..981: mol_type = other DNA

SEQ ID NO: 142811 - DNA, 1239 bp, synthetic construct
  misc_feature 1..1239: note = Description of Artificial Sequence: Synthetic coding sequence
  source 1..1239: mol_type = other DNA
atgcccatcatgggcagctctgtgtacatcaccgtggagctggccatcgctgtgctggccatcctgggcaatgtgctggtgtgctgggccgtgtggctgaacagcaacctgcagaatgtgaccaactactttgtggtgtccctggccgctgctgacattgctgtgggcgtgctggccatcccctttgccatcaccatcagcacaggcttctgtgccgcctgccacggctgcctcttcatcgcctgctttgtgctggtgctgacccagagcagcatcttcagcctgctggccatcgccatcgaccgctacatcgccatccgcatccccctgcgctacaacggcctggtgacaggcacccgggccaagggcatcatcgccatctgctgggtgctgagctttgccatcggcctgacccccatgctgggctggaacaactgtggccagcccaaggagggcaagaaccacagccagggctgtggggagggccaggtggcctgcctgtttgaagatgtggtgcccatgaactacatggtgtacttcaacttctttgcctgtgtgctggtgcccctgctgctgatgctgggcgtgtacctgcgcatcttcctggccgcccggcggcagctgaagcagatggagagccagcccctgcctggagagcgggcccggagcaccctgcagaaggaggtgcatgctgccaagagcctggccatcatcgtgggcctgtttgccctgtgctggctgcccctgcacatcatcaactgcttcaccttcttctgcccagactgcagccacgcccccctgtggctgatgtacctggccatcgtgctgagccacaccaacagcgtggtgaaccccttcatctatgcctaccgcatccgggagttccggcagaccttcaggaagatcatccgcagccacgtgctgcggcagcaggagcccttcaaggctgctggcaccagcgcccgggtgctggccgcccacggcagtgatggagagcaggtgtccctgcggctgaatggccaccccccaggagtgtgggccaacggcagcgccccccaccctgagcggcggcccaacggctacgccctgggcctggtgtctgggggcagcgcccaggagagccagggcaacacaggcctgcctgatgtggagctgctgagccatgagctgaagggcgtgtgcccagagcccccaggcctggatgaccccctggcccaggatggagctggggtgtcctag

SEQ ID NO: 142812 - DNA, 1239 bp, synthetic construct; identical to SEQ ID NO: 142811
  misc_feature 1..1239: note = Description of Artificial Sequence: Synthetic coding sequence
  source 1..1239: mol_type = other DNA

SEQ ID NO: 142813 - DNA, 267 bp, synthetic construct
  misc_feature 1..267: note = Description of Artificial Sequence: Synthetic coding sequence
  source 1..267: mol_type = other DNA
atgcccatcatgggcagctctgtgtacatcaccgtggagctggccatcgctgtgctggccatcctgggcaatgtgctggtgtgctgggccgtgtggctgaacagcaacctgcagaatgtgaccaactactttgtggtgtccctggccgctgctgacattgctgtgggcgtgctggccatcccctttgccatcaccatcagcacaggcttctgtgccgcctgccacggctgcctcttcatcgcctgctttgtgctggtgctgacctag

SEQ ID NO: 142814 - DNA, 195 bp, synthetic construct
  misc_feature 1..195: note = Description of Artificial Sequence: Synthetic coding sequence
  source 1..195: mol_type = other DNA
atgcccatcatgggcagctctgtgtacatcaccgtggagctggccatcgctgtgctggccatcctgggcaatgtgctggtgtgctgggccgtgtggctgaacagcaacctgcagaatgtgaccaactactttgtggtgtccctggccgctgctgacattgctgtgggcgtgctggccatcccctttgccatctag

SEQ ID NO: 142815 - DNA, 231 bp, synthetic construct
  misc_feature 1..231: note = Description of Artificial Sequence: Synthetic coding sequence
  source 1..231: mol_type = other DNA
atgcccatcatgggcagctctgtgtacatcaccgtggagctggccatcgctgtgctggccatcctgggcaatgtgctggtgtgctgggccgtgtggctgaacagcaacctgcagaatgtgaccaactactttgtggtgtccctggccgctgctgacattgctgtgggcgtgctggccatcccctttgccatcaccatcagcacaggcttctgtgccgcctgccacggctag

SEQ ID NO: 142816 - DNA, 1098 bp, synthetic construct
  misc_feature 1..1098: note = Description of Artificial Sequence: Synthetic coding sequence
  source 1..1098: mol_type = other DNA
atgcccatcatgggcagctctgtgtacatcaccgtggagctggccatcgctgtgctggccatcctgggcaatgtgctggtgtgctgggccgtgtggctgaacagcaacctgcagaatgtgaccaactactttgtggtgtccctggccgctgctgacattgctgtgggcgtgctggccatcccctttgccatcaccatcagcacaggcttctgtgccgcctgccacggctgcctcttcatcgcctgctttgtgctggtgctgacccagagcagcatcttcagcctgctggccatcgccatcgaccgctacatcgccatccgcatccccctgcgctacaacggcctggtgacaggcacccgggccaagggcatcatcgccatctgctgggtgctgagctttgccatcggcctgacccccatgctgggctggaacaactgtggccagcccaaggagggcaagaaccacagccagggctgtggggagggccaggtggcctgcctgtttgaagatgtggtgcccatgaactacatggtgtacttcaacttctttgcctgtgtgctggtgcccctgctgctgatgctgggcgtgtacctgcgcatcttcctggccgcccggcggcagctgaagcagatggagagccagcccctgcctggagagcgggcccggagcaccctgcagaaggaggtgcatgctgccaagagcctggccatcatcgtgggcctgtttgccctgtgctggctgcccctgcacatcatcaactgcttcaccttcttctgcccagactgcagccacgcccccctgtggctgatgtacctggccatcgtgctgagccacaccaacagcgtggtgaaccccttcatctatgcctaccgcatccgggagttccggcagaccttcaggaagatcatccgcagccacgtgctgcggcagcaggagcccttcaaggctgctggcaccagcgcccgggtgctggccgcccacggcagtgatggagagcaggtgtccctgcggctgaatggccaccccccaggagtgtgggccaacggcagcgccccccaccctgagcggcggcccaacggctacgccctgggcctgtag

SEQ ID NO: 142817 - DNA, 1239 bp, synthetic construct; identical to SEQ ID NO: 142811
  misc_feature 1..1239: note = Description of Artificial Sequence: Synthetic coding sequence
  source 1..1239: mol_type = other DNA

SEQ ID NO: 142818 - DNA, 999 bp, synthetic construct
  misc_feature 1..999: note = Description of Artificial Sequence: Synthetic coding sequence
  source 1..999: mol_type = other DNA
atgctgctggagacccaggatgccctgtatgtggccctggagctggtgattgctgccctgtctgtggccggaaatgtgctggtgtgtgccgctgtgggcacagccaacaccctgcagacccccaccaactacttcctggtgtccctggccgctgctgatgtggccgtgggcctgtttgccatcccctttgccatcaccatcagcctgggcttctgcacagacttctacggctgcctcttcctggcctgctttgtgctggtgctgacccagagcagcatcttcagcctgctggccgtggccgtggaccgctacctggccatctgtgtgcccctgcgctacaagagcctggtgacaggcacccgggcccggggcgtgattgctgtgctgtgggtgctggccttcggcatcggcctgacccccttcctgggctggaacagcaaggacagcgccaccaacaactgcacagagccctgggatggcaccaccaatgaaagctgctgcctggtgaagtgcctgtttgaaaatgtggtgcccatgagctacatggtgtacttcaacttcttcggctgtgtgctgccccccctgctgatcatgctggtgatctacatcaagatcttcctggtggcctgccggcagctgcagaggacagagctgatggaccacagcaggaccaccctgcagcgggagatccacgccgccaagagcctggccatgattgtgggcatctttgccctgtgctggctgcctgtgcatgctgtgaactgtgtgaccctcttccagcctgcccagggcaagaacaagcccaagtgggccatgaacatggccatcctgctgagccacgccaacagcgtggtgaaccccatcgtgtatgcctacagaaacagagacttccgctacaccttccacaagatcatcagccgctacctgctgtgccaggctgatgtgaagtctggaaatggccaggccggcgtgcagcctgccctgggcgtgggcctgtag

SEQ ID NO: 142819 - DNA, 957 bp, synthetic construct
  misc_feature 1..957: note = Description of Artificial Sequence: Synthetic coding sequence
  source 1..957: mol_type = other DNA
atgcccaacaacagcacagccctgagcctggccaacgtgacctacatcaccatggagatcttcatcggcctgtgtgccatcgtgggcaatgtgctggtgatctgtgtggtgaagctgaaccccagcctgcagaccaccaccttctacttcatcgtgtccctggccctggccgacattgctgtgggcgtgctggtgatgcccctggccatcgtggtgtccctgggcatcaccatccacttctacagctgcctcttcatgacctgcctgctgctgatcttcacccacgccagcatcatgagcctgctggccatcgctgtggaccgctacctgcgggtgaagctgactgtgcgctacaagagggtgaccacccaccggcgcatctggctggccctgggcctgtgctggctggtgtccttcctggtgggcctgacccccatgtttggctggaacatgaagctgaccagcgagtaccacagaaatgtgaccttcctgagctgccagtttgtgtctgtgatgaggatggactacatggtgtacttctccttcctgacctggatcttcatccccctggtggtgatgtgtgccatctacctggacatcttctacatcatccggaacaagctgagcctgaacctgagcaacagcaaggagaccggggccttctacggccgggagttcaagacagccaagagcctcttcctggtgctcttcctgtttgccctgtcctggctgcccctgagcatcatcaactgcatcatctacttcaacggggaggtgccccagctggtgctgtacatgggcatcctgctgagccacgccaacagcatgatgaaccccatcgtgtatgcctacaagatcaagaagttcaaggagacctacctgctgatcctgaaggcctgtgtggtgtgccaccccagcgacagcctggacaccagcattgagaagaacagcgagtag

SEQ ID NO: 142820 - DNA, 537 bp, synthetic construct
  misc_feature 1..537: note = Description of Artificial Sequence: Synthetic coding sequence
  source 1..537: mol_type = other DNA
atggagggcagccctgctggccccatcgagcagaaggaggcccgctgggagagctcctgggaggagcagcctgactggaccctgggctgcctgagccctgagagccacaccaaccacgtggccctgcgggacaccggcaaccagctgattgtgaccatgagctgcctgaccaaggaggacaccggctggtactggtgtggcatccagagggactttgccagagatgacatggacttcacagagctgattgtgacagatgacaagggcaccctggccaatgacttctggagcggcaaggacctgagcggcaacaagaccaggagctgcaaggcccccaaggtggtgaggaaggctgacaggagcaggaccagcatcctgatcatctgcatcctgatcaccggcctgggcatcatcagcgtcatcagccacctgaccaagagaagaagaagccagaggaacagaagagtgggcaacaccctgaagcccttcagccgggtgctgacccccaaggagatggcccccacagagcagatgtag

SEQ ID NO: 142821 - DNA, 1044 bp, synthetic construct
  misc_feature 1..1044: note = Description of Artificial Sequence: Synthetic coding sequence
  source 1..1044: mol_type = other DNA
atgcccaacaacagcacagccctgagcctggccaacgtgacctacatcaccatggagatcttcatcggcctgtgtgccatcgtgggcaatgtgctggtgatctgtgtggtgaagctgaaccccagcctgcagaccaccaccttctacttcatcgtgtccctggccctggccgacattgctgtgggcgtgctggtgatgcccctggccatcgtggtgtccctgggcatcaccatccacttctacagctgcctcttcatgacctgcctgctgctgatcttcacccacgccagcatcatgagcctgctggccatcgctgtggaccgctacctgcgggtgaagctgactgtgcgcttccgcatccctggcctgcccggctgcatcctgtccttccagctgaaggtgtgcttcctgcctgtgatgtggctgttcatcctgctgagcctggccctgatcagtgatgccatggtgatggatgagaaggtgaagaggagctttgtgctggacacagccagcgccatctgcaactacaatgcccactacaagaaccaccccaagtactggtgccggggctacttccgggactactgcaacatcatcgccttcagccccaacagcaccaaccacgtggccctgcgggacaccggcaaccagctgattgtgaccatgagctgcctgaccaaggaggacaccggctggtactggtgtggcatccagagggactttgccagagatgacatggacttcacagagctgattgtgacagatgacaagggcaccctggccaatgacttctggagcggcaaggacctgagcggcaacaagaccaggagctgcaaggcccccaaggtggtgaggaaggctgacaggagcaggaccagcatcctgatcatctgcatcctgatcaccggcctgggcatcatcagcgtcatcagccacctgaccaagagaagaagaagccagaggaacagaagagtgggcaacaccctgaagcccttcagccgggtgctgacccccaaggagatggcccccacagagcagatgtag

SEQ ID NO: 142822 - DNA, 801 bp, synthetic construct
  misc_feature 1..801: note = Description of Artificial Sequence: Synthetic coding sequence
  source 1..801: mol_type = other DNA
atggagggcagccctgctggccccatcgagcagaaggaggcccgctgggagagctcctgggaggagcagcctgactggaccctgggctgcctgagccctgagagccagttccgcatccctggcctgcccggctgcatcctgtccttccagctgaaggtgtgcttcctgcctgtgatgtggctgttcatcctgctgagcctggccctgatcagtgatgccatggtgatggatgagaaggtgaagaggagctttgtgctggacacagccagcgccatctgcaactacaatgcccactacaagaaccaccccaagtactggtgccggggctacttccgggactactgcaacatcatcgccttcagccccaacagcaccaaccacgtggccctgcgggacaccggcaaccagctgattgtgaccatgagctgcctgaccaaggaggacaccggctggtactggtgtggcatccagagggactttgccagagatgacatggacttcacagagctgattgtgacagatgacaagggcaccctggccaatgacttctggagcggcaaggacctgagcggcaacaagaccaggagctgcaaggcccccaaggtggtgaggaaggctgacaggagcaggaccagcatcctgatcatctgcatcctgatcaccggcctgggcatcatcagcgtcatcagccacctgaccaagagaagaagaagccagaggaacagaagagtgggcaacaccctgaagcccttcagccgggtgctgacccccaaggagatggcccccacagagcagatgtag

SEQ ID NO: 142823 - DNA, 624 bp, synthetic construct
  misc_feature 1..624: note = Description of Artificial Sequence: Synthetic coding sequence
  source 1..624: mol_type = other DNA
tgaccccaggccctgcagggcccccccagcagcaatgatgccatggtgatggatgagaaggtgaagaggagctttgtgctggacacagccagcgccatctgcaactacaatgcccactacaagaaccaccccaagtactggtgccggggctacttccgggactactgcaacatcatcgccttcagccccaacagcaccaaccacgtggccctgcgggacaccggcaaccagctgattgtgaccatgagctgcctgaccaaggaggacaccggctggtactggtgtggcatccagagggactttgccagagatgacatggacttcacagagctgattgtgacagatgacaagggcaccctggccaatgacttctggagcggcaaggacctgagcggcaacaagaccaggagctgcaaggcccccaaggtggtgaggaaggctgacaggagcaggaccagcatcctgatcatctgcatcctgatcaccggcctgggcatcatcagcgtcatcagccacctgaccaagagaagaagaagccagaggaacagaagagtgggcaacaccctgaagcccttcagccgggtgctgacccccaaggagatggcccccacagagcagatgtag

SEQ ID NO: 142824 - DNA, 348 bp, synthetic construct
  misc_feature 1..348: note = Description of Artificial Sequence: Synthetic coding sequence
  source 1..348: mol_type = other DNA
tgacccagcagccacgtggccctgcacagcaccctgctgggcagccacttcagcaccaaccacgtggccctgcgggacaccggcaaccagctgattgtgaccatgagctgcctgaccaaggaggacaccggctggtactggtgtggcatccagagggactttgccagagatgacatggacttcacagagctgattgtgacagatgacaagggcaccctggccaatgacttctggagcggcaaggacctgagcggcaacaagaccaggagctgcaaggcccccaaggtggtgaggaaggctgacaggagcaggaccagcatcctgatcatctgcatcctgatcacctag

SEQ ID NO: 142825 - DNA, 519 bp, synthetic construct
  misc_feature 1..519: note = Description of Artificial Sequence: Synthetic coding sequence
  source 1..519: mol_type = other DNA
ggccccatcgagcagaaggaggcccgctgggagagctcctgggaggagcagcctgactggaccctgggctgcctgagccctgagagccacaccaaccacgtggccctgcgggacaccggcaaccagctgattgtgaccatgagctgcctgaccaaggaggacaccggctggtactggtgtggcatccagagggactttgccagagatgacatggacttcacagagctgattgtgacagatgacaagggcaccctggccaatgacttctggagcggcaaggacctgagcggcaacaagaccaggagctgcaaggcccccaaggtggtgaggaaggctgacaggagcaggaccagcatcctgatcatctgcatcctgatcaccggcctgggcatcatcagcgtcatcagccacctgaccaagagaagaagaagccagaggaacagaagagtgggcaacaccctgaagcccttcagccgggtgctgacccccaaggagatggcccccacagagcagatgtag

SEQ ID NO: 142826 - DNA, 1092 bp, synthetic construct
  misc_feature 1..1092: note = Description of Artificial Sequence: Synthetic coding sequence
  source 1..1092: mol_type = other DNA
atggcccagaccccagcctttgacaagcccaaggtggagctgcacgtgcacctggatggcagcatcaagccagagaccatcctgtactacggcagaagaagaggcatcgccctgcctgccaacacagctgagggcctgctgaatgtcatcggcatggacaagcccctgaccctgcctgacttcctggccaagtttgactactacatgcctgccatcgccggctgccgggaggccatcaagagaattgcctatgaatttgtggagatgaaggccaaggagggcgtggtgtatgtggaggtgcgctacagcccccacctgctggccaacagcaaggtggagcccatcccctggaaccaggccgagggggacctgaccccagatgaggtggtggccctggtgggccagggcctgcaggagggggagcgggactttggagtgaaggcccggagcatcctgtgctgcatgaggcaccagcccaactggagccccaaggtggtggagctgtgcaagaagtaccagcagcagacagtggtggccatcgacctggccggagatgagaccatccctggcagcagcctgctgcccggccacgtgcaggcctaccaggaggccgtgaagagcggcatccacaggacagtgcatgctggggaggtgggcagcgctgaggtggtgaaggaggccgtggacatcctgaagacagagcggctgggccacggctaccacaccctggaggaccaggccctgtacaaccggctgcggcaggagaacatgcactttgagatctgcccctggagcagctacctgactggagcctggaagccagacacagagcacgctgtgatccggctgaagaatgaccaggccaactacagcctgaacacagatgaccccctcatcttcaagagcaccctggacacagactaccagatgaccaagagggacatgggcttcacagaggaggagttcaagaggctgaacatcaatgctgccaagagcagcttcctgcctgaagatgagaagcgggagctgctggacctgctgtacaaggcctacggcatgccacccagcgccagcgctggccagaacctgtag

SEQ ID NO: 142827 - DNA, 1731 bp, synthetic construct
  misc_feature 1..1731: note = Description of Artificial Sequence: Synthetic coding sequence
  source 1..1731: mol_type = other DNA
atggccagcaacaaccactggttccagagcagccaggtgcccagctttgcccagatgctgaagaagaacctgcctgtgcagcctgccaccaagaccatcaccacccccaccggctggagcagcgagagctatggcctgagcaagatggccagcaaggtgacccaggtgactggaaacttccctgagcccctgctgagcaagaacctgagcagcatcagcaaccctgtgctgccccccaagaagatccccaaggagttcatcatgaagtacaagagaggagagatcaaccctgtgtctgccctgcaccagtttgcccagatgcagagggtgcagctggacctgaaggagaccgtgaccactggaaatgtgatgggcccctactttgccttctgtgctgtggtggatggcatccagtacaagacaggcctgggccagaacaagaaggagagccgcagcaatgctgccaagctggccctggatgagctgctgcagctggatgagcctgagccccgcatcctggagaccagcggccccccacccttccctgctgagcctgtggtgctgtctgagctggcctacgtgtccaaggtgcactatgagggccgccacatccagtatgccaagatcagccagatcgtgaaggagcgcttcaaccagctgatcagcaacagaagtgagtacctgaagtacagcagcagcctggccgccttcatcatcgagcgggccggccagcacgaggtggtggccatcggcaccggggagtacaactacagccaggacatcaagccagatggccgggtgctgcatgacacccatgctgtggtgacagcccggcgcagcctgctgcgctacttctaccggcagctgctgctcttctacagcaagaacccagccatgatggagaagagcatcttctgcacagagcccaccagcaacctgctgaccctgaagcagaacatcaacatctgcctgtacatgaaccagctgcccaagggcagcgcccagatcaagagccagctgcggctgaacccccacagcatcagcgcctttgaggccaatgaggagctgtgcctgcacgtggccgtggagggcaagatctacctgactgtgtactgccccaaggatggagtgaaccgcatcagctccatgagcagcagtgacaagctgacccgctgggaggtgctgggcgtgcagggcgccctgctgagccacttcatccagcctgtgtacatcagcagcatcctgattggagatggcaactgcagcgacacccggggcctggagatcgccatcaagcagagggtggatgatgccctgaccagcaagctgcccatgttctacctggtgaaccggccccacatcagcctggtgcccagcgcctaccccctgcagatgaacctggagtacaagttcctgagcctgaactgggcccagggagatgtgtccctggagatcgtggatggcctgagcggcaagatcacagagagcagccccttcaagagcggcatgtccatggccagccggctgtgcaaggccgccatgctgagccgcttcaacctgctggccaaggaggccaagaaggagctgctggaggccggcacctaccacgccgccaagtgcatgtctgccagctaccaggaggccaagtgcaagctgaagagctacctgcagcagcacggctacggctcctggatcgtgaagagcccctgcatcgagcagttcaacatgtag

SEQ ID NO: 142828 - DNA, 1698 bp, synthetic construct
  misc_feature 1..1698: note = Description of Artificial Sequence: Synthetic coding sequence
  source 1..1698: mol_type = other DNA
atggccagcaacaaccactggttccagagcagccaggtgcccagctttgcccagatgctgaagaagaacctgcctgtgcagcctgccaccaagaccatcaccacccccaccggctggagcagcgagagctatggcctgagcaagatggccagcaaggtgacccaggtgactggaaacttccctgagcccctgctgagcaagaacctgagcagcatcagcaaccctgtgctgccccccaagaagatccccaaggagttcatcatgaagtacaagagaggagagatcaaccctgtgtctgccctgcaccagtttgcccagatgcagagggtgcagctggacctgaaggagaccgtgaccactggaaatgtgatgggcccctactttgccttctgtgctgtggtggatggcatccagtacaagacaggcctgggccagaacaagaaggagagccgcagcaatgctgccaagctggccctggatgagctgctgcagctggatgagcctgagccccgcatcctggagaccagcggccccccacccttccctgctgagcctgtggtgctgtctgagctggcctacgtgtccaaggtgcactatgagggccgccacatccagtatgccaagatcagccagatcgtgaaggagcgcttcaaccagctgatcagcaacagaagtgagtacctgaagtacagcagcagcctggccgccttcatcatcgagcgggccggccagcacgaggtggtggccatcggcaccggggagtacaactacagccaggacatcaagccagatggccgggtgctgcatgacacccatgctgtggtgacagcccggcgcagcctgctgagcaagaacccagccatgatggagaagagcatcttctgcacagagcccaccagcaacctgctgaccctgaagcagaacatcaacatctgcctgtacatgaaccagctgcccaagggcagcgcccagatcaagagccagctgcggctgaacccccacagcatcagcgcctttgaggccaatgaggagctgtgcctgcacgtggccgtggagggcaagatctacctgactgtgtactgccccaaggatggagtgaaccgcatcagctccatgagcagcagtgacaagctgacccgctgggaggtgctgggcgtgcagggcgccctgctgagccacttcatccagcctgtgtacatcagcagcatcctgattggagatggcaactgcagcgacacccggggcctggagatcgccatcaagcagagggtggatgatgccctgaccagcaagctgcccatgttctacctggtgaaccggccccacatcagcctggtgcccagcgcctaccccctgcagatgaacctggagtacaagttcctgagcctgaactgggcccagggagatgtgtccctggagatcgtggatggcctgagcggcaagatcacagagagcagccccttcaagagcggcatgtccatggccagccggctgtgcaaggccgccatgctgagccgcttcaacctgctggccaaggaggccaagaaggagctgctggaggccggcacctaccacgccgccaagtgcatgtctgccagctaccaggaggccaagtgcaagctgaagagctacctgcagcagcacggctacggctcctggatcgtgaagagcccctgcatcgagcagttcaacatgtag

SEQ ID NO: 142829 - DNA, 726 bp, synthetic construct
  misc_feature 1..726: note = Description of Artificial Sequence: Synthetic coding sequence
  source 1..726: mol_type = other DNA
atggccagcaacaaccactggttccagagcagccaggtgcccagctttgcccagatgctgaagaagaacctgcctgtgcagcctgccaccaagaccatcaccacccccaccggctggagcagcgagagctatggcctgagcaagatggccagcaaggtgacccaggtgactggaaacttccctgagcccctgctgagcaagaacctgagcagcatcagcaaccctgtgctgccccccaagaagatccccaaggagttcatcatgaagtacaagagaggagagatcaaccctgtgtctgccctgcaccagtttgcccagatgcagagggtgcagctggacctgaaggagaccgtgaccactggaaatgtgatgggcccctactttgccttctgtgctgtggtggatggcatccagtacaagacaggcctgggccagaacaagaaggagagccgcagcaatgctgccaagctggccctggatgagctgctgcagctggatgagcctgagccccgcatcctggagaccagcggccccccacccttccctgctgagcctgtggtgctgtctgagctggcctacgtgtccaaggtgcactatgagggccgccacatccagtatgccaagatcagccagatcgtgaaggagcgcttcaaccagctgatcagcaacagaagtgagtacctgaagtacagcagcagcctggccgccttcatcattgaaagatag

SEQ ID NO: 142830 - DNA, 471 bp, synthetic construct
  misc_feature 1..471: note = Description of Artificial Sequence: Synthetic coding sequence
  source 1..471: mol_type = other DNA
atggccagcaacaaccactggttccagagcagccaggtgcccagctttgcccagatgctgaagaagaacctgcctgtgcagcctgccaccaagaccatcaccacccccaccggctggagcagcgagagctatggcctgagcaagatggccagcaaggtgacccaggtgactggaaacttccctgagcccctgctgagcaagaacctgagcagcatcagcaaccctgtgctgccccccaagaagatccccaaggagttcatcatgaagtacaagagaggagagatcaaccctgtgtctgccctgcaccagtttgcccagatgcagagggtgcagctggacctgaaggagaccgtgaccactggaaatgtgatgggcccctactttgccttctgtgctgtggtggatggcatccagtacaagacaggcctgggccagaacaagaaggagagccgcagcaatgctgccaagtag

SEQ ID NO: 142831 - DNA, 1677 bp, synthetic construct
  misc_feature 1..1677: note = Description of Artificial Sequence: Synthetic coding sequence
  source 1..1677: mol_type = other DNA
atgctgaagaagaacctgcctgtgcagcctgccaccaagaccatcaccacccccaccggctggagcagcgagagctatggcctgagcaagatggccagcaaggtgacccaggtgactggaaacttccctgagcccctgctgagcaagaacctgagcagcatcagcaaccctgtgctgccccccaagaagatccccaaggagttcatcatgaagtacaagagaggagagatcaaccctgtgtctgccctgcaccagtttgcccagatgcagagggtgcagctggacctgaaggagaccgtgaccactggaaatgtgatgggcccctactttgccttctgtgctgtggtggatggcatccagtacaagacaggcctgggccagaacaagaaggagagccgcagcaatgctgccaagctggccctggatgagctgctgcagctggatgagcctgagccccgcatcctggagaccagcggccccccacccttccctgctgagcctgtggtgctgtctgagctggcctacgtgtccaaggtgcactatgagggccgccacatccagtatgccaagatcagccagatcgtgaaggagcgcttcaaccagctgatcagcaacagaagtgagtacctgaagtacagcagcagcctggccgccttcatcatcgagcgggccggccagcacgaggtggtggccatcggcaccggggagtacaactacagccaggacatcaagccagatggccgggtgctgcatgacacccatgctgtggtgacagcccggcgcagcctgctgcgctacttctaccggcagctgctgctcttctacagcaagaacccagccatgatggagaagagcatcttctgcacagagcccaccagcaacctgctgaccctgaagcagaacatcaacatctgcctgtacatgaaccagctgcccaagggcagcgcccagatcaagagccagctgcggctgaacccccacagcatcagcgcctttgaggccaatgaggagctgtgcctgcacgtggccgtggagggcaagatctacctgactgtgtactgccccaaggatggagtgaaccgcatcagctccatgagcagcagtgacaagctgacccgctgggaggtgctgggcgtgcagggcgccctgctgagccacttcatccagcctgtgtacatcagcagcatcctgattggagatggcaactgcagcgacacccggggcctggagatcgccatcaagcagagggtggatgatgccctgaccagcaagctgcccatgttctacctggtgaaccggccccacatcagcctggtgcccagcgcctaccccctgcagatgaacctggagtacaagttcctgagcctgaactgggcccagggagatgtgtccctggagatcgtggatggcctgagcggcaagatcacagagagcagccccttcaagagcggcatgtccatggccagccggctgtgcaaggccgccatgctgagccgcttcaacctgctggccaaggaggccaagaaggagctgctggaggccggcacctaccacgccgccaagtgcatgtctgccagctaccaggaggccaagtgcaagctgaagagctacctgcagcagcacggctacggctcctggatcgtgaagagcccctgcatcgagcagttcaacatgtag

SEQ ID NO: 142832 - DNA, 3810 bp, synthetic construct
  misc_feature 1..3810: note = Description of Artificial Sequence: Synthetic coding sequence
  source 1..3810: mol_type = other DNA
atgatgagccccatctgtgaccagaccatcgacagccggctgaaggtggagaaggccacctggtggggccgggtgggcggcggcagccggccccactggcagagccctggggtgcggccctgcccagaggaggtgcaggaccccggctacagcctgagcggctactacacccaccccttccagggctatgagcaccggcagctgcgctaccagcagcccggccctggcagcagccccagcagcttcctgctgaagcagatcgagttcctgaagggccagctgcctgaggcccctgtgattggcaagcagacccccagcctgccccccagcctgcccggcctgcggccccgcttccctgtgctgctggccagcagcacccggggccggcaggtggacatccggggcgtgccccggggcgtgcacctgcggagccagggcctgcagaggggcttccagcaccccagcccccggggccgcagcctgccccagaggggcgtggactgcctgagcagccacttccaggagctgagcatctaccaggaccaggagcagaggatcctgaagttcctggaggagctgggggagggcaaggccaccacagcccatgacctgagcggcaagctgggcacccccaagaaggagatcaacagagtgctgtacagcctggccaagaagggcaagctgcagaaggaggccggcaccccacccctgtggaagattgctgtgtccacccaggcctggaaccagcacagcggcgtggtgcggccagatggccacagccagggcgcccccaacagcgaccccagcctggagccagaagatagaaacagcacctctgtgtctgaggacctgctggagcccttcatcgctgtgtctgcccaggcctggaaccagcacagcggcgtggtgcggccagacagccacagccagggcagccccaacagcgaccccggcctggagcctgaggacagcaacagcaccagcgccctggaggaccccctggagttcctggacatggccgagatcaaggagaagatctgtgactacctgttcaacgtgtctgacagcagcgccctgaacctggccaagaacatcggcctgaccaaggcccgggacatcaatgctgtgctgattgacatggagcggcagggagatgtgtaccggcagggcaccaccccacccatctggcacctgacagacaagaagcgggagaggatgcagatcaagaggaacaccaacagcgtgcctgagacagccccagctgccatccctgagaccaagagaaatgctgagttcctgacctgcaacatccccaccagcaatgccagcaacaacatggtgaccacagagaaggtggagaatggccaggagcccgtcatcaagctggagaaccggcaggaggcccggcctgagcccgcccggctgaagccccctgtgcactacaacggccccagcaaggccggctacgtggactttgaaaatggccagtgggccacagatgacatcccagatgacctgaacagcatccgggccgcccctggagagttccgggccatcatggagatgcccagcttctacagccacggcctgccccgctgcagcccctacaagaagctgacagagtgccagctgaagaaccccatcagcggcctgctggagtatgcccagtttgccagccagacctgtgagttcaacatgattgagcagagcggcccccctcatgagccccgcttcaagttccaggtggtgatcaatggccgggagttccccccagctgaggccggcagcaagaaggtggccaagcaggatgctgccatgaaggccatgaccatcctgctggaggaggccaaggccaaggacagcggcaagtctgaggagagcagccactacagcacagagaaggagagcgagaagacagctgagagccagacccccacccccagcgccaccagcttcttcagcggcaagagccctgtgaccaccctgctggagtgcatgcacaagctgggcaacagctgtgagttccggctgctgagcaaggagggccctgcccacgagcccaagttccagtactgtgtggccgtgggcgcccagaccttccccagcgtgtctgcccccagcaagaaggtggccaagcagatggctgctgaggaggccatgaaggccctgcacggggaggccaccaacagcatggccagtgacaaccagcctgagggcatgatcagcgagagcctggacaacctggagagcatgatgcccaacaaggtgaggaagattggagagctggtgcgctacctgaacaccaaccctgtgggcggcctgctggagtatgcccggagccacggctttgctgctgagttcaagctggtggaccagagcggcccccctcatgagcccaagtttgtgtaccaggccaaggtgggcggccgctggttccctgctgtgtgtgcccacagcaagaagcagggcaagcaggaggccgcagatgctgccctgcgggtgctgattggagaaaatgagaaggccgagaggatgggcttcacagaggtgacccctgtgactggagccagcctgcggaggaccatgctgctgctgagccgcagccctgaggcccagcccaagaccctgcccctgaccggcagcaccttccatgaccagatcgccatgctgagccaccgctgcttcaacaccctgaccaacagcttccagcccagcctgctgggcaggaagatcctggccgccatcatcatgaagaaggacagcgaggacatgggcgtggtggtgtccctgggcaccggcaacagatgtgtgaagggggacagcctgagcctgaagggggagaccgtgaatgactgccacgccgagatcatcagcagaagaggcttcatccgcttcctgtacagcgagctgatgaagtacaacagccagacagccaaggacagcatctttgagcccgccaagggcggggagaagctgcagatcaagaagacagtgtccttccacctgtacatcagcacagccccctgtggagatggagccctgtttgacaagagctgcagcgaccgggccatggagagcacagagagccgccactaccctgtgtttgagaaccccaagcagggcaagctgcggaccaaggtggagaatggagagggcaccatccctgtggagagcagtgacatcgtgcccacctgggatggcatccggctgggggagcggctgcggaccatgagctgcagcgacaagatcctgcgctggaatgtgctgggcctgcagggcgccctgctgacccacttcctgcagcccatctacctgaagtctgtgaccctgggctacctgttcagccagggccacctgacccgggccatctgctgccgggtgaccagagatggcagcgcctttgaagatggcctgcggcaccccttcatcgtgaaccaccccaaggtgggccgggtgtccatctatgacagcaagaggcagagcggcaagaccaaggagacctctgtgaactggtgcctggctgatggctatgacctggagatcctggatggcacccggggcaccgtggatggccccagaaatgagctgagccgggtgtccaagaagaacatcttcctgctcttcaagaagctgtgcagcttccgctacagaagagacctgctgcggctgtcctatggagaggccaagaaggccgcccgggactatgaaacagccaagaactacttcaagaagggcctgaaggacatgggctacggcaactggatcagcaagccccaggaggagaagaacttctacctgtgccctgtgtag

SEQ ID NO: 142833 - DNA, 159 bp, synthetic construct
  misc_feature 1..159: note = Description of Artificial Sequence: Synthetic coding sequence
  source 1..159: mol_type = other DNA
atggccaatgagcacaccctcatccacccagccagcattgaggaccccctggaggcccggcccatgtctgatgaagatcctgaagatgaagatgccctgcctgcccgctggaagaaggagatgggcaggaagaggaagaggaccatcgccaccctgtag

SEQ ID NO: 142834 - DNA, 2106 bp, synthetic construct
  misc_feature 1..2106: note = Description of Artificial Sequence: Synthetic coding sequence
  source 1..2106: mol_type = other DNA
atggacattgaagatgaggagaacatgagcagcagcagcacagatgtgaaggagaacagaaacctggacaacgtgagccccaaggatggcagcaccccaggccctggagagggcagccagctgagcaatggaggcggcggcggccctggcaggaagaggcccctggaggagggcagcaatggccacagcaagtaccgcctgaagaagaggaggaagaccccaggccctgtgctgcccaagaatgccctgatgcagctgaatgagatcaagccaggcctgcagtacaccctgctgagccagacaggccctgtgcacgcccccctgtttgtgatgtctgtggaggtgaatggccaggtgtttgagggcagcggccccaccaagaagaaggccaagctgcacgccgctgagaaggccctgcggagctttgtgcagttccccaatgccagcgaggcccacctggccatgggccgcaccctgtctgtgaacacagacttcaccagtgaccaggccgacttcccagacaccctcttcaacggctttgagaccccagacaaggccgagccccccttctacgtgggcagcaatggagatgacagcttcagcagcagcggggacctgagcctgagcgccagccctgtgcctgccagcctggcccagccccccctgcctgtgctgccccccttccccccacccagcggcaagaaccctgtgatgatcctgaatgagctgcggcccggcctgaagtatgacttcctgtctgagagcggggagagccacgccaagagctttgtgatgtctgtggtggtggatggccagttctttgagggcagcggcaggaacaagaagctggccaaggcccgggccgcccagagcgccctggccgccatcttcaacctgcacctggaccagacccccagccggcagcccatccccagcgagggcctgcagctgcacctgccccaggtgctggctgatgctgtgtcccggctggtgctgggcaagtttggagacctgacagacaacttcagcagcccccacgcccggaggaaggtgctggccggcgtggtgatgaccactggaacagatgtgaaggatgccaaggtgatctctgtgtccacaggcaccaagtgcatcaatggagagtacatgtctgaccggggcctggccctgaatgactgccacgccgagatcatcagccgccgcagcctgctgcgcttcctgtacacccagctggagctgtacctgaacaacaaggatgaccagaagaggagcatcttccagaagtctgagcggggcggcttccggctgaaggaaaatgtgcagttccacctgtacatcagcaccagcccctgtggagatgcccgcatcttcagcccccatgagcccatcctggaggagcctgctgacagacaccccaacaggaaggcccggggccagctgcggaccaagattgagagcggggagggcaccatccctgtgcgcagcaatgccagcatccagacctgggatggagtgctgcagggcgagcggctgctgaccatgagctgcagcgacaagatcgcccgctggaatgtggtgggcatccagggcagcctgctgagcatctttgtggagcccatctacttcagcagcatcatcctgggcagcctgtaccacggggaccacctgagccgggccatgtaccagaggatcagcaacatcgaggacctgccccccctgtacaccctgaacaagcccctgctgagcggcatcagcaatgctgaggcccggcagcccgggaaggcccccaacttctctgtgaactggacagtgggggacagcgccattgaagtcatcaatgccaccaccgggaaggatgagctgggccgggccagccggctgtgcaagcacgccctgtactgccgctggatgagggtgcacggcaaggtgcccagccacctgctgcggagcaagatcaccaagcccaacgtgtaccacgagagcaagctggccgccaaggagtaccaggccgccaaggcccggctcttcaccgccttcatcaaggccggcctgggcgcctgggtggagaagcccacagagcaggaccagttcagcctgaccccctag

SEQ ID NO: 142835 - DNA, 2226 bp, synthetic construct
  misc_feature 1..2226: note = Description of Artificial Sequence: Synthetic coding sequence
  source 1..2226: mol_type = other DNA
atggacattgaagatgaggagaacatgagcagcagcagcacagatgtgaaggagaacagaaacctggacaacgtgagccccaaggatggcagcaccccaggccctggagagggcagccagctgagcaatggaggcggcggcggccctggcaggaagaggcccctggaggagggcagcaatggccacagcaagtaccgcctgaagaagaggaggaagaccccaggccctgtgctgcccaagaatgccctgatgcagctgaatgagatcaagccaggcctgcagtacaccctgctgagccagacaggccctgtgcacgcccccctgtttgtgatgtctgtggaggtgaatggccaggtgtttgagggcagcggccccaccaagaagaaggccaagctgcacgccgctgagaaggccctgcggagctttgtgcagttccccaatgccagcgaggcccacctggccatgggccgcaccctgtctgtgaacacagacttcaccagtgaccaggccgacttcccagacaccctcttcaacggctttgagaccccagacaaggccgagccccccttctacgtgggcagcaatggagatgacagcttcagcagcagcggggacctgagcctgagcgccagccctgtgcctgccagcctggcccagccccccctgcctgtgctgccccccttccccccacccagcggcaagaaccctgtgatgatcctgaatgagctgcggcccggcctgaagtatgacttcctgtctgagagcggggagagccacgccaagagctttgtgatgtctgtggtggtggatggccagttctttgagggcagcggcaggaacaagaagctggccaaggcccgggccgcccagagcgccctggccgccatcttcaacctgcacctggaccagacccccagccggcagcccatccccagcgagggcctgcagctgcacctgccccaggtgctggctgatgctgtgtcccggctggtgctgggcaagtttggagacctgacagacaacttcagcagcccccacgcccggaggaaggtgctggccggcgtggtgatgaccactggaacagatgtgaaggatgccaaggtgatctctgtgtccacaggcaccaagtgcatcaatggagagtacatgtctgaccggggcctggccctgaatgactgccacgccgagatcatcagccgccgcagcctgctgcgcttcctgtacacccagctggagctgtacctgaacaacaaggatgaccagaagaggagcatcttccagaagtctgagcggggcggcttccggctgaaggaaaatgtgcagttccacctgtacatcagcaccagcccctgtggagatgcccgcatcttcagcccccatgagcccatcctggagggcagccgcagctacacccaggccggcgtgcagtggtgcaaccacggcagcctgcagcccaggcctcctggcctgctgagtgaccccagcaccagcaccttccagggcgccggcaccacagagcctgctgacagacaccccaacaggaaggcccggggccagctgcggaccaagattgagagcggggagggcaccatccctgtgcgcagcaatgccagcatccagacctgggatggagtgctgcagggcgagcggctgctgaccatgagctgcagcgacaagatcgcccgctggaatgtggtgggcatccagggcagcctgctgagcatctttgtggagcccatctacttcagcagcatcatcctgggcagcctgtaccacggggaccacctgagccgggccatgtaccagaggatcagcaacatcgaggacctgccccccctgtacaccctgaacaagcccctgctgagcggcatcagcaatgctgaggcccggcagcccgggaaggcccccaacttctctgtgaactggacagtgggggacagcgccattgaagtcatcaatgccaccaccgggaaggatgagctgggccgggccagccggctgtgcaagcacgccctgtactgccgctggatgagggtgcacggcaaggtgcccagccacctgctgcggagcaagatcaccaagcccaacgtgtaccacgagagcaagctggccgccaaggagtaccaggccgccaaggcccggctcttcaccgccttcatcaaggccggcctgggcgcctgggtggagaagcccacagagcaggaccagttcagcctgaccccctag

SEQ ID NO: 142836 - DNA, 2145 bp, synthetic construct
  misc_feature 1..2145: note = Description of Artificial Sequence: Synthetic coding sequence
  source 1..2145: mol_type = other DNA
atggacattgaagatgaggagaacatgagcagcagcagcacagatgtgaaggagaacagaaacctggacaacgtgagccccaaggatggcagcaccccaggccctggagagggcagccagctgagcaatggaggcggcggcggccctggcaggaagaggcccctggaggagggcagcaatggccacagcaagtaccgcctgaagaagaggaggaagaccccaggccctgtgctgcccaagaatgccctgatgcagctgaatgagatcaagccaggcctgcagtacaccctgctgagccagacaggccctgtgcacgcccccctgtttgtgatgtctgtggaggtgaatggccaggtgtttgagggcagcggccccaccaagaagaaggccaagctgcacgccgctgagaaggccctgcggagctttgtgcagttccccaatgccagcgaggcccacctggccatgggccgcaccctgtctgtgaacacagacttcaccagtgaccaggccgacttcccagacaccctcttcaacggctttgagaccccagacaaggccgagccccccttctacgtgggcagcaatggagatgacagcttcagcagcagcggggacctgagcctgagcgccagccctgtgcctgccagcctggcccagccccccctgcctgtgctgccccccttccccccacccagcggcaagaaccctgtgatgatcctgaatgagctgcggcccggcctgaagtatgacttcctgtctgagagcggggagagccacgccaagagctttgtgatgtctgtggtggtggatggccagttctttgagggcagcggcaggaacaagaagctggccaaggcccgggccgcccagagcgccctggccgccatcttcaacctgcacctggaccagacccccagccggcagcccatccccagcgagggcctgcagctgcacctgccccaggtgctggctgatgctgtgtcccggctggtgctgggcaagtttggagacctgacagacaacttcagcagcccccacgcccggaggaaggtgctggccggcgtggtgatgaccactggaacagatgtgaaggatgccaaggtgatctctgtgtccacaggcaccaagtgcatcaatggagagtacatgtctgaccggggcctggccctgaatgactgccacgccgagatcatcagccgccgcagcctgctgcgcttcctgtacacccagctggagctgtacctgaacaacaaggatgaccagaagaggagcatcttccagaagtctgagcggggcggcttccggctgaaggaaaatgtgcagttccacctgtacatcagcaccagcccctgtggagatgcccgcatcttcagcccccatgagcccatcctggagggcagccgcagctacacccaggccggcgtgcagtggtgcaaccacggcagcctgcagcccaggcctcctggcctgctgagtgaccccagcaccagcaccttccagggcgccggcaccacagagcctgctgacagacaccccaacaggaaggcccggggccagctgcggaccaagattgagagcggggagggcaccatccctgtgcgcagcaatgccagcatccagacctgggatggagtgctgcagggcgagcggctgctgaccatgagctgcagcgacaagatcgcccgctggaatgtggtgggcatccagggcagcctgctgagcatctttgtggagcccatctacttcagcagcatcatcctgggcagcctgtaccacggggaccacctgagccgggccatgtaccagaggatcagcaacatcgaggacctgccccccctgtacaccctgaacaagcccctgctgagcggcatcagcaatgctgaggcccggcagcccgggaaggcccccaacttctctgtgaactggacagtgggggacagcgccattgaagtcatcaatgccaccaccgggaaggatgagctgggccgggccagccggctgtgcaagcacgccctgtactgccgctggatgagggtgcacggcaaggtgcccagccacctgctgcggagcaagatcaccaagcccaacgtgtaccacgagagcaagctggccgccaaggagtaccaggccgccaaggtgcactag

SEQ ID NO: 142837 - DNA, 39 bp, synthetic construct
  misc_feature 1..39: note = Description of Artificial Sequence: Synthetic coding sequence
  source 1..39: mol_type = other DNA
atggacattgaagatgaggagaacatgtccttctcctag

SEQ ID NO: 142838 - DNA, 426 bp, synthetic construct
  misc_feature 1..426: note = Description of Artificial Sequence: Synthetic coding sequence
  source 1..426: mol_type = other DNA
atggacattgaagatgaggagaacatgagcagcagcagcacagatgtgaaggagaacagaaacctggacaacgtgagccccaaggatggcagcaccccaggccctggagagggcagccagctgagcaatggaggcggcggcggccctggcaggaagaggcccctggaggagggcagcaatggccacagcaagtaccgcctgaagaagaggaggaagaccccaggccctgtgctgcccaagaatgccctgatgcagctgaatgagatcaagccaggcctgcagtacaccctgctgagccagacaggccctgtgcacgcccccctgtttgtgatgtctgtggaggtgaatggccaggtgtttgagggcagcggccccaccaagaagaaggccaagctgcacgccgctgagaaggccctgcggagctag

SEQ ID NO: 142839 - DNA, 2226 bp, synthetic construct; identical to SEQ ID NO: 142835
  misc_feature 1..2226: note = Description of Artificial Sequence: Synthetic coding sequence
  source 1..2226: mol_type = other DNA

SEQ ID NO: 142840 - DNA, 2226 bp, synthetic construct; identical to SEQ ID NO: 142835
  misc_feature 1..2226: note = Description of Artificial Sequence: Synthetic coding sequence
  source 1..2226: mol_type = other DNA

SEQ ID NO: 142841 - DNA, 2097 bp, synthetic construct
  misc_feature 1..2097: note = Description of Artificial Sequence: Synthetic coding sequence
  source 1..2097: mol_type = other DNA
atggacattgaagatgaggagaacatgagcagcagcagcacagatgtgaaggagaacagaaacctggacaacgtgagccccaaggatggcagcaccccaggccctggagagggcagccagctgagcaatggaggcggcggcggccctggcaggaagaggcccctggaggagggcagcaatggccacagcaagtaccgcctgaagaagaggaggaagaccccaggccctgtgctgcccaagaatgccctgatgcagctgaatgagatcaagccaggcctgcagtacaccctgctgagccagacaggccctgtgcacgcccccctgtttgtgatgtctgtggaggtgaatggccaggtgtttgagggcagcggccccaccaagaagaaggccaagctgcacgccgctgagaaggccctgcggagctttgtgcagttccccaatgccagcgaggcccacctggccatgggccgcaccctgtctgtgaacacagacttcaccagtgaccaggccgacttcccagacaccctcttcaacggctttgagaccccagacaaggccgagccccccttctacgtgggcagcaatggagatgacagcttcagcagcagcggggacctgagcctgagcgccagccctgtgcctgccagcctggcccagccccccctgcctgtgctgccccccttccccccacccagcggcaagaaccctgtgatgatcctgaatgagctgcggcccggcctgaagtatgacttcctgtctgagagcggggagagccacgccaagagctttgtgatgtctgtggtggtggatggccagttctttgagggcagcggcaggaacaagaagctggccaaggcccgggccgcccagagcgccctggccgccatcttcaacctgcacctggaccagacccccagccggcagcccatccccagcgagggcctgcagctgcacctgccccaggtgctggctgatgctgtgtcccggctggtgctgggcaagtttggagacctgacagacaacttcagcagcccccacgcccggaggaaggtgctggccggcgtggtgatgaccactggaacagatgtgaaggatgccaaggtgatctctgtgtccacaggcaccaagtgcatcaatggagagtacatgtctgaccggggcctggccctgaatgactgccacgccgagatcatcagccgccgcagcctgctgcgcttcctgtacacccagctggagctgtacctgaacaacaaggatgaccagaagaggagcatcttccagaagtctgagcggggcggcttccggctgaaggaaaatgtgcagttccacctgtacatcagcaccagcccctgtggagatgcccgcatcttcagcccccatgagcccatcctggagggcagccgcagctacacccaggccggcgtgcagtggtgcaaccacggcagcctgcagcccaggcctcctggcctgctgagtgaccccagcaccagcaccttccagggcgccggcaccacagagcctgctgacagacaccccaacaggaaggcccggggccagctgcggaccaagattgagagcggggagggcaccatccctgtgcgcagcaatgccagcatccagacctgggatggagtgctgcagggcgagcggctgctgaccatgagctgcagcgacaagatcgcccgctggaatgtggtgggcatccagggcagcctgctgagcatctttgtggagcccatctacttcagcagcatcatcctgggcagcctgtaccacggggaccacctgagccgggccatgtaccagaggatcagcaacatcgaggacctgccccccctgtacaccctgaacaagcccctgctgagcggcatcagcaatgctgaggcccggcagcccgggaaggcccccaacttctctgtgaactggacagtgggggacagcgccattgaagtcatcaatgccaccaccgggaaggatgagctgggccgggccagccggctgtgcaagcacgccctgtactgccgctgggcctgtgcccggcagggcagcctgcccctgaccaccctgcaggactaccaggcccagagggtgccctag

SEQ ID NO: 142842 - DNA, 426 bp, synthetic construct
  misc_feature 1..426: note = Description of Artificial Sequence: Synthetic coding sequence
  source 1..426: mol_type = other DNA
atgagccacaggatggagggcgtgggccagctgcctgccagctaccgccacaaccggcccctgctgtctggagtgtctgatgctgaggcccggcagcccgggaagagcccccccttctccatgaactgggtggtgggcagcgctgacctggagatcatcaatgccaccactggaagaagaagctgtggcggccccagccggctgtgcaagcacgtgctgagcgcccgctgggcccggctgtatggccgcctgagcaccaggacccccagccctggggacacccccagcatgtactgtgaggccaagctgggcgcccacacctaccagagcgtgaagcagcagctgttcaaggccttccagaaggccggcctgggcacctgggtgaggaagcccccagagcagcagcagttcctgctgaccctgtag

SEQ ID NO: 142843 - DNA, 747 bp, synthetic construct
  misc_feature 1..747: note = Description of Artificial Sequence: Synthetic coding sequence
  source 1..747: mol_type = other DNA
atgggcctgtggagccctgtgcccggcaacagcgtgccccgggcccctgtgatggccggcctgggcctgggccacagccagggcgccccccagggcccccatgatggcaagacagacaggagcagcggccctggaagaagaagaacagagaggacccggctgcccggcctgctgggcggggcccccctgacagctggcagcccccaccgctggaatgtgctgggcctgcagggcgccctgctgagccactttgtggagcctgtgtacctgcagagcatcgtggtgggcagcctgcaccacacaggccacctggcccgggtgatgagccacaggatggagggcgtgggccagctgcctgccagctaccgccacaaccggcccctgctgagcggcgtgtctgatgctgaggcccggcagcccgggaagagcccccccttctccatgaactgggtggtgggcagcgctgacctggagatcatcaatgccaccaccggccgccgcagctgtggcggccccagccggctgtgcaagcacgtgctgagcgcccgctgggcccggctgtatggccgcctgagcaccaggacccccagccctggggacacccccagcatgtactgtgaggccaagctgggcgcccacacctaccagagcgtgaagcagcagctgttcaaggccttccagaaggccggcctgggcacctgggtgaggaagcccccagagcagcagcagttcctgctgaccctgtag

SEQ ID NO: 142844 - DNA, 2220 bp, synthetic construct
  misc_feature 1..2220: note = Description of Artificial Sequence: Synthetic coding sequence
  source 1..2220: mol_type = other DNA
atggcctctgtgctgggcagcggccggggcagcggcggcctgagcagccagctgaagtgcaagagcaagagaagaagaagaagaagaagcaagaggaaggacaaggtgtccatcctgagcaccttcctggcccccttcaagcacctgagccctggcatcaccaacacagaagatgatgacaccctgagcaccagcagcgctgaggtgaaggaaaatagaaatgtgggcaacctggccgcccggcccccaccttctggggaccgggcccggggcggggcccctggggccaagaggaagaggcccctggaggagggcaatggaggccacctgtgcaagctgcagctggtgtggaagaagctgtcctggagcgtggcccccaagaatgccctggtgcagctgcacgagctgcggcccggcctgcagtacagaacagtgtcccagacaggccctgtgcacgcccctgtgtttgctgtggccgtggaggtgaatggcctgacctttgagggcaccggccccaccaagaagaaggccaagatgagagctgctgagctggccctgcggagctttgtgcagttccccaatgcctgccaggcccacctggccatgggcggcggccctggccctggaacagacttcaccagtgaccaggccgacttcccagacaccctcttccaggagtttgagcccccagccccccggcccggcctggccggcggccggcctggagatgctgccctgctgtctgctgcctatggaagaagaaggctgctgtgccgggccctggacctggtgggccccaccccagccaccccagctgcccctggagagagaaatcctgtggtgctgctgaaccggctgcgggccggcctgcgctacgtgtgcctggccgagcctgctgagcggcgggcccggagctttgtgatggctgtgtctgtggatggccgcacctttgagggcagcggccgcagcaagaagctggcccggggccaggccgcccaggccgccctgcaggagctgtttgacatccagatgcctggccacgcccctggccgggcccggaggacccccatgccccaggagtttgctgacagcatcagccagctggtgacccagaagttccgggaggtgaccacagacctgacccccatgcacgcccggcacaaggccctggccggcatcgtgatgaccaagggcctggatgcccggcaggcccaggtggtggccctgagcagcggcaccaagtgcatctctggagagcacctgagtgaccagggcctggtggtgaatgactgccacgccgaggtggtggcccggcgggccttcctgcacttcctgtacacccagctggagctgcacctgagcaagaggcgggaggacagcgagaggagcatctttgtgcggctgaaggagggcggctaccgcctgcgggagaacatcctcttccacctgtatgtgtccaccagcccctgtggagatgcccggctgcacagcccctatgagatcaccacagacctgcacagcagcaagcacctggtgaggaagttccggggccacctgcggaccaagattgaaagtggagagggcaccgtgcctgtgcggggccccagcgctgtgcagacctgggatggagtgctgctgggggagcagctgatcaccatgagctgcacagacaagatcgcccgctggaatgtgctgggcctgcagggcgccctgctgagccactttgtggagcctgtgtacctgcagagcatcgtggtgggcagcctgcaccacacaggccacctggcccgggtgatgagccacaggatggagggcgtgggccagctgcctgccagctaccgccacaaccggcccctgctgtctggagtgtctgatgctgaggcccggcagcccgggaagagcccccccttctccatgaactgggtggtgggcagcgctgacctggagatcatcaatgccaccactggaagaagaagctgtggcggccccagccggctgtgcaagcacgtgctgagcgcccgctgggcccggctgtatggccgcctgagcaccaggacccccagccctggggacacccccagcatgtactgtgaggccaagctgggcgcccacacctaccagagcgtgaagcagcagctgttcaaggccttccagaaggccggcctgggcacctgggtgaggaagcccccagagcagcagcagttcctgctgaccctgtag

SEQ ID NO: 142845 - DNA, 1509 bp, synthetic construct
  misc_feature 1..1509: note = Description of Artificial Sequence: Synthetic coding sequence
  source 1..1509: mol_type = other DNA
atgtggacagcagatgaaattgcccagctgtgctatgagcactacggcatccggctgcccaagaagggcaagccagagcccaaccacgagtggaccctgctggccgctgtggtgaagatccagagccctgctgacaaggcctgtgacaccccagacaagcctgtgcaggtgaccaaggaggtggtgtccatgggcaccggcaccaagtgcatcggccagagcaagatgaggaagaatggagacatcctgaatgacagccacgccgaggtgattgcccggcgctccttccagcgctacctgctgcaccagctgcagctggccgccaccctgaaggaggacagcatctttgtgcccggcacccagaagggcgtgtggaagctgcggcgggacctgatctttgtgttcttcagcagccacaccccctgtggagatgccagcatcatccccatgctggagtttgaggaccagccctgctgccctgtgttcaggaactgggcccacaacagctctgtggaggccagcagcaacctggaggcccctggaaatgaaagaaaatgtgaagatcctgacagccctgtgaccaagaagatgaggctggagcctggaacagctgcccgggaggtgaccaacggggccgcccaccaccagagctttgggaagcagaagagcggccccatcagccctggcatccacagctgtgacctgactgtggagggcctggccaccgtgacccgcatcgcccctggcagcgccaaggtgattgatgtgtacagaactggagccaagtgtgtgcctggagaggccggggacagcggcaagccaggggccgccttccaccaggtgggcctgctgcgggtgaagccaggccgcggggacaggaccaggtccatgagctgcagcgacaagatggcccgctggaatgtgctgggctgccagggcgccctgctgatgcacctgctggaggagcccatctacctgtctgctgtggtgattggaaaatgtccctacagccaggaggccatgcagagggccctgattggccgctgccagaatgtgtctgccctgcccaagggctttggagtgcaggagctgaagatcctgcagagcgacctgctgtttgagcagagccgctctgctgtgcaggccaagagagctgacagccctggccgcctggtgccctgtggggccgccatctcctggagcgctgtgcctgagcagcccctggatgtgacagccaacggcttcccccagggcaccaccaagaagaccatcggcagcctgcaggcccggagccagatcagcaaggtggagctgttccgctccttccagaagctgctgagcagaattgcccgggacaagtggccccacagcctgcgggtgcagaagctggacacctaccaggagtacaaggaggccgccagcagctaccaggaggcctggagcaccctgaggaagcaggtgtttggctcctggatcagaaatcctccagactaccaccagttcaagtag

SEQ ID NO: 142846 - DNA, 1422 bp, synthetic construct
  misc_feature 1..1422: note = Description of Artificial Sequence: Synthetic coding sequence
  source 1..1422: mol_type = other DNA
atgtggaccctgctggccgctgtggtgaagatccagagccctgctgacaaggcctgtgacaccccagacaagcctgtgcaggtgaccaaggaggtggtgtccatgggcaccggcaccaagtgcatcggccagagcaagatgaggaagaatggagacatcctgaatgacagccatgctgaggtgattgcccggcgctccttccagcgctacctgctgcaccagctgcagctggccgccaccctgaaggaggacagcatctttgtgcccggcacccagaagggcgtgtggaagctgcggcgggacctgatctttgtgttcttcagcagccacaccccctgtggagatgccagcatcatccccatgctggagtttgaggaccagccctgctgccctgtgttcaggaactgggcccacaacagctctgtggaggccagcagcaacctggaggcccctggaaatgaaagaaaatgtgaggaccctgacagccctgtgaccaagaagatgaggctggagcccggcacagctgcccgggaggtgaccaatggagctgcccaccaccagagctttgggaagcagaagagcggccccatcagccctggcatccacagctgtgacctgactgtggagggcctggccaccgtgaccagaattgcccctggcagcgccaaggtgattgatgtgtacagaactggagccaagtgtgtgcctggagaggccggggacagcggcaagccaggagctgccttccaccaggtgggcctgctgcgggtgaagccaggccgcggggacaggaccaggtccatgagctgcagcgacaagatggcccgctggaatgtgctgggctgccagggcgccctgctgatgcacctgctggaggagcccatctacctgtctgctgtggtgattggcaagtgcccctacagccaggaggccatgcagagggccctgattggccgctgccagaatgtgtctgccctgcccaagggcttcggcgtgcaggagctgaagatcctgcagagcgacctgctgtttgagcagagccgctctgctgtgcaggccaagagagctgacagccctggccgcctggtgccctgtggggccgccatctcctggagcgctgtgcctgagcagcccctggatgtgacagccaacggcttcccccagggcaccaccaagaagaccatcggcagcctgcaggcccggagccagatcagcaaggtggagctgttccgctccttccagaagctgctgagccgcatcgcccgggacaagtggccccacagcctgcgggtgcagaagctggacacctaccaggagtacaaggaggccgccagcagctaccaggaggcctggagcaccctgaggaagcaggtgtttggctcctggatccggaaccccccagactaccaccagttcaagtag

SEQ ID NO: 142847 - DNA, 1089 bp, synthetic construct
  misc_feature 1..1089: note = Description of Artificial Sequence: Synthetic coding sequence
  source 1..1089: mol_type = other DNA
atggctgctgctgaggaggagcccaagcccaagaagctgaaggtggaggccccccaggccctgcgggagaacatcctgtttggcatgggcaaccccctgctggacatctctgctgtggtggacaaggacttcctggacaagtacagcctgaagcccaatgaccagatcctggccgaggacaagcacaaggagctgtttgatgagctggtgaagaagttcaaggtggagtaccacgccggcggcagcacccagaacagcatcaaggtggcccagtggatgatccagcagccccacaaggccgccaccttcttcggctgcattggaattgacaagtttggagagatcctgaagaggaaggctgctgaggcccacgtggatgcccactactatgagcagaatgagcagcccaccggcacctgtgccgcctgcatcactggagacaacagaagcctcatcgccaacctggccgccgccaactgctacaagaaggagaagcacctggacctggagaagaactggatgctggtggagaaggcccgggtgtgctacatcgccggcttcttcctgactgtgtccccagagagcgtgctgaaggtggcccaccacgccagcgagaacaaccgcatcttcaccctgaacctgagcgcccccttcatcagccagttctacaaggagagcctgatgaaggtgatgccctacgtggacatcctgtttggaaatgaaacagaggccgccacctttgcccgggagcagggctttgagaccaaggacatcaaggagatcgccaagaagacccaggccctgcccaagatgaacagcaagaggcagagaattgtcatcttcacccagggcagagatgacaccatcatggccacagagagcgaggtgacagcctttgctgtgctggaccaggaccagaaggagatcatcgacaccaatggagctggagatgcctttgtgggcggcttcctgagccagctggtgtctgacaagcccctgacagagtgcatccgggccggccactatgctgccagcatcatcatcagaagaacaggctgcaccttccctgagaagccagacttccactag

SEQ ID NO: 142848 - DNA, 1038 bp, synthetic construct
  misc_feature 1..1038: note = Description of Artificial Sequence: Synthetic coding sequence
  source 1..1038: mol_type = other DNA
atgacctctgtgcgggagaacatcctgtttggcatgggcaaccccctgctggacatctctgctgtggtggacaaggacttcctggacaagtacagcctgaagcccaatgaccagatcctggccgaggacaagcacaaggagctgtttgatgagctggtgaagaagttcaaggtggagtaccacgccggcggcagcacccagaacagcatcaaggtggcccagtggatgatccagcagccccacaaggccgccaccttcttcggctgcatcggcatcgacaagtttggagagatcctgaagaggaaggctgctgaggcccacgtggatgcccactactatgagcagaatgagcagcccaccggcacctgtgccgcctgcatcaccggggacaacagaagcctgattgccaacctggccgccgccaactgctacaagaaggagaagcacctggacctggagaagaactggatgctggtggagaaggcccgggtgtgctacatcgccggcttcttcctgactgtgtccccagagagcgtgctgaaggtggcccaccacgccagcgagaacaaccgcatcttcaccctgaacctgagcgcccccttcatcagccagttctacaaggagagcctgatgaaggtgatgccctacgtggacatcctgtttggaaatgaaacagaagctgccacctttgcccgggagcagggctttgagaccaaggacatcaaggagatcgccaagaagacccaggccctgcccaagatgaacagcaagaggcagagaattgtcatcttcacccagggcagagatgacaccatcatggccacagaaagtgaggtgacagcctttgctgtgctggaccaggaccagaaggagatcatcgacaccaacggggctggagatgcctttgtgggcggcttcctgagccagctggtgtctgacaagcccctgacagagtgcatccgggccggccactacgccgccagcatcatcatccggaggacaggctgcaccttccctgagaagccagacttccactag

SEQ ID NO: 142849 - DNA, 918 bp, synthetic construct
  misc_feature 1..918: note = Description of Artificial Sequence: Synthetic coding sequence
  source 1..918: mol_type = other DNA
atggctgctgctgaggaggagcccaagcccaagaagctgaaggtggaggccccccaggccctgcgggagaacatcctgtttggcatgggcaaccccctgctggacatctctgctgtggtggacaaggacttcctggacaagtacagcctgaagcccaatgaccagatcctggccgaggacaagcacaaggagctgtttgatgagctggtgaagaagttcaaggtggagtaccacgccggcggcagcacccagaacagcatcaaggtggcccagtggatgatccagcagccccacaaggccgccaccttcttcggctgcattggaattgacaagtttggagagatcctgaagaggaaggctgctgaggcccacgtggatgcccactactatgagcagaatgagcagcccaccggcacctgtgccgcctgcatcactggagacaacagaagcctcatcgccaacctggccgccgccaactgctacaagaaggagaagcacctggacctggagaagaactggatgctggtggagaaggcccgggtgtgctacatcgccgaggccgccacctttgcccgggagcagggctttgagaccaaggacatcaaggagatcgccaagaagacccaggccctgcccaagatgaacagcaagaggcagagaattgtcatcttcacccagggcagagatgacaccatcatggccacagaaagtgaggtgacagcctttgctgtgctggaccaggaccagaaggagatcatcgacaccaacggggctggagatgcctttgtgggcggcttcctgagccagctggtgtctgacaagcccctgacagagtgcatccgggccggccactacgccgccagcatcatcatccggaggacaggctgcaccttccctgagaagccagacttccactag

SEQ ID NO: 142850 - DNA, 984 bp, synthetic construct
  misc_feature 1..984: note = Description of Artificial Sequence: Synthetic coding sequence
  source 1..984: mol_type = other DNA
atgacctctgtgcgggagaacatcctgtttggcatgggcaaccccctgctggacatctctgctgtggtggacaaggacttcctggacaagtttgatgagctggtgaagaagttcaaggtggagtaccacgccggcggcagcacccagaacagcatcaaggtggcccagtggatgatccagcagccccacaaggccgccaccttcttcggctgcatcggcatcgacaagtttggagagatcctgaagaggaaggctgctgaggcccacgtggatgcccactactatgagcagaatgagcagcccaccggcacctgtgccgcctgcatcaccggggacaacagaagcctgattgccaacctggccgccgccaactgctacaagaaggagaagcacctggacctggagaagaactggatgctggtggagaaggcccgggtgtgctacatcgccggcttcttcctgactgtgtccccagagagcgtgctgaaggtggcccaccacgccagcgagaacaaccgcatcttcaccctgaacctgagcgcccccttcatcagccagttctacaaggagagcctgatgaaggtgatgccctacgtggacatcctgtttggaaatgaaacagaagctgccacctttgcccgggagcagggctttgagaccaaggacatcaaggagatcgccaagaagacccaggccctgcccaagatgaacagcaagaggcagagaattgtcatcttcacccagggcagagatgacaccatcatggccacagaaagtgaggtgacagcctttgctgtgctggaccaggaccagaaggagatcatcgacaccaacggggctggagatgcctttgtgggcggcttcctgagccagctggtgtctgacaagcccctgacagagtgcatccgggccggccactacgccgccagcatcatcatccggaggacaggctgcaccttccctgagaagccagacttccactag

SEQ ID NO: 142851 - DNA, 2244 bp, synthetic construct
  misc_feature 1..2244: note = Description of Artificial Sequence: Synthetic coding sequence
  source 1..2244: mol_type = other DNA
atgcccctcttcaagctgcctgctgaggagaagcagattgatgatgccatgaggaactttgctgagaaggtgtttgccagcgaggtgaaggatgaaggaggccggcaggagatcagcccctttgatgtggatgagatctgccccatcagccaccacgagatgcaggcccacatcttccacctggagaccctgagcaccagcacagaggcccggaggaagaagcgcttccagggcaggaagacagtgaacctgagcatccccctgtctgagaccagcagcaccaagctgagccacattgatgagtacatcagcagcagccccacctaccagacagtgcctgacttccagagggtgcagatcactggagactatgccagcggcgtgacagtggaggactttgaaattgtgtgcaagggcctgtaccgggccctgtgcatccgggagaagtacatgcagaagagcttccagcgcttccccaagacccccagcaagtacctgagaaatattgatggagaggcctgggtggccaatgaaagcttctaccctgtgttcaccccacctgtgaagaagggggaggaccccttcagaacagacaacctgcctgagaacctgggctaccacctgaagatgaaggatggagtggtgtatgtgtacccaaatgaggccgctgtgtccaaggatgagcccaagcccctgccctaccccaacctggacaccttcctggatgacatgaacttcctgctggccctgattgcccagggccctgtgaagacctacacccaccggcggctgaagttcctgagcagcaagttccaggtgcaccagatgctgaatgagatggatgagctgaaggagctgaagaacaacccccaccgggacttctacaactgcaggaaggtggacacccacatccacgccgccgcctgcatgaaccagaagcacctgctgcgcttcatcaagaagagctaccagattgatgctgacagagtggtgtacagcaccaaggagaagaacctgaccctgaaggagctgtttgccaagctgaagatgcacccctatgacctgactgtggacagcctggatgtgcacgccggccggcagaccttccagagatttgacaagttcaatgacaagtacaaccctgtgggcgccagcgagctgcgggacctgtacctgaagacagacaactacatcaatggagagtactttgccaccatcatcaaggaggtgggcgctgacctggtggaggccaagtaccagcacgccgagccccggctgagcatctacggccgcagcccagatgagtggagcaagctgagctcctggtttgtgtgcaaccgcatccactgccccaacatgacctggatgatccaggtgccccgcatctatgatgtgttccgcagcaagaacttcctgccccactttgggaagatgctggagaacatcttcatgcctgtgtttgaggccaccatcaacccccaggccgaccctgagctgagcgtcttcctgaagcacatcactggatttgattctgtggatgatgagagcaagcacagcggccacatgttcagcagcaagagccccaagccccaggagtggaccctggagaagaaccccagctacacctactatgcctactacatgtatgccaacatcatggtgctgaacagcctgaggaaggagcggggcatgaacaccttcctgttccggccccactgtggggaggccggggccctgacccacctgatgacagccttcatgattgctgatgacatcagccacggcctgaacctgaagaagagccctgtgctgcagtacctgttcttcctggcccagatccccatcgccatgagccccctgagcaacaacagcctcttcctggagtatgccaagaaccccttcctggacttcctgcagaagggcctgatgatcagcctgagcacagatgaccccatgcagttccacttcaccaaggagcccctgatggaggagtatgccatcgccgcccaggtgttcaagctgagcacctgtgacatgtgtgaggtggccaggaacagcgtgctgcagtgtggcatcagccatgaggagaaggtgaagttcctgggggacaactacctggaggagggccctgctggaaatgacatccggaggaccaacgtggcccagatccgcatggcctaccgctatgagacctggtgctatgagctgaacctgattgctgagggcctgaagagcacagaatag

SEQ ID NO: 142852 - DNA, 2343 bp, synthetic construct
  misc_feature 1..2343: note = Description of Artificial Sequence: Synthetic coding sequence
  source 1..2343: mol_type = other DNA
atgaatgtgcgcatcttctacagcgtgtcccagagcccccacagcctgctgagcctgctcttctactgtgccatcctggagagccgcatcagcgccaccatgcccctcttcaagctgcctgctgaggagaagcagattgatgatgccatgaggaactttgctgagaaggtgtttgccagcgaggtgaaggatgagggcggccggcaggagatcagcccctttgatgtggatgagatctgccccatcagccaccacgagatgcaggcccacatcttccacctggagaccctgagcaccagcacagaggcccggaggaagaagcgcttccagggcaggaagacagtgaacctgagcatccccctgtctgagaccagcagcaccaagctgagccacattgatgagtacatcagcagcagccccacctaccagacagtgcctgacttccagagggtgcagatcaccggggactatgccagcggcgtgacagtggaggactttgagatcgtgtgcaagggcctgtaccgggccctgtgcatccgggagaagtacatgcagaagagcttccagcgcttccccaagacccccagcaagtacctgaggaacattgatggagaggcctgggtggccaatgaaagcttctaccctgtgttcaccccacctgtgaagaagggggaggaccccttcagaacagacaacctgcctgagaacctgggctaccacctgaagatgaaggatggagtggtgtatgtgtacccaaatgaagctgctgtgtccaaggatgagcccaagcccctgccctaccccaacctggacaccttcctggatgacatgaacttcctgctggccctgattgcccagggccctgtgaagacctacacccaccggcggctgaagttcctgagcagcaagttccaggtgcaccagatgctgaatgagatggatgagctgaaggagctgaagaacaacccccaccgggacttctacaactgcaggaaggtggacacccacatccatgctgctgcctgcatgaaccagaagcacctgctgcgcttcatcaagaagagctaccagattgatgctgacagagtggtgtacagcaccaaggagaagaacctgaccctgaaggagctgtttgccaagctgaagatgcacccctatgacctgactgtggacagcctggatgtgcatgctggccggcagaccttccagagatttgacaagttcaatgacaagtacaaccctgtgggcgccagcgagctgcgggacctgtacctgaagacagacaactacatcaacggggagtactttgccaccatcatcaaggaggtgggcgctgacctggtggaggccaagtaccagcacgccgagccccggctgagcatctacggccgcagcccagatgagtggagcaagctgagctcctggtttgtgtgcaaccgcatccactgccccaacatgacctggatgatccaggtgccccgcatctatgatgtgttccgcagcaagaacttcctgccccactttgggaagatgctggagaacatcttcatgcctgtgtttgaggccaccatcaacccccaggccgaccctgagctgtctgtgttcctgaagcacatcaccggctttgacagcgtggatgatgagagcaagcacagcggccacatgttcagcagcaagagccccaagccccaggagtggaccctggagaagaaccccagctacacctactatgcctactacatgtatgccaacatcatggtgctgaacagcctgaggaaggagcggggcatgaacaccttcctgttccggccccactgtggggaggccggggccctgacccacctgatgacagccttcatgattgctgatgacatcagccacggcctgaacctgaagaagagccctgtgctgcagtacctgttcttcctggcccagatccccatcgccatgagccccctgagcaacaacagcctcttcctggagtatgccaagaaccccttcctggacttcctgcagaagggcctgatgatcagcctgagcacagatgaccccatgcagttccacttcaccaaggagcccctgatggaggagtatgccatcgccgcccaggtgttcaagctgagcacctgtgacatgtgtgaggtggccagaaattctgtgctgcagtgtggcatcagccatgaggagaaggtgaagttcctgggggacaactacctggaggagggccctgctggaaatgacatccggaggaccaacgtggcccagatccgcatggcctaccgctatgagacctggtgctatgagctgaacctgattgctgagggcctgaagagcacagaatag

SEQ ID NO: 142853 - DNA, 2331 bp, synthetic construct
  misc_feature 1..2331: note = Description of Artificial Sequence: Synthetic coding sequence
  source 1..2331: mol_type = other DNA
atgaatgtgcgcatcttctacagcgtgtcccagagcccccacagcctgctgagcctgctcttctactgtgccatcctggagagccgcatcagcgccaccatgcccctcttcaagctgcctgagattgatgatgccatgaggaactttgctgagaaggtgtttgccagcgaggtgaaggatgagggcggccggcaggagatcagcccctttgatgtggatgagatctgccccatcagccaccacgagatgcaggcccacatcttccacctggagaccctgagcaccagcacagaggcccggaggaagaagcgcttccagggcaggaagacagtgaacctgagcatccccctgtctgagaccagcagcaccaagctgagccacattgatgagtacatcagcagcagccccacctaccagacagtgcctgacttccagagggtgcagatcaccggggactatgccagcggcgtgacagtggaggactttgagatcgtgtgcaagggcctgtaccgggccctgtgcatccgggagaagtacatgcagaagagcttccagcgcttccccaagacccccagcaagtacctgaggaacattgatggagaggcctgggtggccaatgaaagcttctaccctgtgttcaccccacctgtgaagaagggggaggaccccttcagaacagacaacctgcctgagaacctgggctaccacctgaagatgaaggatggagtggtgtatgtgtacccaaatgaagctgctgtgtccaaggatgagcccaagcccctgccctaccccaacctggacaccttcctggatgacatgaacttcctgctggccctgattgcccagggccctgtgaagacctacacccaccggcggctgaagttcctgagcagcaagttccaggtgcaccagatgctgaatgagatggatgagctgaaggagctgaagaacaacccccaccgggacttctacaactgcaggaaggtggacacccacatccatgctgctgcctgcatgaaccagaagcacctgctgcgcttcatcaagaagagctaccagattgatgctgacagagtggtgtacagcaccaaggagaagaacctgaccctgaaggagctgtttgccaagctgaagatgcacccctatgacctgactgtggacagcctggatgtgcatgctggccggcagaccttccagagatttgacaagttcaatgacaagtacaaccctgtgggcgccagcgagctgcgggacctgtacctgaagacagacaactacatcaacggggagtactttgccaccatcatcaaggaggtgggcgctgacctggtggaggccaagtaccagcacgccgagccccggctgagcatctacggccgcagcccagatgagtggagcaagctgagctcctggtttgtgtgcaaccgcatccactgccccaacatgacctggatgatccaggtgccccgcatctatgatgtgttccgcagcaagaacttcctgccccactttgggaagatgctggagaacatcttcatgcctgtgtttgaggccaccatcaacccccaggccgaccctgagctgtctgtgttcctgaagcacatcaccggctttgacagcgtggatgatgagagcaagcacagcggccacatgttcagcagcaagagccccaagccccaggagtggaccctggagaagaaccccagctacacctactatgcctactacatgtatgccaacatcatggtgctgaacagcctgaggaaggagcggggcatgaacaccttcctgttccggccccactgtggggaggccggggccctgacccacctgatgacagccttcatgattgctgatgacatcagccacggcctgaacctgaagaagagccctgtgctgcagtacctgttcttcctggcccagatccccatcgccatgagccccctgagcaacaacagcctcttcctggagtatgccaagaaccccttcctggacttcctgcagaagggcctgatgatcagcctgagcacagatgaccccatgcagttccacttcaccaaggagcccctgatggaggagtatgccatcgccgcccaggtgttcaagctgagcacctgtgacatgtgtgaggtggccagaaattctgtgctgcagtgtggcatcagccatgaggagaaggtgaagttcctgggggacaactacctggaggagggccctgctggaaatgacatccggaggaccaacgtggcccagatccgcatggcctaccgctatgagacctggtgctatgagctgaacctgattgctgagggcctgaagagcacagaatag

SEQ ID NO: 142854 - DNA, 2640 bp, synthetic construct
  misc_feature 1..2640: note = Description of Artificial Sequence: Synthetic coding sequence
  source 1..2640: mol_type = other DNA
atgaggaacagaggccagggcctcttccggctgcggagccgctgcttcctgcaccagagcctgcccctgggcgccggccgcaggaagggcctggatgtggccgagcccggccccagccgctgccgcagtgacagccctgctgtggccgctgtggtgcctgccatggccagctaccccagcggcagcggcaagcccaaggccaagtaccccttcaagaagagggccagcctgcaggccagcacagctgcccctgaggcccggggcggcctgggcgccccacccctgcagagcgcccggagcctgcccggccctgccccctgcctgaagcacttccccctggacctgcggacctccatggatggcaagtgcaaggagattgctgaggagctgttcaccaggagcctggccgagagcgagctgcggagcgccccctatgagttccctgaggagagccccatcgagcagctggaggagcggcggcagaggctggagcggcagatcagccaggatgtgaagctggagccagacatcctgctgcgggccaagcaggacttcctgaagacagacagcgacagcgacctgcagctgtacaaggagcagggcgagggccagggcgacaggagcctgcgggagagagatgtgctggagcgggagttccagagggtgaccatctctggagaggagaagtgtggggtgcccttcacagacctgctggatgctgccaagtctgtggtgcgggccctcttcatccgggagaagtacatggccctgagcctgcagagcttctgccccaccacccggcgctacctgcagcagctggccgagaagcccctggagaccaggacctatgagcagggccctgacacccctgtgtctgcagatgcccctgtgcaccccccagccctggagcagcacccctatgagcactgtgagcccagcaccatgcctggggacctgggcctgggcctgaggatggtgcggggcgtggtgcacgtgtacacccggcgggagccagatgagcactgcagcgaggtggagctgccctacccagacctgcaggagtttgtggctgatgtgaatgtgctgatggccctgatcatcaatggccccatcaagagcttctgctacagaaggctgcagtacctgagcagcaagttccagatgcacgtgctgctgaatgagatgaaggagctggccgcccagaagaaggtgccccaccgggacttctacaacatcaggaaggtggacacccacatccacgccagcagctgcatgaaccagaagcacctgctgcgcttcatcaagagggccatgaagaggcacctggaggagatcgtgcacgtggagcagggccgggagcagaccctgcgggaggtgtttgagagcatgaacctgacagcctatgacctgtctgtggacaccctggatgtgcatgctgacaggaacaccttccacagatttgacaagttcaatgccaagtacaaccccatcggggagagcgtgctgcgggagatcttcatcaagacagacaacagagtgtctgggaagtactttgcccacatcatcaaggaggtgatgtctgacctggaggagagcaagtaccagaatgctgagctgcggctgagcatctacggccgcagcagagatgagtgggacaagctggcccgctgggccgtgatgcaccgggtgcacagccccaacgtgcgctggctggtgcaggtgccccggctgtttgatgtgtaccgcaccaagggccagctggccaacttccaggagatgctggagaacatcttcctgcccctgtttgaggccaccgtgcacccagccagccaccctgagctgcacctgttcctggagcacgtggatggctttgacagcgtggatgatgagagcaagccagagaaccacgtgttcaacctggagagccccctgcctgaggcctgggtggaggaggacaaccccccctatgcctactacctgtactacacctttgccaacatggccatgctgaaccacctgcggcggcagaggggcttccacacctttgtgctgcggccccactgtggggaggccggccccatccaccacctggtgtctgccttcatgctggccgagaacatcagccacggcctgctgctgaggaaggcccctgtgctgcagtacctgtactacctggcccagatcggcatcgccatgagccccctgagcaacaacagcctcttcctgagctaccacaggaaccccctgcctgagtacctgagccggggcctgatggtgtccctgagcacagatgaccccctgcagttccacttcaccaaggagcccctgatggaggagtacagcatcgccacccaggtgtggaagctgagcagctgtgacatgtgtgagctggccagaaattctgtgctgatgagcggcttcagccacaaggtgaagagccactggctgggccccaactacaccaaggagggccctgagggcaatgacatccggaggaccaacgtgcctgacatccgggtgggctaccgctatgagaccctgtgccaggagctggccctgatcacccaggccgtgcagagcgagatgctggagaccatccctgaggaggccggcatcaccatgagccctggcccccagtag

SEQ ID NO: 142855 - DNA, 2397 bp, synthetic construct
  misc_feature 1..2397: note = Description of Artificial Sequence: Synthetic coding sequence
  source 1..2397: mol_type = other DNA
atggccagcgaggcccggggcggcctgggcgccccacccctgcagagcgcccggagcctgcccggccctgccccctgcctgaagcacttccccctggacctgcggacctccatggatggcaagtgcaaggagattgctgaggagctgttcaccaggagcctggccgagagcgagctgcggagcgccccctatgagttccctgaggagagccccatcgagcagctggaggagcggcggcagaggctggagcggcagatcagccaggatgtgaagctggagccagacatcctgctgcgggccaagcaggacttcctgaagacagacagcgacagcgacctgcagctgtacaaggagcagggcgagggccagggcgacaggagcctgcgggagagagatgtgctggagcgggagttccagagggtgaccatcagcggggaggagaagtgtggggtgcccttcacagacctgctggatgctgccaagtctgtggtgcgggccctcttcatccgggagaagtacatggccctgagcctgcagagcttctgccccaccacccggcgctacctgcagcagctggccgagaagcccctggagaccaggacctatgagcagggccctgacacccctgtgtctgcagatgcccctgtgcaccccccagccctggagcagcacccctatgagcactgtgagcccagcaccatgcctggggacctgggcctgggcctgaggatggtgcggggcgtggtgcacgtgtacacccggcgggagccagatgagcactgcagcgaggtggagctgccctacccagacctgcaggagtttgtggctgatgtgaatgtgctgatggccctgatcatcaatggccccatcaagagcttctgctaccgccgcctgcagtacctgagcagcaagttccagatgcacgtgctgctgaatgagatgaaggagctggccgcccagaagaaggtgccccaccgggacttctacaacatcaggaaggtggacacccacatccacgccagcagctgcatgaaccagaagcacctgctgcgcttcatcaagagggccatgaagaggcacctggaggagatcgtgcacgtggagcagggccgggagcagaccctgcgggaggtgtttgagagcatgaacctgacagcctatgacctgtctgtggacaccctggatgtgcacgccgacaggaacaccttccacagatttgacaagttcaatgccaagtacaaccccatcggggagagcgtgctgcgggagatcttcatcaagacagacaacagagtgtctgggaagtactttgcccacatcatcaaggaggtgatgtctgacctggaggagagcaagtaccagaatgctgagctgcggctgagcatctacggccgcagcagagatgagtgggacaagctggcccgctgggccgtgatgcaccgggtgcacagccccaacgtgcgctggctggtgcaggtgccccggctgtttgatgtgtaccgcaccaagggccagctggccaacttccaggagatgctggagaacatcttcctgcccctgtttgaggccaccgtgcacccagccagccaccctgagctgcacctgttcctggagcacgtggatggctttgattctgtggatgatgagagcaagccagaaaatcatgtgttcaacctggagagccccctgcctgaggcctgggtggaggaggacaaccccccctatgcctactacctgtactacacctttgccaacatggccatgctgaaccacctgcggcggcagaggggcttccacacctttgtgctgcggccccactgtggggaggccggccccatccaccacctggtgtctgccttcatgctggccgagaacatcagccacggcctgctgctgaggaaggcccctgtgctgcagtacctgtactacctggcccagattggaattgccatgagccccctgagcaacaacagcctcttcctgagctaccacaggaaccccctgcctgagtacctgagccggggcctgatggtgtccctgagcacagatgaccccctgcagttccacttcaccaaggagcccctgatggaggagtacagcatcgccacccaggtgtggaagctgagcagctgtgacatgtgtgagctggccaggaacagcgtgctgatgagcggcttcagccacaaggtgaagagccactggctgggccccaactacaccaaggagggccctgagggcaatgacatccggaggaccaacgtgcctgacatccgggtgggctaccgctatgagaccctgtgccaggagctggccctgatcacccaggccgtgcagagcgagatgctggagaccatccctgaggaggccggcatcaccatgagccctggcccccagtag

SEQ ID NO: 142856 - DNA, 2415 bp, synthetic construct
  misc_feature 1..2415: note = Description of Artificial Sequence: Synthetic coding sequence
  source 1..2415: mol_type = other DNA
atgtggcagagccaggccccagctggggccgcccagaccccacccctgagccccccctggagccagccctggcaccccatccacctggccctggccagcccccggcccaacatccccctgcggagcggccctgcctgccggccccccctgcagctgcaggagctgttcaccaggagcctggccgagagcgagctgcggagcgccccctatgagttccctgaggagagccccatcgagcagctggaggagcggcggcagaggctggagcggcagatcagccaggatgtgaagctggagccagacatcctgctgcgggccaagcaggacttcctgaagacagacagcgacagcgacctgcagctgtacaaggagcagggcgagggccagggcgacaggagcctgcgggagagagatgtgctggagcgggagttccagagggtgaccatcagcggggaggagaagtgtggggtgcccttcacagacctgctggatgctgccaagtctgtggtgcgggccctcttcatccgggagaagtacatggccctgagcctgcagagcttctgccccaccacccggcgctacctgcagcagctggccgagaagcccctggagaccaggacctatgagcagggccctgacacccctgtgtctgcagatgcccctgtgcaccccccagccctggagcagcacccctatgagcactgtgagcccagcaccatgcctggggacctgggcctgggcctgaggatggtgcggggcgtggtgcacgtgtacacccggcgggagccagatgagcactgcagcgaggtggagctgccctacccagacctgcaggagtttgtggctgatgtgaatgtgctgatggccctgatcatcaatggccccatcaagagcttctgctaccgccgcctgcagtacctgagcagcaagttccagatgcacgtgctgctgaatgagatgaaggagctggccgcccagaagaaggtgccccaccgggacttctacaacatcaggaaggtggacacccacatccacgccagcagctgcatgaaccagaagcacctgctgcgcttcatcaagagggccatgaagaggcacctggaggagatcgtgcacgtggagcagggccgggagcagaccctgcgggaggtgtttgagagcatgaacctgacagcctatgacctgtctgtggacaccctggatgtgcacgccgacaggaacaccttccacagatttgacaagttcaatgccaagtacaaccccatcggggagagcgtgctgcgggagatcttcatcaagacagacaacagagtgtctgggaagtactttgcccacatcatcaaggaggtgatgtctgacctggaggagagcaagtaccagaatgctgagctgcggctgagcatctacggccgcagcagagatgagtgggacaagctggcccgctgggccgtgatgcaccgggtgcacagccccaacgtgcgctggctggtgcaggtgccccggctgtttgatgtgtaccgcaccaagggccagctggccaacttccaggagatgctggagaacatcttcctgcccctgtttgaggccaccgtgcacccagccagccaccctgagctgcacctgttcctggagcacgtggatggctttgattctgtggatgatgagagcaagccagaaaatcatgtgttcaacctggagagccccctgcctgaggcctgggtggaggaggacaaccccccctatgcctactacctgtactacacctttgccaacatggccatgctgaaccacctgcggcggcagaggggcttccacacctttgtgctgcggccccactgtggggaggccggccccatccaccacctggtgtctgccttcatgctggccgagaacatcagccacggcctgctgctgaggaaggcccctgtgctgcagtacctgtactacctggcccagattggaattgccatgagccccctgagcaacaacagcctcttcctgagctaccacaggaaccccctgcctgagtacctgagccggggcctgatggtgtccctgagcacagatgaccccctgcagttccacttcaccaaggagcccctgatggaggagtacagcatcgccacccaggtgtggaagctgagcagctgtgacatgtgtgagctggccaggaacagcgtgctgatgagcggcttcagccacaaggtgaagagccactggctgggccccaactacaccaaggagggccctgagggcaatgacatccggaggaccaacgtgcctgacatccgggtgggctaccgctatgagaccctgtgccaggagctggccctgatcacccaggccgtgcagagcgagatgctggagaccatccctgaggaggccggcatcaccatgagccctggcccccagtag

SEQ ID NO: 142857 - DNA, 2283 bp, synthetic construct
  misc_feature 1..2283: note = Description of Artificial Sequence: Synthetic coding sequence
  source 1..2283: mol_type = other DNA
atgctgaccttcctgcccagcccccaggagctgttcaccaggagcctggccgagagcgagctgcggagcgccccctatgagttccctgaggagagccccatcgagcagctggaggagcggcggcagaggctggagcggcagatcagccaggatgtgaagctggagccagacatcctgctgcgggccaagcaggacttcctgaagacagacagcgacagcgacctgcagctgtacaaggagcagggcgagggccagggcgacaggagcctgcgggagagagatgtgctggagcgggagttccagagggtgaccatcagcggggaggagaagtgtggggtgcccttcacagacctgctggatgctgccaagtctgtggtgcgggccctcttcatccgggagaagtacatggccctgagcctgcagagcttctgccccaccacccggcgctacctgcagcagctggccgagaagcccctggagaccaggacctatgagcagggccctgacacccctgtgtctgcagatgcccctgtgcaccccccagccctggagcagcacccctatgagcactgtgagcccagcaccatgcctggggacctgggcctgggcctgaggatggtgcggggcgtggtgcacgtgtacacccggcgggagccagatgagcactgcagcgaggtggagctgccctacccagacctgcaggagtttgtggctgatgtgaatgtgctgatggccctgatcatcaatggccccatcaagagcttctgctaccgccgcctgcagtacctgagcagcaagttccagatgcacgtgctgctgaatgagatgaaggagctggccgcccagaagaaggtgccccaccgggacttctacaacatcaggaaggtggacacccacatccacgccagcagctgcatgaaccagaagcacctgctgcgcttcatcaagagggccatgaagaggcacctggaggagatcgtgcacgtggagcagggccgggagcagaccctgcgggaggtgtttgagagcatgaacctgacagcctatgacctgtctgtggacaccctggatgtgcacgccgacaggaacaccttccacagatttgacaagttcaatgccaagtacaaccccatcggggagagcgtgctgcgggagatcttcatcaagacagacaacagagtgtctgggaagtactttgcccacatcatcaaggaggtgatgtctgacctggaggagagcaagtaccagaatgctgagctgcggctgagcatctacggccgcagcagagatgagtgggacaagctggcccgctgggccgtgatgcaccgggtgcacagccccaacgtgcgctggctggtgcaggtgccccggctgtttgatgtgtaccgcaccaagggccagctggccaacttccaggagatgctggagaacatcttcctgcccctgtttgaggccaccgtgcacccagccagccaccctgagctgcacctgttcctggagcacgtggatggctttgattctgtggatgatgagagcaagccagaaaatcatgtgttcaacctggagagccccctgcctgaggcctgggtggaggaggacaaccccccctatgcctactacctgtactacacctttgccaacatggccatgctgaaccacctgcggcggcagaggggcttccacacctttgtgctgcggccccactgtggggaggccggccccatccaccacctggtgtctgccttcatgctggccgagaacatcagccacggcctgctgctgaggaaggcccctgtgctgcagtacctgtactacctggcccagattggaattgccatgagccccctgagcaacaacagcctcttcctgagctaccacaggaaccccctgcctgagtacctgagccggggcctgatggtgtccctgagcacagatgaccccctgcagttccacttcaccaaggagcccctgatggaggagtacagcatcgccacccaggtgtggaagctgagcagctgtgacatgtgtgagctggccaggaacagcgtgctgatgagcggcttcagccacaaggtgaagagccactggctgggccccaactacaccaaggagggccctgagggcaatgacatccggaggaccaacgtgcctgacatccgggtgggctaccgctatgagaccctgtgccaggagctggccctgatcacccaggccgtgcagagcgagatgctggagaccatccctgaggaggccggcatcaccatgagccctggcccccagtag

SEQ ID NO: 142858 - skipped

SEQ ID NO: 142859 - DNA, 2640 bp, synthetic construct; identical to SEQ ID NO: 142854
  misc_feature 1..2640: note = Description of Artificial Sequence: Synthetic coding sequence
  source 1..2640: mol_type = other DNA

SEQ ID NO: 142860 - DNA, 312 bp, synthetic construct
  misc_feature 1..312: note = Description of Artificial Sequence: Synthetic coding sequence
  source 1..312: mol_type = other DNA
atggccagcgaggcccggggcggcctgggcgccccacccctgcagagcgcccggagcctgcccggccctgccccctgcctgaagcacttccccctggacctgcggacctccatggatggcaagtgcaaggagattgctgaggagctgttcaccaggagcctggccgagagcgagctgcggagcgccccctatgagttccctgaggagagccccatcgagcagctggaggagcggcggcagaggctggagcggcagatcagccaggatgtgaagctggagccagacatcctgctgcgggccaagcaggactag

SEQ ID NO: 142861 - DNA, 2304 bp, synthetic construct
  misc_feature 1..2304: note = Description of Artificial Sequence: Synthetic coding sequence
  source 1..2304: mol_type = other DNA
atgccccggcagttccccaagctgaacatcagcgaggtggatgagcaggtgcggctgctggccgagaaggtgtttgccaaggtgctgcgggaggaggacagcaaggatgccctgagcctcttcaccgtgcctgaggactgccccatcggccagaaggaggccaaggagcgggagctgcagaaggagctggccgagcagaagtctgtggagacagccaagaggaagaagagcttcaagatgatccgcagccagagcctgagcctgcagatgccaccccagcaggactggaagggccccccagctgccagccctgccatgagccccaccacccctgtggtgactggagccaccagcctgcccaccccagccccctatgccatgcctgagttccagagggtgaccatcagcggggactactgtgccggcatcaccctggaggactatgagcaggccgccaagagcctggccaaggccctgatgatccgggagaagtatgcccggctggcctaccaccgcttcccccgcatcaccagccagtacctgggccaccccagggctgacacagcccctcctgaggagggcctgcctgacttccaccccccacccctgccccaggaggacccctactgcctggatgatgccccacccaacctggactacctggtgcacatgcagggcggcatcctgtttgtgtatgacaacaagaagatgctggagcaccaggagccccacagcctgccctacccagacctggagacctacacagtggacatgagccacatcctggccctgatcacagatggccccaccaagacctactgccaccggcggctgaacttcctggagagcaagttcagcctgcacgagatgctgaatgagatgtctgagttcaaggagctgaagagcaacccccaccgggacttctacaacgtgaggaaggtggacacccacatccacgccgccgcctgcatgaaccagaagcacctgctgcgcttcatcaagcacacctaccagacagagccagacagaacagtggccgagaagaggggcaggaagatcaccctgcggcaggtgtttgatggcctgcacatggacccctatgacctgactgtggacagcctggatgtgcacgccggccggcagaccttccacagatttgacaagttcaacagcaagtacaaccctgtgggcgccagcgagctgcgggacctgtacctgaagacagagaactacctgggcggggagtactttgccaggatggtgaaggaggtggcccgggagctggaggagagcaagtaccagtacagcgagccccggctgagcatctacggccgcagccctgaggagtggcccaacctggcctactggttcatccagcacaaggtgtacagccccaacatgcgctggatcatccaggtgccccgcatctatgacatcttccgcagcaagaagctgctgcccaactttgggaagatgctggagaacatcttcctgcccctcttcaaggccaccatcaacccccaggaccaccgggagctgcacctgttcctgaagtatgtgactggatttgattctgtggatgatgagagcaagcacagcgaccacatgttcagtgacaagagccccaacccagatgtgtggaccagcgagcagaaccccccctacagctactacctgtactacatgtatgccaacatcatggtgctgaacaacctgcggcgggagcggggcctgagcaccttcctgttccggccccactgtggggaggccggcagcatcacccacctggtgtctgccttcctgacagctgacaacatcagccacggcctgctgctgaagaagagccctgtgctgcagtacctgtactacctggcccagatccccatcgccatgagccccctgagcaacaacagcctcttcctggagtacagcaagaaccccctgcgggagttcctgcacaagggcctgcacgtgtccctgagcacagatgaccccatgcagttccactacaccaaggaggccctgatggaggagtatgccatcgccgcccaggtgtggaagctgagcacctgtgacctgtgtgagatcgccaggaacagcgtgctgcagagcggcctgagccaccaggagaagcagaagttcctgggccagaactactacaaggagggccctgagggcaatgacatcaggaagaccaacgtggcccagatccgcatggccttccgctatgagaccctgtgcaatgagctgtccttcctgagtgatgccatgaagtctgaggagatcacagccctgaccaactag

SEQ ID NO: 142862 - DNA, 2331 bp, synthetic construct
  misc_feature 1..2331: note = Description of Artificial Sequence: Synthetic coding sequence
  source 1..2331: mol_type = other DNA
atggccctgagcagcgagcctgctgagatgccccggcagttccccaagctgaacatcagcgaggtggatgagcaggtgcggctgctggccgagaaggtgtttgccaaggtgctgcgggaggaggacagcaaggatgccctgagcctcttcaccgtgcctgaggactgccccatcggccagaaggaggccaaggagcgggagctgcagaaggagctggccgagcagaagtctgtggagacagccaagaggaagaagagcttcaagatgatccgcagccagagcctgagcctgcagatgccaccccagcaggactggaagggccccccagctgccagccctgccatgagccccaccacccctgtggtgactggagccaccagcctgcccaccccagccccctatgccatgcctgagttccagagggtgaccatcagcggggactactgtgccggcatcaccctggaggactatgagcaggccgccaagagcctggccaaggccctgatgatccgggagaagtatgcccggctggcctaccaccgcttcccccgcatcaccagccagtacctgggccaccccagggctgacacagcccctcctgaggagggcctgcctgacttccaccccccacccctgccccaggaggacccctactgcctggatgatgccccacccaacctggactacctggtgcacatgcagggcggcatcctgtttgtgtatgacaacaagaagatgctggagcaccaggagccccacagcctgccctacccagacctggagacctacacagtggacatgagccacatcctggccctgatcacagatggccccaccaagacctactgccaccggcggctgaacttcctggagagcaagttcagcctgcacgagatgctgaatgagatgtctgagttcaaggagctgaagagcaacccccaccgggacttctacaacgtgaggaaggtggacacccacatccatgctgctgcctgcatgaaccagaagcacctgctgcgcttcatcaagcacacctaccagacagagccagacagaacagtggccgagaagaggggcaggaagatcaccctgcggcaggtgtttgatggcctgcacatggacccctatgacctgactgtggacagcctggatgtgcatgctggccggcagaccttccacagatttgacaagttcaacagcaagtacaaccctgtgggcgccagcgagctgcgggacctgtacctgaagacagagaactacctgggcggggagtactttgccaggatggtgaaggaggtggcccgggagctggaggagagcaagtaccagtacagcgagccccggctgagcatctacggccgcagccctgaggagtggcccaacctggcctactggttcatccagcacaaggtgtacagccccaacatgcgctggatcatccaggtgccccgcatctatgacatcttccgcagcaagaagctgctgcccaactttgggaagatgctggagaacatcttcctgcccctcttcaaggccaccatcaacccccaggaccaccgggagctgcacctgttcctgaagtatgtgacaggctttgacagcgtggatgatgagagcaagcacagcgaccacatgttcagtgacaagagccccaacccagatgtgtggaccagcgagcagaaccccccctacagctactacctgtactacatgtatgccaacatcatggtgctgaacaacctgcggcgggagcggggcctgagcaccttcctgttccggccccactgtggggaggccggcagcatcacccacctggtgtctgccttcctgacagctgacaacatcagccacggcctgctgctgaagaagagccctgtgctgcagtacctgtactacctggcccagatccccatcgccatgagccccctgagcaacaacagcctcttcctggagtacagcaagaaccccctgcgggagttcctgcacaagggcctgcacgtgtccctgagcacagatgaccccatgcagttccactacaccaaggaggccctgatggaggagtatgccatcgccgcccaggtgtggaagctgagcacctgtgacctgtgtgaaattgccagaaattctgtgctgcagagcggcctgagccaccaggagaagcagaagttcctgggccagaactactacaaggagggccctgagggcaatgacatcaggaagaccaacgtggcccagatccgcatggccttccgctatgagaccctgtgcaatgagctgtccttcctgagtgatgccatgaagtctgaggagatcacagccctgaccaactag

SEQ ID NO: 142863 - DNA, 1827 bp, synthetic construct
  misc_feature 1..1827: note = Description of Artificial Sequence: Synthetic coding sequence
  source 1..1827: mol_type = other DNA
atgatccgggagaagtatgcccggctggcctaccaccgcttcccccgcatcaccagccagtacctgggccaccccagggctgacacagcccctcctgaggagggcctgcctgacttccaccccccacccctgccccaggaggacccctactgcctggatgatgccccacccaacctggactacctggtgcacatgcagggcggcatcctgtttgtgtatgacaacaagaagatgctggagcaccaggagccccacagcctgccctacccagacctggagacctacacagtggacatgagccacatcctggccctgatcacagatggccccaccaagacctactgccaccggcggctgaacttcctggagagcaagttcagcctgcacgagatgctgaatgagatgtctgagttcaaggagctgaagagcaacccccaccgggacttctacaacgtgaggaaggtggacacccacatccatgctgctgcctgcatgaaccagaagcacctgctgcgcttcatcaagcacacctaccagacagagccagacagaacagtggccgagaagaggggcaggaagatcaccctgcggcaggtgtttgatggcctgcacatggacccctatgacctgactgtggacagcctggatgtgcatgctggccggcagaccttccacagatttgacaagttcaacagcaagtacaaccctgtgggcgccagcgagctgcgggacctgtacctgaagacagagaactacctgggcggggagtactttgccaggatggtgaaggaggtggcccgggagctggaggagagcaagtaccagtacagcgagccccggctgagcatctacggccgcagccctgaggagtggcccaacctggcctactggttcatccagcacaaggtgtacagccccaacatgcgctggatcatccaggtgccccgcatctatgacatcttccgcagcaagaagctgctgcccaactttgggaagatgctggagaacatcttcctgcccctcttcaaggccaccatcaacccccaggaccaccgggagctgcacctgttcctgaagtatgtgacaggctttgacagcgtggatgatgagagcaagcacagcgaccacatgttcagtgacaagagccccaacccagatgtgtggaccagcgagcagaaccccccctacagctactacctgtactacatgtatgccaacatcatggtgctgaacaacctgcggcgggagcggggcctgagcaccttcctgttccggccccactgtggggaggccggcagcatcacccacctggtgtctgccttcctgacagctgacaacatcagccacggcctgctgctgaagaagagccctgtgctgcagtacctgtactacctggcccagatccccatcgccatgagccccctgagcaacaacagcctcttcctggagtacagcaagaaccccctgcgggagttcctgcacaagggcctgcacgtgtccctgagcacagatgaccccatgcagttccactacaccaaggaggccctgatggaggagtatgccatcgccgcccaggtgtggaagctgagcacctgtgacctgtgtgaaattgccagaaattctgtgctgcagagcggcctgagccaccaggagaagcagaagttcctgggccagaactactacaaggagggccctgagggcaatgacatcaggaagaccaacgtggcccagatccgcatggccttccgctatgagaccctgtgcaatgagctgtccttcctgagtgatgccatgaagtctgaggagatcacagccctgaccaactag

SEQ ID NO: 142864 - DNA, 804 bp, synthetic construct
  misc_feature 1..804: note = Description of Artificial Sequence: Synthetic coding sequence
  source 1..804: mol_type = other DNA
atgccccggcagttccccaagctgaacatcagcgaggtggatgagcaggtgcggctgctggccgagaaggtgtttgccaaggtgctgcgggaggaggacagcaaggatgccctgagcctcttcaccgtgcctgaggactgccccatcggccagaaggaggccaaggagcgggagctgcagaaggagctggccgagcagaagtctgtggagacagccaagaggaagaagagcttcaagatgatccgcagccagagcctgagcctgcagatgccaccccagcaggactggaagggccccccagctgccagccctgccatgagccccaccacccctgtggtgactggagccaccagcctgcccaccccagccccctatgccatgcctgagttccagagggtgaccatcagcggggactactgtgccggcatcaccctggaggactatgagcaggccgccaagagcctggccaaggccctgatgatccgggagaagtatgcccggctggcctaccaccgcttcccccgcatcaccagccagtacctgggccaccccagggctgacacagcccctcctgaggagggcctgcctgacttccaccccccacccctgccccaggaggacccctactgcctggatgatgccccacccaacctggactacctggtgcacatgcagggcggcatcctgtttgtgtatgacaacaagaagatgctggagcaccaggagccccacagcctgccctacccagacctggagacctacacagtggacatgagccacatcctggccctgatcacagactag

SEQ ID NO: 142865 - DNA, 2325 bp, synthetic construct
  misc_feature 1..2325: note = Description of Artificial Sequence: Synthetic coding sequence
  source 1..2325: mol_type = other DNA
atggagcccggcagcgctgagatgccccggcagttccccaagctgaacatcagcgaggtggatgagcaggtgcggctgctggccgagaaggtgtttgccaaggtgctgcgggaggaggacagcaaggatgccctgagcctcttcaccgtgcctgaggactgccccatcggccagaaggaggccaaggagcgggagctgcagaaggagctggccgagcagaagtctgtggagacagccaagaggaagaagagcttcaagatgatccgcagccagagcctgagcctgcagatgccaccccagcaggactggaagggccccccagctgccagccctgccatgagccccaccacccctgtggtgactggagccaccagcctgcccaccccagccccctatgccatgcctgagttccagagggtgaccatcagcggggactactgtgccggcatcaccctggaggactatgagcaggccgccaagagcctggccaaggccctgatgatccgggagaagtatgcccggctggcctaccaccgcttcccccgcatcaccagccagtacctgggccaccccagggctgacacagcccctcctgaggagggcctgcctgacttccaccccccacccctgccccaggaggacccctactgcctggatgatgccccacccaacctggactacctggtgcacatgcagggcggcatcctgtttgtgtatgacaacaagaagatgctggagcaccaggagccccacagcctgccctacccagacctggagacctacacagtggacatgagccacatcctggccctgatcacagatggccccaccaagacctactgccaccggcggctgaacttcctggagagcaagttcagcctgcacgagatgctgaatgagatgtctgagttcaaggagctgaagagcaacccccaccgggacttctacaacgtgaggaaggtggacacccacatccatgctgctgcctgcatgaaccagaagcacctgctgcgcttcatcaagcacacctaccagacagagccagacagaacagtggccgagaagaggggcaggaagatcaccctgcggcaggtgtttgatggcctgcacatggacccctatgacctgactgtggacagcctggatgtgcatgctggccggcagaccttccacagatttgacaagttcaacagcaagtacaaccctgtgggcgccagcgagctgcgggacctgtacctgaagacagagaactacctgggcggggagtactttgccaggatggtgaaggaggtggcccgggagctggaggagagcaagtaccagtacagcgagccccggctgagcatctacggccgcagccctgaggagtggcccaacctggcctactggttcatccagcacaaggtgtacagccccaacatgcgctggatcatccaggtgccccgcatctatgacatcttccgcagcaagaagctgctgcccaactttgggaagatgctggagaacatcttcctgcccctcttcaaggccaccatcaacccccaggaccaccgggagctgcacctgttcctgaagtatgtgacaggctttgacagcgtggatgatgagagcaagcacagcgaccacatgttcagtgacaagagccccaacccagatgtgtggaccagcgagcagaaccccccctacagctactacctgtactacatgtatgccaacatcatggtgctgaacaacctgcggcgggagcggggcctgagcaccttcctgttccggccccactgtggggaggccggcagcatcacccacctggtgtctgccttcctgacagctgacaacatcagccacggcctgctgctgaagaagagccctgtgctgcagtacctgtactacctggcccagatccccatcgccatgagccccctgagcaacaacagcctcttcctggagtacagcaagaaccccctgcgggagttcctgcacaagggcctgcacgtgtccctgagcacagatgaccccatgcagttccactacaccaaggaggccctgatggaggagtatgccatcgccgcccaggtgtggaagctgagcacctgtgacctgtgtgaaattgccagaaattctgtgctgcagagcggcctgagccaccaggagaagcagaagttcctgggccagaactactacaaggagggccctgagggcaatgacatcaggaagaccaacgtggcccagatccgcatggccttccgctatgagaccctgtgcaatgagctgtccttcctgagtgatgccatgaagtctgaggagatcacagccctgaccaactag

SEQ ID NO: 142866 - DNA, 2304 bp, synthetic construct; identical to SEQ ID NO: 142861
  misc_feature 1..2304: note = Description of Artificial Sequence: Synthetic coding sequence
  source 1..2304: mol_type = other DNA

SEQ ID NO: 142867 - DNA, 336 bp, synthetic construct
  misc_feature 1..336: note = Description of Artificial Sequence: Synthetic coding sequence
  source 1..336: mol_type = other DNA
atgccccggcagttccccaagctgaacatcagcgaggtggatgagcaggtgcggctgctggccgagaaggtgtttgccaaggtgctgcgggaggaggacagcaaggatgccctgagcctcttcaccgtgcctgaggactgccccatcggccagaaggaggccaaggagcgggagctgcagaaggagctggccgagcagaagtctgtggagacagccaagaggaagaagagcttcaagatgatccgcagccagagcctgagcctgcagatgccaccccagcaggactggaagggccccccagctgccagccctgccatgagccccaccaccccctag

SEQ ID NO: 142868 - DNA, 426 bp, synthetic construct
  misc_feature 1..426: note = Description of Artificial Sequence: Synthetic coding sequence
  source 1..426: mol_type = other DNA
atggcccggcccctgtgcaccctgctgctgctgatggccaccctggccggggccctggccagcagcagcaaggaggagaaccgcatcatccctgggggcatctatgatgctgacctgaatgatgagtgggtgcagagggccctgcactttgccatcagcgagtacaacaaggccacagaagatgagtactacagaagacccctgcaggtgctgcgggcccgggagcagaccttcggcggcgtgaactacttctttgatgtggaggtgggccgcaccatctgcaccaagagccagcccaacctggacacctgtgccttccacgagcagcctgagctgcagaagaagcagctgtgcagctttgagatctatgaggtgccctgggaggacaggatgagcctggtgaacagccgctgccaggaggcctag

SEQ ID NO: 142869 - DNA, 1215 bp, synthetic construct
  misc_feature 1..1215: note = Description of Artificial Sequence: Synthetic coding sequence
  source 1..1215: mol_type = other DNA
atgcctggcctgatgaggatgagggagcgctacagcgccagcaagcccctgaagggggccagaattgctggctgcctgcacatgacagtggagacagctgtgctgattgagaccctggtgaccctgggcgctgaggtgcagtggagcagctgcaacatcttcagcacccaggaccacgccgccgccgccatcgccaaggccggcatccctgtgtatgcctggaagggggagacagatgaggagtacctgtggtgcatcgagcagaccctgtacttcaaggatggccccctgaacatgatcctggatgatggaggagacctgaccaacctgatccacaccaagtacccccagctgctgcccggcatccggggcatcagcgaggagaccaccactggagtgcacaacctgtacaagatgatggccaacggcatcctgaaggtgcctgccatcaacgtgaatgattctgtgaccaagagcaagtttgacaacctgtatggctgccgggagagcctgattgatggcatcaagagggccacagatgtgatgattgctgggaaggtggccgtggtggccggctatggagatgtgggcaagggctgtgcccaggccctgcggggctttggagcccgggtcatcatcacagaaattgaccccatcaatgccctgcaggccgccatggagggctatgaggtgaccaccatggatgaggcctgccaggagggcaacatctttgtgaccaccaccggctgcatcgacatcatcctgggccgccactttgagcagatgaaggatgatgccatcgtgtgcaacatcggccactttgatgtggagattgatgtgaagtggctgaatgaaaatgctgtggagaaggtgaacatcaagccccaggtggaccgctaccgcctgaagaatggccgccgcatcatcctgctggccgagggccgcctggtgaacctgggctgtgccatgggccaccccagctttgtgatgagcaacagcttcaccaaccaggtgatggcccagatcgagctgtggacccacccagacaagtaccctgtgggcgtgcacttcctgcccaagaagctggatgaagctgtggccgaggcccacctgggcaagctgaatgtgaagctgaccaagctgacagagaagcaggcccagtacctgggcatgagctgtgatggccccttcaagccagaccactaccgctactag

SEQ ID NO: 142870 - DNA, 798 bp, synthetic construct
  misc_feature 1..798: note = Description of Artificial Sequence: Synthetic coding sequence
  source 1..798: mol_type = other DNA
atgtttgtgtccaagaggcgcttcatcctgaagacctgtggcaccaccctgctgctgaaggccctggtgcccctgctgaagctggcccgggactacagcggctttgacagcatccagagcttcttctacagcaggaagaacttcatgaagcccagccaccagggctacccccacaggaacttccaggaggagattgagttcctgaatgccatcttccccaacggggccgcctactgcatgggccgcatgaacagcgactgctggtacctgtacaccctggacttccctgagagcagggtcatcagccagcctgaccagaccctggagatcctgatgtctgagctggaccctgctgtgatggaccagttctacatgaaggatggagtgacagccaaggatgtgacccgggagagcggcatccgggacctgatccctggctctgtgattgatgccaccatgttcaacccctgtggctacagcatgaatggcatgaagagtgatggcacctactggaccatccacatcaccccagagcctgagttctcctatgtgtcctttgagaccaacctgagccagaccagctatgatgacctgatcaggaaggtggtggaggtgttcaagccaggcaagtttgtgaccaccctgtttgtgaaccagagcagcaagtgcaggacagtgctggccagcccccagaagattgagggcttcaagaggctggactgccagagcgccatgtttaatgactacaactttgtgttcaccagctttgccaagaagcagcagcagcagcagagctag

SEQ ID NO: 142871 - DNA, 918 bp, synthetic construct
  misc_feature 1..918: note = Description of Artificial Sequence: Synthetic coding sequence
  source 1..918: mol_type = other DNA
atggaggccgcccacttctttgagggcacagagaagctgctggaggtgtggttcagccggcagcagccagatgccaaccagggcagcggggacctgcggaccatccccagcgagagctccatgtttgtgtccaagaggcgcttcatcctgaagacctgtggcaccaccctgctgctgaaggccctggtgcccctgctgaagctggcccgggactacagcggctttgacagcatccagagcttcttctacagcaggaagaacttcatgaagcccagccaccagggctacccccacaggaacttccaggaggagattgagttcctgaatgccatcttccccaacggggccgcctactgcatgggccgcatgaacagcgactgctggtacctgtacaccctggacttccctgagagcagggtcatcagccagcctgaccagaccctggagatcctgatgtctgagctggaccctgctgtgatggaccagttctacatgaaggatggagtgacagccaaggatgtgacccgggagagcggcatccgggacctgatccctggctctgtgattgatgccaccatgttcaacccctgtggctacagcatgaatggcatgaagagtgatggcacctactggaccatccacatcaccccagagcctgagttctcctatgtgtcctttgagaccaacctgagccagaccagctatgatgacctgatcaggaaggtggtggaggtgttcaagccaggcaagtttgtgaccaccctgtttgtgaaccagagcagcaagtgcaggacagtgctggccagcccccagaagattgagggcttcaagaggctggactgccagagcgccatgtttaatgactacaactttgtgttcaccagctttgccaagaagcagcagcagcagcagagctag

SEQ ID NO: 142872 - DNA, 561 bp, synthetic construct
  misc_feature 1..561: note = Description of Artificial Sequence: Synthetic coding sequence
  source 1..561: mol_type = other DNA
atgggccgcatgaacagcgactgctggtacctgtacaccctggacttccctgagagcagggtcatcagccagcctgaccagaccctggagatcctgatgtctgagctggaccctgctgtgatggaccagttctacatgaaggatggagtgacagccaaggatgtgacccgggagagcggcatccgggacctgatccctggctctgtgattgatgccaccatgttcaacccctgtggctacagcatgaatggcatgaagagtgatggcacctactggaccatccacatcaccccagagcctgagttctcctatgtgtcctttgagaccaacctgagccagaccagctatgatgacctgatcaggaaggtggtggaggtgttcaagccaggcaagtttgtgaccaccctgtttgtgaaccagagcagcaaatgtagaacagtgctggccagcccccagaagattgagggcttcaagaggctggactgccagagcgccatgtttaatgactacaactttgtgttcaccagctttgccaagaagcagcagcagcagcagagctag

SEQ ID NO: 142873 - DNA, 1005 bp, synthetic construct
  misc_feature 1..1005: note = Description of Artificial Sequence: Synthetic coding sequence
  source 1..1005: mol_type = other DNA
atggaggccgcccacttctttgagggcacagagaagctgctggaggtgtggttcagccggcagcagccagatgccaaccagggcagcggggacctgcggaccatccccaggtctgagtgggacatcctgctgaaggatgtgcagtgcagcatcatctctgtgaccaagacagacaagcaggaggcctacgtgctgtctgagagctccatgtttgtgtccaagaggcgcttcatcctgaagacctgtggcaccaccctgctgctgaaggccctggtgcccctgctgaagctggcccgggactacagcggctttgacagcatccagagcttcttctacagcaggaagaacttcatgaagcccagccaccagggctacccccacaggaacttccaggaggagattgagttcctgaatgccatcttccccaatggagctgcctactgcatgggccgcatgaacagcgactgctggtacctgtacaccctggacttccctgagagcagggtcatcagccagcctgaccagaccctggagatcctgatgtctgagctggaccctgctgtgatggaccagttctacatgaaggatggagtgacagccaaggatgtgacccgggagagcggcatccgggacctgatccctggctctgtgattgatgccaccatgttcaacccctgtggctacagcatgaatggcatgaagagtgatggcacctactggaccatccacatcaccccagagcctgagttctcctatgtgtcctttgagaccaacctgagccagaccagctatgatgacctgatcaggaaggtggtggaggtgttcaagccaggcaagtttgtgaccaccctgtttgtgaaccagagcagcaaatgtagaacagtgctggccagcccccagaagattgagggcttcaagaggctggactgccagagcgccatgtttaatgactacaactttgtgttcaccagctttgccaagaagcagcagcagcagcagagctag

SEQ ID NO: 142874 - DNA, 645 bp, synthetic construct
  misc_feature 1..645: note = Description of Artificial Sequence: Synthetic coding sequence
  source 1..645: mol_type = other DNA
atggaggccgcccacttctttgagggcacagagaagctgctggaggtgtggttcagccggcagcagccagatgccaaccagggcagcggggacctgcggaccatcccccgctacctgtacaccctggacttccctgagagcagggtcatcagccagcctgaccagaccctggagatcctgatgtctgagctggaccctgctgtgatggaccagttctacatgaaggatggagtgacagccaaggatgtgacccgggagagcggcatccgggacctgatccctggctctgtgattgatgccaccatgttcaacccctgtggctacagcatgaatggcatgaagagtgatggcacctactggaccatccacatcaccccagagcctgagttctcctatgtgtcctttgagaccaacctgagccagaccagctatgatgacctgatcaggaaggtggtggaggtgttcaagccaggcaagtttgtgaccaccctgtttgtgaaccagagcagcaaatgtagaacagtgctggccagcccccagaagattgagggcttcaagaggctggactgccagagcgccatgtttaatgactacaactttgtgttcaccagctttgccaagaagcagcagcagcagcagagctag

SEQ ID NO: 142875 - DNA, 3360 bp, synthetic construct
  misc_feature 1..3360: note = Description of Artificial Sequence: Synthetic coding sequence
  source 1..3360: mol_type = other DNA
atggccggggccccccggggcggcggcggcggcggcggcggggccggggagcccggcggcgctgagagagctgctggcaccagcagaagaagaggcctgcgggcctgtgatgaggagtttgcctgcccagagctggaggccctcttccggggctacaccctgcggctggagcaggccgccaccctgaaggccctggccgtgctgagcctgctggccggggccctggccctggccgagctgctgggcgcccctggccctgcccctggcctggccaagggcagccaccctgtgcactgtgtgctcttcctggccctgctggtggtgaccaacgtgcgcagcctgcaggtgccccagctgcagcaggtgggccagctggccctgctcttcagcctgacctttgccctgctgtgctgcccctttgccctgggcggccctgcccggggcagcgctggagctgctgggggccctgccacagctgagcagggcgtgtggcagctgctgctggtgacctttgtgtcctatgccctgctgcctgtgcgcagcctgctggccatcggcttcggcctggtggtggccgccagccacctgctggtgacagccaccctggtgcctgccaagaggccccggctgtggaggaccctgggcgccaatgccctgctgtttgtgggcgtgaacatgtatggagtgtttgtgcgcatcctgacagagaggagccagaggaaggccttcctgcaggcccggagctgcattgaagatcggctgcggctggaggatgaaaatgagaagcaggagcggctgctgatgagcctgctgcccagaaatgtggccatggagatgaaggaggacttcctgaagcccccagagcgcatcttccacaagatctacatccagagacatgacaacgtgtccatcctgtttgctgacatcgtgggcttcaccggcctggccagccagtgcacagcccaggagctggtgaagctgctgaatgagctgtttgggaagtttgatgagctggccacagagaaccactgccgccgcatcaagatcctgggggactgctactactgtgtgtctggcctgacccagcccaagacagaccacgcccactgctgcgtggagatgggcctggacatgattgacaccatcacctctgtggccgaggccacagaggtggacctgaacatgagggtgggcctgcacacaggccgggtgctgtgtggggtgctgggcctgaggaagtggcagtatgatgtgtggagcaatgatgtgaccctggccaacgtgatggaggccgccggcctgcccgggaaggtgcacatcaccaagaccaccctggcctgcctgaatggagactatgaggtggagcccggctacggccacgagaggaacagcttcctgaagacccacaacatcgagaccttcttcatcgtgcccagccacaggaggaagatcttccctggcctcatcctgagtgacatcaagccagccaagaggatgaagttcaagacagtgtgctacctgctggtgcagctgatgcactgcaggaagatgttcaaggccgagatccccttcagcaatgtgatgacctgtgaagatgatgacaagaggcgggccctgaggacagccagcgagaagctgaggaacagaagcagcttcagcaccaacgtggtgtacaccaccccaggcaccagggtgaaccgctacatcagccggctgctggaggcccggcagacagagctggagatggctgacctgaacttcttcaccctgaagtacaagcacgtggagcgggagcagaagtaccaccagctgcaggatgagtacttcaccagcgctgtggtgctgaccctcatcctggccgccctgtttggcctggtgtacctgctgatcttcccccagagcgtggtggtgctgctgctgctggtgttctgcatctgcttcctggtggcctgtgtgctgtacctgcacatcaccagggtgcagtgcttccctggctgcctgaccatccagatcagaacagtgctgtgcatcttcatcgtggtgctgatctacagcgtggcccagggctgtgtggtgggctgcctgccctgggcctggagcagcaagcccaacagcagcctggtggtgctgagcagcggcggccagaggacagccctgcccaccctgccctgtgagagcacccaccacgccctgctgtgctgcctggtgggcaccctgcccctggccatcttcttccgggtgagcagcctgcccaagatgatcctgctgagcggcctgaccaccagctacatcctggtgctggagctgagcggctacaccaggactggaggcggcgctgtgtctggccgctcctatgagcccatcgtggccatcctgctcttcagctgtgccctggccctgcacgcccggcaggtggacatccggctgcggctggactacctgtgggccgcccaggccgaggaggagcgggaggacatggagaaggtgaagctggacaacagacgcatcctcttcaacctgctgcctgcccacgtggcccagcacttcctgatgagcaaccccaggaacatggacctgtactaccagagctacagccaggtgggcgtgatgtttgccagcatccccaacttcaatgacttctacatcgagctggatggcaacaacatgggcgtggagtgcctgcggctgctgaatgagatcatcgctgactttgatgagctgatggagaaggacttctacaaggacatcgagaagatcaagaccatcggcagcacctacatggctgctgtgggcctggcccccaccagcggcaccaaggccaagaagagcatcagcagccacctgagcaccctggccgactttgccatcgagatgtttgatgtgctggatgagatcaactaccagagctacaatgactttgtgctgcgggtgggcatcaacgtgggccctgtggtggccggcgtgattggagcccggcggccccagtatgacatctggggcaacacagtgaatgtggccagcaggatggacagcactggagtgcagggccgcatccaggtgacagaggaggtgcaccggctgctgcggcgctgcccctaccactttgtgtgccggggcaaggtgtctgtgaagggcaagggggagatgctgacctacttcctggagggccgcacagatggaaatggcagccagatccgcagcctgggcctggacaggaagatgtgccccttcggccgggccggcctgcagggcagaagacctcctgtgtgccccatgcctggggtgtctgtgcgggccggcctgcccccccacagccctggccagtacctgcccagcgctgctgctgggaaggaggcctag

SEQ ID NO: 142876 - DNA, 3174 bp, synthetic construct
  misc_feature 1..3174: note = Description of Artificial Sequence: Synthetic coding sequence
  source 1..3174: mol_type = other DNA
atggccggggccccccggggcggcggcggcggcggcggcggggccggggagcccggcggcgctgagagagctgctggcaccagcagaagaagaggcctgcgggcctgtgatgaggagtttgcctgcccagagctggaggccctcttccggggctacaccctgcggctggagcaggccgccaccctgaaggccctggccgtgctgagcctgctggccggggccctggccctggccgagctgctgggcgcccctggccctgcccctggcctggccaagggcagccaccctgtgcactgtgtgctcttcctggccctgctggtggtgaccaacgtgcgcagcctgcaggtgccccagctgcagcaggtgggccagctggccctgctcttcagcctgacctttgccctgctgtgctgcccctttgccctgggcggccctgcccggggcagcgctggagctgctgggggccctgccacagctgagcagggcgtgtggcagctgctgctggtgacctttgtgtcctatgccctgctgcctgtgcgcagcctgctggccatcggcttcggcctggtggtggccgccagccacctgctggtgacagccaccctggtgcctgccaagaggccccggctgtggaggaccctgggcgccaatgccctgctgtttgtgggcgtgaacatgtatggagtgtttgtgcgcatcctgacagagaggagccagaggaaggccttcctgcaggcccggagctgcattgaagatcggctgcggctggaggatgaaaatgagaagcaggagcggctgctgatgagcctgctgcccagaaatgtggccatggagatgaaggaggacttcctgaagcccccagagcgcatcttccacaagatctacatccagagacatgacaacgtgtccatcctgtttgctgacatcgtgggcttcaccggcctggccagccagtgcacagcccaggagctggtgaagctgctgaatgagctgtttgggaagtttgatgagctggccacagagaaccactgccgccgcatcaagatcctgggggactgctactactgtgtgtctggcctgacccagcccaagacagaccacgcccactgctgcgtggagatgggcctggacatgattgacaccatcacctctgtggccgaggccacagaggtggacctgaacatgagggtgggcctgcacacaggccgggtgctgtgtggggtgctgggcctgaggaagtggcagtatgatgtgtggagcaatgatgtgaccctggccaacgtgatggaggccgccggcctgcccgggaaggtgcacatcaccaagaccaccctggcctgcctgaatggagactatgaggtggagcccggctacggccacgagaggaacagcttcctgaagacccacaacatcgagaccttcttcatcgtgcccagccacaggaggaagatcttccctggcctcatcctgagtgacatcaagccagccaagaggatgaagttcaagacagtgtgctacctgctggtgcagctgatgcactgcaggaagatgttcaaggccgagatccccttcagcaatgtgatgacctgtgaagatgatgacaagaggcgggccctgaggacagccagcgagaagctgaggaacagaagcagcttcagcaccaacgtggtgtacaccaccccaggcaccagggtgaaccgctacatcagccggctgctggaggcccggcagacagagctggagatggctgacctgaacttcttcaccctgaagtacaagcacgtggagcgggagcagaagtaccaccagctgcaggatgagtacttcaccagcgctgtggtgctgaccctcatcctggccgccctgtttggcctggtgtacctgctgatcttcccccagagcgtggtggtgctgctgctgctggtgttctgcatctgcttcctggtggcctgtgtgctgtacctgcacatcaccagggtgcagtgcttccctggctgcctgaccatccagatcagaacagtgctgtgcatcttcatcgtggtgctgatctacagcgtggcccagggctgtgtggtgggctgcctgccctgggcctggagcagcaagcccaacagcagcctggtggtgctgagcagcggcggccagaggacagccctgcccaccctgccctgtgagagcacccaccacgccctgctgtgctgcctggtgggcaccctgcccctggccatcttcttccgggtgagcagcctgcccaagatgatcctgctgagcggcctgaccaccagctacatcctggtgctggagctgagcggctacaccaggactggaggcggcgctgtgtctggccgctcctatgagcccatcgtggccatcctgctcttcagctgtgccctggccctgcacgcccggcaggtggacatccggctgcggctggactacctgtgggccgcccaggccgaggaggagcgggaggacatggagaaggtgaagctggacaacagacgcatcctcttcaacctgctgcctgcccacgtggcccagcacttcctgatgagcaaccccaggaacatggacctgtactaccagagctacagccaggtgggcgtgatgtttgccagcatccccaacttcaatgacttctacatcgagctggatggcaacaacatgggcgtggagtgcctgcggctgctgaatgagatcatcgctgactttgatgagctgatggagaaggacttctacaaggacatcgagaagatcaagaccatcggcagcacctacatggctgctgtgggcctggcccccaccagcggcaccaaggccaagaagagcatcagcagccacctgagcaccctggccgactttgccatcgagatgtttgatgtgctggatgagatcaactaccagagctacaatgactttgtgctgcgggtgggcatcaacgtgggccctgtggtggccggcgtgattggagcccggcggccccagtatgacatctggggcaacacagtgaatgtggccagcaggatggacagcactggagtgcagggccgcatccaggtgacagaggaggtgcaccggctgctgcggcgctgcccccccctgtgtgtgccccggcagagccagtgccagggccagaggagagatgtggacatcctgagccggcggcaggactag

SEQ ID NO: 142877 - DNA, 3276 bp, synthetic construct
  misc_feature 1..3276: note = Description of Artificial Sequence: Synthetic coding sequence
  source 1..3276: mol_type = other DNA
atgtggcaggaggccatgagaagaagacgctacctgcgggacagaagtgaggaggccgccggcggcggagatggcctgcccaggagccgggactggctgtatgagagctactactgcatgagccagcagcaccccctgattgtgttcctgctgctgattgtgatgggcagctgcctggccctgctggccgtgttctttgccctgggcctggaggtggaggaccacgtggccttcctgatcaccgtgcccacagccctggccatcttctttgccatcttcatcctggtgtgcatcgagagcgtcttcaagaagctgctgcggctcttcagcctggtgatctggatctgcctggtggccatgggctacctgttcatgtgctttggaggcaccgtgagcccctgggaccaggtgtccttcttcctgttcatcatctttgtggtgtacaccatgctgcccttcaacatgagagatgccatcatcgcctctgtgctgaccagcagcagccacaccatcgtgctgtctgtgtgcctgagcgccaccccaggcggcaaggagcacctggtgtggcagatcctggccaacgtcatcatcttcatctgtggcaacctggccggggcctaccacaagcacctgatggagctggccctgcagcagacctaccaggacacctgcaactgcatcaagagccgcatcaagctggagtttgagaagaggcagcaggagcggctgctgctgagcctgctgcctgcccacatcgccatggagatgaaggccgagatcatccagaggctgcagggccccaaggccggccagatggagaacaccaacaacttccacaacctgtatgtgaagaggcacaccaacgtgtccatcctgtatgctgacatcgtgggcttcacccggctggccagtgactgcagccctggagagctggtgcacatgctgaatgagctgtttgggaagtttgaccagatcgccaaggaaaatgaatgcatgaggatcaagatcctgggggactgctactactgtgtgtctggcctgcccatcagcctgcccaaccacgccaagaactgtgtgaagatgggcctggacatgtgtgaggccatcaagaaggtgagagatgccaccggggtggacatcaacatgagggtgggcgtgcacagcggaaatgtgctgtgtggggtcatcggcctgcagaagtggcagtatgatgtgtggagccatgatgtgaccctggccaaccacatggaggccggcggcgtgcccggccgggtgcacatcagctctgtgaccctggagcacctgaatggagcctacaaggtggaggagggagatggagacatccgggacccctacctgaagcagcacctggtgaagacctacttcgtcatcaaccccaagggggagcggcgcagcccccagcacctgttccggcccaggcacaccctggatggagccaagatgagggcctctgtgaggatgacccgctacctggagagctggggcgccgccaagccctttgcccacctgcaccaccgggacagcatgaccacagaaaatggcaagatcagcaccacagatgtgcccatgggccagcacaacttccagaacagaaccctgcggaccaagagccagaagaagagatttgaggaggagctgaatgaaagaatgatccaggccattgatggcatcaatgcccagaagcagtggctgaagtctgaggacatccagaggatcagcctgctcttctacaacaaggtgctggagaaggagtaccgggccacagccctgcctgccttcaagtactacgtgacctgtgcctgcctgatcttcttctgcatcttcatcgtgcagatcctggtgctgcccaagacctctgtgctgggcatcagctttggagctgccttcctgctgctggccttcatcctgtttgtgtgctttgctggccagctgctgcagtgcagcaagaaggccagccccctgctgatgtggctgctgaagagcagcggcatcatcgccaaccggccctggccccgcatcagcctgaccatcatcaccacagccatcatcctgatgatggctgtgttcaacatgttcttcctgagtgacagcgaggagaccatccccccaacagccaacaccaccaacaccagcttcagcgccagcaacaaccaggtggccatcctgcgggcccagaacctcttcttcctgccctacttcatctacagctgcatcctgggcctcatcagctgcagcgtcttcctgcgggtgaactatgagctgaagatgctgatcatgatggtggccctggtgggctacaacaccatcctgctgcacacccacgcccacgtgctgggggactacagccaggtgctgtttgagcggcccggcatctggaaggacctgaagaccatgggctctgtgtccctgagcatcttcttcatcaccctgctggtgctgggccggcagaatgagtactactgccgcctggacttcctgtggaagaacaagttcaagaaggagcgggaggagattgagaccatggagaacctgaacagagtgctgctggagaatgtgctgcctgcccacgtggccgagcacttcctggcccggagcctgaagaatgaggagctgtaccaccagagctatgactgtgtgtgtgtgatgtttgccagcatcccagacttcaaggagttctacacagaaagtgatgtgaacaaggagggcctggagtgcctgcggctgctgaatgagatcatcgctgactttgatgacctgctgagcaagcccaagttctctggagtggagaagatcaagaccatcggcagcacctacatggccgccaccggcctgtctgctgtgcccagccaggagcacagccaggagcctgagcggcagtacatgcacatcggcaccatggtggagtttgcctttgccctggtgggcaagctggatgccatcaacaagcacagcttcaatgacttcaagctgcgggtgggcatcaaccacggccctgtgattgctggggtgattggagcccagaagccccagtatgacatctggggcaacacagtgaatgtggccagcaggatggacagcactggagtgctggacaagatccaggtgacagaggagaccagcctggtgctgcagaccctgggctacacctgcacctgccggggcatcatcaacgtgaagggcaagggggacctgaagacctactttgtgaacacagagatgagccgcagcctgagccagagcaatgtggccagctag

SEQ ID NO: 142878 - DNA, 612 bp, synthetic construct
  misc_feature 1..612: note = Description of Artificial Sequence: Synthetic coding sequence
  source 1..612: mol_type = other DNA
atggagaacctgaacagagtgctgctggagaatgtgctgcctgcccacgtggccgagcacttcctggcccggagcctgaagaatgaggagctgtaccaccagagctatgactgtgtgtgtgtgatgtttgccagcatcccagacttcaaggagttctacacagaaagtgatgtgaacaaggagggcctggagtgcctgcggctgctgaatgagatcatcgctgactttgatgacctgctgagcaagcccaagttcagcggcgtggagaagatcaagaccatcggcagcacctacatggccgccaccggcctgtctgctgtgcccagccaggagcacagccaggagcctgagcggcagtacatgcacatcggcaccatggtggagtttgcctttgccctggtgggcaagctggatgccatcaacaagcacagcttcaatgacttcaagctgcgggtgggcgtgacagaggagaccagcctggtgctgcagaccctgggctacacctgcacctgccggggcatcatcaacgtgaagggcaagggggacctgaagacctactttgtgaacacagagatgagccgcagcctgagccagagcaatgtggccagctag

SEQ ID NO: 142879 - DNA, 2736 bp, synthetic construct
  misc_feature 1..2736: note = Description of Artificial Sequence: Synthetic coding sequence
  source 1..2736: mol_type = other DNA
atggacctgcgctgggcccgggacctgcacctgcgggaggccagccgctctgtggccttcaccaccctgcggctgggcgctgtgaccaccggcctgctgaccttccgggagcccggggacaaggagaagagcggcaagggcctgggcaagcgctggaggatccagcgggaggagagccaggagcggctgctgctgagcctgctgcctgcccacatcgccatggagatgaaggccgagatcatccagaggctgcagggccccaaggccggccagatggagaacaccaacaacttccacaacctgtatgtgaagaggcacaccaacgtgtccatcctgtatgctgacatcgtgggcttcacccggctggccagtgactgcagccctggagagctggtgcacatgctgaatgagctgtttgggaagtttgaccagatcgccaaggaaaatgaatgcatgaggatcaagatcctgggggactgctactactgtgtgtctggcctgcccatcagcctgcccaaccacgccaagaactgtgtgaagatgggcctggacatgtgtgaggccatcaagaaggtgagagatgccaccggggtggacatcaacatgagggtgggcgtgcacagcggaaatgtgctgtgtggggtcatcggcctgcagaagtggcagtatgatgtgtggagccatgatgtgaccctggccaaccacatggaggccggcggcgtgcccggccgggtgcacatcagctctgtgaccctggagcacctgaatggagcctacaaggtggaggagggagatggagacatccgggacccctacctgaagcagcacctggtgaagacctacttcgtcatcaaccccaagggggagcggcgcagcccccagcacctgttccggcccaggcacaccctggatggagccaagatgagggcctctgtgaggatgacccgctacctggagagctggggcgccgccaagccctttgcccacctgcaccaccgggacagcatgaccacagaaaatggcaagatcagcaccacagatgtgcccatgggccagcacaacttccagaacagaaccctgcggaccaagagccagaagaagagatttgaggaggagctgaatgaaagaatgatccaggccattgatggcatcaatgcccagaagcagtggctgaagtctgaggacatccagaggatcagcctgctcttctacaacaaggtgctggagaaggagtaccgggccacagccctgcctgccttcaagtactacgtgacctgtgcctgcctgatcttcttctgcatcttcatcgtgcagatcctggtgctgcccaagacctctgtgctgggcatcagctttggagctgccttcctgctgctggccttcatcctgtttgtgtgctttgctggccagctgctgcagtgcagcaagaaggccagccccctgctgatgtggctgctgaagagcagcggcatcatcgccaaccggccctggccccgcatcagcctgaccatcatcaccacagccatcatcctgatgatggctgtgttcaacatgttcttcctgagtgacagcgaggagaccatccccccaacagccaacaccaccaacaccagcttcagcgccagcaacaaccaggtggccatcctgcgggcccagaacctcttcttcctgccctacttcatctacagctgcatcctgggcctcatcagctgcagcgtcttcctgcgggtgaactatgagctgaagatgctgatcatgatggtggccctggtgggctacaacaccatcctgctgcacacccacgcccacgtgctgggggactacagccaggtgctgtttgagcggcccggcatctggaaggacctgaagaccatgggctctgtgtccctgagcatcttcttcatcaccctgctggtgctgggccggcagaatgagtactactgccgcctggacttcctgtggaagaacaagttcaagaaggagcgggaggagattgagaccatggagaacctgaacagagtgctgctggagaatgtgctgcctgcccacgtggccgagcacttcctggcccggagcctgaagaatgaggagctgtaccaccagagctatgactgtgtgtgtgtgatgtttgccagcatcccagacttcaaggagttctacacagaaagtgatgtgaacaaggagggcctggagtgcctgcggctgctgaatgagatcatcgctgactttgatgacctgctgagcaagcccaagttctctggagtggagaagatcaagaccatcggcagcacctacatggccgccaccggcctgtctgctgtgcccagccaggagcacagccaggagcctgagcggcagtacatgcacatcggcaccatggtggagtttgcctttgccctggtgggcaagctggatgccatcaacaagcacagcttcaatgacttcaagctgcgggtgggcatcaaccacggccctgtgattgctggggtgattggagcccagaagccccagtatgacatctggggcaacacagtgaatgtggccagcaggatggacagcactggagtgctggacaagatccaggtgacagaggagaccagcctggtgctgcagaccctgggctacacctgcacctgccggggcatcatcaacgtgaagggcaagggggacctgaagacctactttgtgaacacagagatgagccgcagcctgagccagagcaatgtggccagctag

SEQ ID NO: 142880 - DNA, 2775 bp, synthetic construct
  misc_feature 1..2775: note = Description of Artificial Sequence: Synthetic coding sequence
  source 1..2775: mol_type = other DNA
atgctgcccttcaacatgagagatgccatcatcgcctctgtgctgaccagcagcagccacaccatcgtgctgtctgtgtgcctgagcgccacccctgggggcaaggagcacctggtgtggcagatcctggccaacgtcatcatcttcatctgtggcaacctggccggggcctaccacaagcacctgatggagctggccctgcagcagacctaccaggacacctgcaactgcatcaagagccgcatcaagctggagtttgagaagaggcagcaggagcggctgctgctgagcctgctgcctgcccacatcgccatggagatgaaggccgagatcatccagaggctgcagggccccaaggccggccagatggagaacaccaacaacttccacaacctgtatgtgaagaggcacaccaacgtgtccatcctgtatgctgacatcgtgggcttcacccggctggccagtgactgcagccctggagagctggtgcacatgctgaatgagctgtttgggaagtttgaccagatcgccaaggaaaatgaatgcatgaggatcaagatcctgggggactgctactactgtgtgtctggcctgcccatcagcctgcccaaccacgccaagaactgtgtgaagatgggcctggacatgtgtgaggccatcaagaaggtgagagatgccactggagtggacatcaacatgagggtgggcgtgcacagcggaaatgtgctgtgtggggtgattggcctgcagaagtggcagtatgatgtgtggagccatgatgtgaccctggccaaccacatggaggccggcggcgtgcccggccgggtgcacatcagctctgtgaccctggagcacctgaatggagcctacaaggtggaggagggagatggagacatccgggacccctacctgaagcagcacctggtgaagacctactttgtgatcaaccccaagggggagaggaggagcccccagcacctgttccggcccaggcacaccctggatggagccaagccctttgcccacctgcaccaccgggacagcatgaccacagaaaatggcaagatcagcaccacagatgtgcccatgggccagcacaacttccagaacagaaccctgcggaccaagagccagaagaagagatttgaggaggagctgaatgaaagaatgatccaggccattgatggcatcaatgcccagaagcagtggctgaagtctgaggacatccagaggatcagcctgctcttctacaacaaggtgctggagaaggagtaccgggccacagccctgcctgccttcaagtactacgtgacctgtgcctgcctgatcttcttctgcatcttcatcgtgcagatcctggtgctgcccaagacctctgtgctgggcatcagctttggagctgccttcctgctgctggccttcatcctgtttgtgtgctttgctggccagctgctgcagtgcagcaagaaggccagccccctgctgatgtggctgctgaagagcagcggcatcatcgccaaccggccctggccccgcatcagcctgaccatcatcaccacagccatcatcctgatgatggctgtgttcaacatgttcttcctgagtgacagcgaggagaccatccccccaacagccaacaccaccaacaccagcttcagcgccagcaacaaccaggtggccatcctgcgggcccagaacctcttcttcctgccctacttcatctacagctgcatcctgggcctcatcagctgcagcgtcttcctgcgggtgaactatgagctgaagatgctgatcatgatggtggccctggtgggctacaacaccatcctgctgcacacccacgcccacgtgctgggggactacagccaggtgctgtttgagaggcctggcatctggaaggacctgaagaccatgggctctgtgtccctgagcatcttcttcatcaccctgctggtgctgggccggcagaatgagtactactgccgcctggacttcctgtggaagaacaagttcaagaaggagcgggaggagattgagaccatggagaacctgaacagagtgctgctggagaatgtgctgcctgcccacgtggccgagcacttcctggcccggagcctgaagaatgaggagctgtaccaccagagctatgactgtgtgtgtgtgatgtttgccagcatcccagacttcaaggagttctacacagaaagtgatgtgaacaaggagggcctggagtgcctgcggctgctgaatgagatcatcgctgactttgatgacctgctgagcaagcccaagttcagcggcgtggagaagatcaagaccatcggcagcacctacatggccgccaccggcctgtctgctgtgcccagccaggagcacagccaggagcctgagcggcagtacatgcacatcggcaccatggtggagtttgcctttgccctggtgggcaagctggatgccatcaacaagcacagcttcaatgacttcaagctgcgggtgggcatcaaccacggccctgtgattgctggggtcatcggggcccagaagccccagtatgacatctggggcaacacagtgaatgtggccagcaggatggacagcactggagtgctggacaagatccaggtgacagaggagaccagcctggtgctgcagaccctgggctacacctgcacctgccggggcatcatcaacgtgaagggcaaaggagacctgaagacctactttgtgaacacagagatgagccgcagcctgagccagagcaatgtggccagctag

SEQ ID NO: 142881 - DNA, 3435 bp, synthetic construct
  misc_feature 1..3435: note = Description of Artificial Sequence: Synthetic coding sequence
  source 1..3435: mol_type = other DNA
atgcccaggaaccagggcttcagcgagcctgagtacagcgctgagtacagcgctgagtacagcgtgtccctgcccagcgaccctgacagaggagtgggccgcacccatgagatctctgtgagaaattctggcagctgcctgtgcctgccccgcttcatgaggctgacctttgtgcctgagagcctggagaacctgtaccagacctacttcaagaggcagagacatgagaccctgctggtgctggtggtgtttgctgccctgtttgactgctacgtggtggtgatgtgtgctgtggtgttcagcagtgacaagctggccagcctggccgtggccggcatcggcctggtgctggacatcatcctgtttgtgctgtgcaagaagggcctgctgcctgacagagtgacccggcgggtgctgccctacgtgctgtggctgctgatcacagcccagatcttctcctacctgggcctgaactttgcccgggcccacgccgccagtgacacagtgggctggcaggtgttctttgtgttctccttcttcatcaccctgcccctgagcctgagccccatcgtcatcatctctgtggtgtcctgtgtggtgcacaccctggtgctgggcgtgacagtggcccagcagcagcaggaggagctgaagggcatgcagctgctgcgggagatcctggccaacgtgttcctgtacctgtgtgccatcgctgtgggcatcatgagctactacatggctgacaggaagcacaggaaggccttcctggaggcccggcagagcctggaggtgaagatgaacctggaggagcagagccagcagcaggagaacctgatgctgagcatcctgcccaagcacgtggctgatgagatgctgaaggacatgaagaaggatgagagccagaaggaccagcagcagttcaacaccatgtacatgtacagacatgaaaatgtgtccatcctgtttgctgacatcgtgggcttcacccagctgagcagcgcctgcagcgcccaggagctggtgaagctgctgaatgagctgtttgccaggtttgacaagctggccgccaagtaccaccagctgcgcatcaagatcctgggggactgctactactgcatctgtggcctgcctgactacagagaagatcatgctgtgtgcagcatcctgatgggcctggccatggtggaggccatctcctatgtgcgggagaagaccaagacaggagtggacatgagggtgggcgtgcacactggaacagtgctgggcggcgtgctgggccagaagcgctggcagtatgatgtgtggagcacagatgtgacagtggccaacaagatggaggccggcggcatccctggccgggtgcacatcagccagagcaccatggactgcctgaagggggagtttgatgtggagcctggagatggcggcagccgctgtgactacctggaggagaagggcatcgagacctacctgatcatcgccagcaagccagaggtgaagaagacagccacccagaatggcctgaatggaagtgccctgcccaatggagccccagccagcagcaagagcagcagccctgccctgattgagaccaaggagcccaatggaagtgcccacagcagcggcagcaccagcgagaagccagaggagcaggatgcccaggccgacaaccccagcttccccaacccccggcggcggctgcggctgcaggacctggccgacagagtggtggatgcctctgaagatgagcacgagctgaaccagctgctgaatgaggccctgctggagcgggagagcgcccaggtggtgaagaagaggaacaccttcctgctgtccatgaggttcatggaccctgagatggagacccgctacagcgtggagaaggagaagcagagcggggccgccttcagctgcagctgtgtggtgctgctgtgcacagccctggtggagatcctgattgacccctggctgatgaccaactacgtgaccttcatggtgggggagatcctgctgctgatcctgaccatctgcagcctggccgccatcttcccccgggccttccccaagaagctggtggccttcagcacctggattgacaggacccgctgggccaggaacacctgggccatgctggccatcttcatcctggtgatggccaacgtggtggacatgctgagctgcctgcagtactacacaggccccagcaatgccacagctggcatggagacagagggcagctgcctggagaaccccaagtactacaactacgtggccgtgctgagcctgattgccaccatcatgctggtgcaggtgagccacatggtgaagctgaccctgatgctgctggtggccggggctgtggccaccatcaacctgtatgcctggaggcctgtgtttgatgaatatgaccacaagcgcttccgggagcatgacctgcccatggtggccctggagcagatgcagggcttcaaccctggcctgaatggaacagaccggctgcccctggtgcccagcaagtacagcatgacagtgatggtgttcctgatgatgctgtccttctactacttcagcagacatgtggagaagctggcccggaccctcttcctgtggaagattgaggtgcatgaccagaaggagcgggtgtatgagatgaggcgctggaatgaggccctggtgaccaacatgctgcctgagcacgtggcccggcacttcctgggcagcaagaagagagatgaggagctgtacagccagacctatgatgaaattggagtgatgtttgccagcctgcccaactttgctgacttctacacagaggagagcatcaacaatggaggcattgaatgtctgcgcttcctgaatgagatcatcagtgactttgacagcctgctggacaaccccaagttccgggtcatcaccaagatcaagaccatcggcagcacctacatggccgccagcggcgtgaccccagatgtgaacaccaacggctttgccagcagcaacaaggaggacaagtctgagcgggagcgctggcagcacctggccgacctggccgactttgccctggccatgaaggacaccctgaccaacatcaacaaccagagcttcaacaacttcatgctgcgcatcggcatgaacaagggcggcgtgctggccggggtcatcggggccaggaagccccactatgacatctggggcaacacagtgaatgtggccagcaggatggagagcactggagtgatgggcaacatccaggtggtggaggagacccaggtgatcctgcgggagtatggcttccgctttgtgcggcggggccccatctttgtgaagggcaaaggagagctgctgaccttcttcctgaagggccgggacaagctggccaccttccccaacggccccagcgtgaccctgccccaccaggtggtggacaacagctag

SEQ ID NO: 142882 - DNA, 3360 bp, synthetic construct
  misc_feature 1..3360: note = Description of Artificial Sequence: Synthetic coding sequence
  source 1..3360: mol_type = other DNA
atgcccaggaaccagggcttcagcgagcctgagtacagcgctgagtacagcgctgagtacagcgtgtccctgccccgcttcatgaggctgacctttgtgcctgagagcctggagaacctgtaccagacctacttcaagaggcagagacatgagaccctgctggtgctggtggtgtttgctgccctgtttgactgctacgtggtggtgatgtgtgctgtggtgttcagcagtgacaagctggccagcctggccgtggccggcatcggcctggtgctggacatcatcctgtttgtgctgtgcaagaagggcctgctgcctgacagagtgaccaggagagtgctgccctacgtgctgtggctgctgatcacagcccagatcttctcctacctgggcctgaactttgcccgggcccatgctgccagtgacacagtgggctggcaggtgttctttgtgttctccttcttcatcaccctgcccctgagcctgagccccatcgtcatcatctctgtggtgtcctgtgtggtgcacaccctggtgctgggcgtgacagtggcccagcagcagcaggaggagctgaagggcatgcagctgctgcgggagatcctggccaacgtgttcctgtacctgtgtgccatcgctgtgggcatcatgagctactacatggctgacaggaagcacaggaaggccttcctggaggcccggcagagcctggaggtgaagatgaacctggaggagcagagccagcagcaggagaacctgatgctgagcatcctgcccaagcacgtggctgatgagatgctgaaggacatgaagaaggatgagagccagaaggaccagcagcagttcaacaccatgtacatgtacagacatgaaaatgtgtccatcctgtttgctgacatcgtgggcttcacccagctgagcagcgcctgcagcgcccaggagctggtgaagctgctgaatgagctgtttgccaggtttgacaagctggccgccaagtaccaccagctgcgcatcaagatcctgggggactgctactactgcatctgtggcctgcctgactaccgggaggaccatgctgtgtgcagcatcctgatgggcctggccatggtggaggccatctcctatgtgcgggagaagaccaagacaggagtggacatgagggtgggcgtgcacacaggcaccgtgctgggcggcgtgctgggccagaagcgctggcagtatgatgtgtggagcacagatgtgacagtggccaacaagatggaggccggcggcatccctggccgggtgcacatcagccagagcaccatggactgcctgaagggggagtttgatgtggagcctggagatggcggcagccgctgtgactacctggaggagaagggcatcgagacctacctgatcatcgccagcaagccagaggtgaagaagacagccacccagaatggcctgaatggcagcgccctgcccaacggggccccagccagcagcaagagcagcagccctgccctgattgagaccaaggagcccaacggcagcgcccacagcagcggcagcaccagcgagaagccagaggagcaggatgcccaggccgacaaccccagcttccccaacccccggcggcggctgcggctgcaggacctggccgacagagtggtggatgcctctgaagatgaacatgagctgaaccagctgctgaatgaggccctgctggagcgggagagcgcccaggtggtgaagaagaggaacaccttcctgctgtccatgaggttcatggaccctgagatggagacccgctacagcgtggagaaggagaagcagagcggggccgccttcagctgcagctgtgtggtgctgctgtgcacagccctggtggagatcctgattgacccctggctgatgaccaactacgtgaccttcatggtgggggagatcctgctgctgatcctgaccatctgcagcctggccgccatcttcccccgggccttccccaagaagctggtggccttcagcacctggattgacaggacccgctgggccaggaacacctgggccatgctggccatcttcatcctggtgatggccaacgtggtggacatgctgagctgcctgcagtactacacaggccccagcaatgccacagctggcatggagacagagggcagctgcctggagaaccccaagtactacaactacgtggccgtgctgagcctcatcgccaccatcatgctggtgcaggtgagccacatggtgaagctgaccctgatgctgctggtggccggggctgtggccaccatcaacctgtatgcctggaggcctgtgtttgatgaatatgaccacaagcgcttccgggagcatgacctgcccatggtggccctggagcagatgcagggcttcaaccctggcctgaatggaacagaccggctgcccctggtgcccagcaagtacagcatgacagtgatggtgttcctgatgatgctgtccttctactacttcagccgccacgtggagaagctggcccggaccctcttcctgtggaagattgaggtgcatgaccagaaggagcgggtgtatgagatgaggcgctggaatgaggccctggtgaccaacatgctgcctgagcacgtggcccggcacttcctgggcagcaagaagagagatgaggagctgtacagccagacctatgatgaaattggagtgatgtttgccagcctgcccaactttgctgacttctacacagaggagagcatcaacaacggcggcatcgagtgcctgcgcttcctgaatgagatcatcagtgactttgacagcctgctggacaaccccaagttccgggtcatcaccaagatcaagaccatcggcagcacctacatggccgccagcggcgtgaccccagatgtgaacaccaatggatttgccagcagcaacaaggaggacaagtctgagcgggagcgctggcagcacctggccgacctggccgactttgccctggccatgaaggacaccctgaccaacatcaacaaccagagcttcaacaacttcatgctgagaattggcatgaacaagggcggcgtgctggccggcgtgattggagccaggaagccccactatgacatctggggcaacacagtgaatgtggccagcaggatggagagcactggagtgatgggcaacatccaggtggtggaggagacccaggtgatcctgcgggagtatggcttccgctttgtgagaagaggccccatctttgtgaagggcaagggggagctgctgaccttcttcctgaagggccgggacaagctggccaccttccccaacggccccagcgtgaccctgccccaccaggtggtggacaacagctag

SEQ ID NO: 142883 - DNA, 339 bp, synthetic construct
  misc_feature 1..339: note = Description of Artificial Sequence: Synthetic coding sequence
  source 1..339: mol_type = other DNA
atgcccaggaaccagggcttcagcgagcctgagtacagcgctgagtacagcgctgagtacagcgtgtccctgcccagcgaccctgacagaggagtgggccgcacccatgagatctctgtgagaaattctggcagctgcctgtgcctgccccgcttcatgaggctgacctttgtgcctgagagcctggagaacctgtaccagacctacttcaagaggcagagacatgagaccctgctggtgctggtggtgtttgctgccctgtttgactgctacgtggtggtgatgtgtgctgtggtgttcagcagtgacaagctggccagcctggccgtggccggctag

SEQ ID NO: 142884 - DNA, 3234 bp, synthetic construct
  misc_feature 1..3234: note = Description of Artificial Sequence: Synthetic coding sequence
  source 1..3234: mol_type = other DNA
atggcccggctcttcagcccccggcccccacccagtgaagatctcttctatgagacctactacagcctgagccagcagtaccccctgctgctgctgctgctgggcatcgtgctgtgtgccctggccgccctgctggccgtggcctgggccagcggccgggagctgaccagtgaccccagcttcctgaccaccgtgctgtgtgccctgggcggcttcagcctgctgctgggcctggccagccgggagcagaggctgcagcgctggacccggcccctgagcggcctggtgtgggtggccctgctggccctgggccacgccttcctgttcaccggcggcgtggtgtctgcctgggaccaggtgtcctacttcctgtttgtgatcttcaccgcctatgccatgctgcccctgggcatgagagatgctgctgtggccggcctggccagcagcctgagccacctgctggtgctgggcctgtacctgggcccccagcctgacagcaggcctgccctgctgccccagctggccgccaatgctgtgctcttcctgtgtggaaatgtggccggcgtgtaccacaaggccctgatggagcgggccctgcgggccaccttccgggaggccctgagcagcctgcacagcagaagaaggctggacacagagaagaagcaccaggagcacctgctgctgagcatcctgcctgcctacctggcccgggagatgaaggccgagatcatggcccggctgcaggccggccagggcagcaggcctgagagcaccaacaacttccacagcctgtatgtgaagaggcaccagggcgtgtctgtgctgtatgctgacatcgtgggcttcacccggctggccagcgagtgcagccccaaggagctggtgctgatgctgaatgagctgtttgggaagtttgaccagatcgccaaggagcacgagtgcatgaggatcaagatcctgggggactgctactactgtgtgtctggcctgcccctgagcctgcctgaccacgccatcaactgtgtgaggatgggcctggacatgtgccgggccatcaggaagctgcgggccgccactggagtggacatcaacatgagggtgggcgtgcacagcggctctgtgctgtgtggggtgattggcctgcagaagtggcagtatgatgtgtggagccatgatgtgaccctggccaaccacatggaggccggcggcgtgcccggccgggtgcacatcactggagccaccctggccctgctggccggggcctatgctgtggaggatgctggcatggagcaccgggacccctacctgcgggagctgggggagcccacctacctggtgattgaccccagggctgaggaggaggatgagaagggcacagctgggggcctgctgagcagcctggagggcctgaagatgaggcccagcctgctgatgacccgctacctggagagctggggcgccgccaagccctttgcccacctgagccacggggacagccctgtgtccaccagcacccccctgcctgagaagaccctggccagcttcagcacccagtggagcctggacaggagcaggaccccccggggcctggatgatgagctggacacaggagatgccaagttcttccaggtgattgagcagctgaacagccagaagcagtggaagcagagcaaggacttcaaccccctgaccctgtacttccgggagaaggagatggagaaggagtaccgcctgagcgccatcccagccttcaagtactatgaggcctgcaccttcctggtgttcctgagcaacttcatcatccagatgctggtgaccaacagacctccagccctggccatcacctacagcatcaccttcctgctcttcctgctgatcctgtttgtgtgcttcagcgaggacctgatgagatgtgtgctgaagggccccaagatgctgcactggctgcctgccctgagcggcctggtggccacccggcccggcctgcgcatcgccctgggcacagccaccatcctgctggtgtttgccatggccatcaccagcctcttcttcttccccaccagcagtgactgccccttccaggccccaaatgtgtcctccatgatcagcaacctgtcctgggagctgcccggcagcctgcccctcatctctgtgccctacagcatgcactgctgcaccctgggcttcctgagctgcagcctcttcctgcacatgagctttgagctgaagctgctgctgctgctgctgtggctggccgccagctgcagcctcttcctgcacagccacgcctggctgtctgaatgtctcatcgtgcggctgtacctgggccccctggacagcaggcctggggtgctgaaggagcccaagctgatgggcgccatctccttcttcatcttcttcttcaccctgctggtgctggcccggcagaatgagtactactgccgcctggacttcctgtggaagaagaagctgcggcaggagcgggaggagacagagaccatggagaacctgacccggctgctgctggagaatgtgctgcctgcccacgtggccccccagttcatcggccagaacagaagaaatgaagacctgtaccaccagagctatgaatgtgtgtgtgtgctgtttgcctctgtgcctgacttcaaggagttctacagcgagagcaacatcaaccacgagggcctggagtgcctgcggctgctgaatgagatcatcgctgactttgatgagctgctgagcaagcccaagttctctggagtggagaagatcaagaccatcggcagcacctacatggccgccaccggcctgaatgccaccagcggccaggatgcccagcaggatgctgagaggagctgcagccacctgggcaccatggtggagtttgctgtggccctgggcagcaagctggatgtgatcaacaagcacagcttcaacaacttccggctgcgggtgggcctgaaccacggccctgtggtggccggcgtgattggagcccagaagccccagtatgacatctggggcaacacagtgaatgtggccagcaggatggagagcactggagtgctgggcaagatccaggtgacagaggagacagcctgggccctgcagagcctgggctacacctgctacagcagaggagtcatcaaggtgaagggcaagggccagctgtgcacctacttcctgaacacagacctgaccaggactggacctccttctgccaccctgggctag

SEQ ID NO: 142885 - DNA, 1260 bp, synthetic construct
  misc_feature 1..1260: note = Description of Artificial Sequence: Synthetic coding sequence
  source 1..1260: mol_type = other DNA
atgagccggggcacccgggagagcgcctgctgcatgctgacctcctgggccagccggggctggccagcctctgtgcccctgcgctcctggtgcagctgcagcatgagcagcctggccagcagcacccggctgcccaggaagctgcgggccgccaccggggtggacatcaacatgagggtgggcgtgcacagcggctctgtgctgtgtggggtcatcggcctgcagaagtggcagtatgatgtgtggagccatgatgtgaccctggccaaccacatggaggccggcggcgtgcccggccgggtgcacatcaccggggccaccctggccctgctggccggggcctatgctgtggaggatgctggcatggagcaccgggacccctacctgcgggagctgggggagcccacctacctggtgattgaccccagggctgaggaggaggatgagaagggcacagctgggggcctgctgagcagcctggagggcctgaagatgaggcccagcctgctgatgacccgctacctggagagctggggcgccgccaagccctttgcccacctgagccatggagacagccctgtgtccaccagcacccccctgcctgagaagaccctggccagcttcagcacccagtggagcctggacaggagcaggaccccccggggcctggatgatgagctggacacaggagatgccaagttcttccaggtgattgagcagctgaacagccagaagcagtggaagcagagcaaggacttcaaccccctgaccctgtacttccgggagaaggagatggagaaggagtaccgcctgagcgccatcccagccttcaagtactatgaggcctgcaccttcctggtgttcctgagcaacttcatcatccagatgctggtgaccaaccggcccccagccctggccatcacctacagcatcaccttcctgctcttcctgctgatcctgtttgtgtgcttcagcgaggacctgatgagatgtgtgctgaagggccccaagatgctgcactggctgcctgccctgagcggcctggtggccaccaggcctggcctgagaattgccctgggcacagccaccatcctgctggtgtttgccatggccatcaccagcctcttcttcttccccaccagcagtgactgccccttccaggcccccaacgtgtcctccatgatcagcaacctgtcctgggagctgcccggcagcctgcccctcatctctgtgcctgtgtctgtgcccacctgcccctag

SEQ ID NO: 142886 - DNA, 3234 bp, synthetic construct; identical to SEQ ID NO: 142884
  misc_feature 1..3234: note = Description of Artificial Sequence: Synthetic coding sequence
  source 1..3234: mol_type = other DNA

SEQ ID NO: 142887 - DNA, 3234 bp, synthetic construct; identical to SEQ ID NO: 142884
  misc_feature 1..3234: note = Description of Artificial Sequence: Synthetic coding sequence
  source 1..3234: mol_type = other DNA

SEQ ID NO: 142888 - DNA, 348 bp, synthetic construct
  misc_feature 1..348: note = Description of Artificial Sequence: Synthetic coding sequence
  source 1..348: mol_type = other DNA
atggcccggctcttcagcccccggcccccacccagtgaagatctcttctatgagacctactacagcctgagccagcagtaccccctgctgctgctgctgctgggcatcgtgctgtgtgccctggccgccctgctggccgtggcctgggccagcggccgggagctgaccagtgaccccagcttcctgaccaccgtgctgtgtgccctgggcggcttcagcctgctgctgggcctggccagccgggagcagaggctgcagcgctggacccggcccctgagcggcctggtgtgggtggccctgctggccctgggccacgccttcctgttcaccggcggcgtggtgtcctag

SEQ ID NO: 142889 - DNA, 2736 bp, synthetic construct
  misc_feature 1..2736: note = Description of Artificial Sequence: Synthetic coding sequence
  source 1..2736: mol_type = other DNA
atgaagagccagaaggagggctgctgcagcagaggagacctgagcatccagacaggccctggaggagagtgggccccccggcggctggtgtccaatgtgctgatcttcagctgcaccaacatcgtgggcgtgtgcacccactacccagctgaggtgtcccagaggcaggccttccaggagacccgggagtgcatccaggcccggctgcacagccagcgggagaaccagcagcaggagcggctgctgctgtctgtgctgcccaggcatgtggccatggagatgaaggctgacatcaatgccaagcaggaggacatgatgttccacaagatctacatccagaagcatgacaacgtgtccatcctgtttgctgacatcgagggcttcaccagcctggccagccagtgcacagcccaggagctggtgatgaccctgaatgagctgtttgccaggtttgacaagctggccgctgagaaccactgcctgcgcatcaagatcctgggggactgctactactgtgtgtctggcctgcctgaggcccgggctgaccacgcccactgctgcgtggagatgggcatggacatgattgaggccatcagcctggtgcgggaggtgactggagtgaatgtgaacatgagggtgggcatccacagcggccgggtgcactgcggcgtgctgggcctgaggaagtggcagtttgatgtgtggagcaatgatgtgaccctggccaaccacatggaggccggcggcaaggccggccgcatccacatcaccaaggccaccctgaactacctgaatggagactatgaggtggagcccggctgcggcggggagagaaatgcctacctgaaggagcacagcattgagaccttcctgatcctgcgctgcacccagaagaggaaggaggagaaggccatgattgccaagatgaaccggcagaggaccaacagcatcggccacaaccccccccactggggcgctgagcggcccttctacaaccacctgggcggcaaccaggtgtccaaggagatgaagaggatgggctttgaggaccccaaggacaagaatgcccaggagagcgccaacccagaagatgaggtggatgagttcctgggccgggccattgatgcccggagcattgaccggctgcggtctgagcacgtgaggaagttcctgctgaccttccgggagccagacctggagaagaagtacagcaagcaggtggatgacagatttggagcctacgtggcctgtgccagcctggtgttcctgttcatctgctttgtgcagatcaccatcgtgccccacagcatcttcatgctgtccttctacctgacctgcagcctgctgctgaccctggtggtgtttgtgtctgtcatctacagctgtgtgaagctgttccccagccccctgcagaccctgagcaggaagatcgtgcgcagcaagatgaacagcaccctggtgggcgtcttcaccatcaccctggtgttcctggccgcctttgtgaacatgttcacctgcaacagccgggacctgctgggctgcctggcccaggagcacaacatcagcgccagccaggtgaatgcctgccacgtggccgagagcgctgtgaactacagcctgggagatgagcagggcttctgtggcagcccctggcccaactgcaacttccctgagtacttcacctacagcgtgctgctgagcctgctggcctgcagcgtcttcctgcagatcagctgcatcggcaagctggtgctgatgctggccatcgagctgatctacgtgctgattgtggaggtgcctggggtgaccctgtttgacaatgctgacctgctggtgacagccaatgccatcgacttcttcaacaacggcaccagccagtgcccagagcacgccaccaaggtggccctgaaggtggtgacccccatcatcatctctgtgtttgtgctggccctgtacctgcacgcccagcaggtggagagcacagcccggctggacttcctgtggaagctgcaggccacagaggagaaggaggagatggaggagctgcaggcctacaacagaaggctgctgcacaacatcctgcccaaggatgtggccgcccacttcctggcccgggagaggagaaatgatgagctgtactaccagagctgtgaatgtgtggccgtgatgtttgccagcatcgccaacttcagcgagttctacgtggagctggaggccaacaatgaaggagtggagtgcctgcggctgctgaatgagatcatcgctgactttgatgagatcatcagtgaagatcgcttccggcagctggagaagatcaagaccatcggcagcacctacatggccgccagcggcctgaatgacagcacctatgacaaggtgggcaagacccacatcaaggccctggccgactttgccatgaagctgatggaccagatgaagtacatcaatgagcacagcttcaacaacttccagatgaagattggcctgaacatcggccctgtggtggccggcgtgattggagccaggaagccccagtatgacatctggggcaacacagtgaatgtggccagcaggatggacagcactggagtgcctgaccgcatccaggtgaccacagacatgtaccaggtgctggccgccaacacctaccagctggagtgccggggcgtggtgaaggtgaagggcaagggggagatgatgacctacttcctgaatggaggcccccccctgtcctag

SEQ ID NO: 142890 - DNA, 3786 bp, synthetic construct
  misc_feature 1..3786: note = Description of Artificial Sequence: Synthetic coding sequence
  source 1..3786: mol_type = other DNA
atgagcggcagcaagtctgtgtccccacctggctatgctgcccagaagacagctgccccagccccccggggcggccctgagcacaggtctgcctggggcgaggccgacagccgggccaacggctacccccacgcccctgggggcagcgcccggggcagcaccaagaagccaggaggagctgtgaccccccagcagcagcagaggctggccagccgctggaggagtgatgatgatgatgatcctcccctgtctggagatgaccccctggccggcggcttcggcttctccttccgcagcaagagcgcctggcaggagagaggaggagatgactgtggccggggcagccggcggcagaggagaggagctgccagcggcggcagcacccgggcccctcctgctgggggcggcggcggcagcgctgctgctgctgccagcgctgggggcacagaggtgcggcccaggtctgtggaggtgggcctggaggagcggcggggcaagggccgggcagcagatgagctggaggccggggctgtggagggcggggagggcagcggagatggcggcagcagcgctgacagcggcagcggggccggccctggagctgtgctgagcctgggcgcctgctgcctggccctgctgcagatcttccgcagcaagaagttccccagcgacaagctggagcggctgtaccagcgctacttcttccggctgaaccagagcagcctgaccatgctgatggctgtgctggtgctggtgtgcctggtgatgctggccttccacgccgcccggccccccctgcagctgccctacctggccgtgctggccgctgctgtgggcgtcatcctgatcatggctgtgctgtgcaacagagctgccttccaccaggaccacatgggcctggcctgctacgccctgattgctgtggtgctggccgtgcaggtggtgggcctgctgctgccccagcccaggtctgccagcgagggcatctggtggacagtgttcttcatctacaccatctacaccctgctgcctgtgaggatgagagctgctgtgctgtctggagtgctgctgagcgccctgcacctggccatcgccctgcggaccaatgcccaggaccagttcctgctgaagcagctggtgtccaatgtgctgatcttcagctgcaccaacatcgtgggcgtgtgcacccactacccagctgaggtgtcccagaggcaggccttccaggagacccgggagtgcatccaggcccggctgcacagccagcgggagaaccagcagcaggagcggctgctgctgtctgtgctgcccaggcatgtggccatggagatgaaggctgacatcaatgccaagcaggaggacatgatgttccacaagatctacatccagaagcatgacaacgtgtccatcctgtttgctgacatcgagggcttcaccagcctggccagccagtgcacagcccaggagctggtgatgaccctgaatgagctgtttgccaggtttgacaagctggccgctgagaaccactgcctgcgcatcaagatcctgggggactgctactactgtgtgtctggcctgcctgaggcccgggctgaccacgcccactgctgcgtggagatgggcatggacatgattgaggccatcagcctggtgcgggaggtgactggagtgaatgtgaacatgagggtgggcatccacagcggccgggtgcactgcggcgtgctgggcctgaggaagtggcagtttgatgtgtggagcaatgatgtgaccctggccaaccacatggaggccggcggcaaggccggccgcatccacatcaccaaggccaccctgaactacctgaatggagactatgaggtggagcccggctgcggcggggagagaaatgcctacctgaaggagcacagcattgagaccttcctgatcctgcgctgcacccagaagaggaaggaggagaaggccatgattgccaagatgaaccggcagaggaccaacagcatcggccacaaccccccccactggggcgctgagcggcccttctacaaccacctgggcggcaaccaggtgtccaaggagatgaagaggatgggctttgaggaccccaaggacaagaatgcccaggagagcgccaacccagaagatgaggtggatgagttcctgggccgggccattgatgcccggagcattgaccggctgcggtctgagcacgtgaggaagttcctgctgaccttccgggagccagacctggagaagaagtacagcaagcaggtggatgacagatttggagcctacgtggcctgtgccagcctggtgttcctgttcatctgctttgtgcagatcaccatcgtgccccacagcatcttcatgctgtccttctacctgacctgcagcctgctgctgaccctggtggtgtttgtgtctgtcatctacagctgtgtgaagctgttccccagccccctgcagaccctgagcaggaagatcgtgcgcagcaagatgaacagcaccctggtgggcgtcttcaccatcaccctggtgttcctggccgcctttgtgaacatgttcacctgcaacagccgggacctgctgggctgcctggcccaggagcacaacatcagcgccagccaggtgaatgcctgccacgtggccgagagcgctgtgaactacagcctgggagatgagcagggcttctgtggcagcccctggcccaactgcaacttccctgagtacttcacctacagcgtgctgctgagcctgctggcctgcagcgtcttcctgcagatcagctgcatcggcaagctggtgctgatgctggccatcgagctgatctacgtgctgattgtggaggtgcctggggtgaccctgtttgacaatgctgacctgctggtgacagccaatgccatcgacttcttcaacaacggcaccagccagtgcccagagcacgccaccaaggtggccctgaaggtggtgacccccatcatcatctctgtgtttgtgctggccctgtacctgcacgcccagcaggtggagagcacagcccggctggacttcctgtggaagctgcaggccacagaggagaaggaggagatggaggagctgcaggcctacaacagaaggctgctgcacaacatcctgcccaaggatgtggccgcccacttcctggcccgggagaggagaaatgatgagctgtactaccagagctgtgaatgtgtggccgtgatgtttgccagcatcgccaacttcagcgagttctacgtggagctggaggccaacaatgaaggagtggagtgcctgcggctgctgaatgagatcatcgctgactttgatgagatcatcagtgaagatcgcttccggcagctggagaagatcaagaccatcggcagcacctacatggccgccagcggcctgaatgacagcacctatgacaaggtgggcaagacccacatcaaggccctggccgactttgccatgaagctgatggaccagatgaagtacatcaatgagcacagcttcaacaacttccagatgaagattggcctgaacatcggccctgtggtggccggcgtgattggagccaggaagccccagtatgacatctggggcaacacagtgaatgtggccagcaggatggacagcactggagtgcctgaccgcatccaggtgaccacagacatgtaccaggtgctggccgccaacacctaccagctggagtgccggggcgtggtgaaggtgaagggcaagggggagatgatgacctacttcctgaatggaggcccccccctgtcctag

SEQ ID NO: 142891 - DNA, 2760 bp, synthetic construct
  misc_feature 1..2760: note = Description of Artificial Sequence: Synthetic coding sequence
  source 1..2760: mol_type = other DNA
atggcccccagccgcttccgcacccagctggagctggtgtccaatgtgctgatcttcagctgcaccaacatcgtgggcgtgtgcacccactacccagctgaggtgtcccagaggcaggccttccaggagacccgggagtgcatccaggcccggctgcacagccagcgggagaaccagcagcaggagcggctgctgctgtctgtgctgcccaggcatgtggccatggagatgaaggctgacatcaatgccaagcaggaggacatgatgttccacaagatctacatccagaagcatgacaacgtgtccatcctgtttgctgacatcgagggcttcaccagcctggccagccagtgcacagcccaggagctggtgatgaccctgaatgagctgtttgccaggtttgacaagctggccgctgagaaccactgcctgcgcatcaagatcctgggggactgctactactgtgtgtctggcctgcctgaggcccgggctgaccacgcccactgctgcgtggagatgggcatggacatgattgaggccatcagcctggtgcgggaggtgactggagtgaatgtgaacatgagggtgggcatccacagcggccgggtgcactgcggcgtgctgggcctgaggaagtggcagtttgatgtgtggagcaatgatgtgaccctggccaaccacatggaggccggcggcaaggccggccgcatccacatcaccaaggccaccctgaactacctgaatggagactatgaggtggagcccggctgcggcggggagagaaatgcctacctgaaggagcacagcattgagaccttcctgatcctgcgctgcacccagaagaggaaggaggagaaggccatgattgccaagatgaaccggcagaggaccaacagcatcggccacaaccccccccactggggcgctgagcggcccttctacaaccacctgggcggcaaccaggtgtccaaggagatgaagaggatgggctttgaggaccccaaggacaagaatgcccaggagagcgccaacccagaagatgaggtggatgagttcctgggccgggccattgatgcccggagcattgaccggctgcggagtgaacatgtgaggaagttcctgctgaccttccgggagccagacctggagaagaagtacagcaagcaggtggatgacagatttggagcctacgtggcctgtgccagcctggtgttcctgttcatctgctttgtgcagatcaccatcgtgccccacagcatcttcatgctgtccttctacctgacctgcagcctgctgctgaccctggtggtgtttgtgtctgtcatctacagctgtgtgaagctgttccccagccccctgcagaccctgagcaggaagatcgtgcgcagcaagatgaacagcaccctggtgggcgtcttcaccatcaccctggtgttcctggccgcctttgtgaacatgttcacctgcaacagccgggacctgctgggctgcctggcccaggagcacaacatcagcgccagccaggtgaatgcctgccacgtggccgagagcgctgtgaactacagcctgggagatgagcagggcttctgtggcagcccctggcccaactgcaacttccctgagtacttcacctacagcgtgctgctgagcctgctggcctgcagcgtcttcctgcagatcagctgcatcggcaagctggtgctgatgctggccatcgagctgatctacgtgctgattgtggaggtgcctggggtgaccctgtttgacaatgctgacctgctggtgacagccaatgccatcgacttcttcaacaacggcaccagccagtggagcctgtgtgagaacctgcggcacaggaggatggaggccggcacctacttccccagcggcgtgaaggagcagagccctgagcacgccaccaaggtggccctgaaggtggtgacccccatcatcatctctgtgtttgtgctggccctgtacctgcacgcccagcaggtggagagcacagcccggctggacttcctgtggaagctgcaggccacagaggagaaggaggagatggaggagctgcaggcctacaacagaaggctgctgcacaacatcctgcccaaggatgtggccgcccacttcctggcccgggagaggagaaatgatgagctgtactaccagagctgtgaatgtgtggccgtgatgtttgccagcatcgccaacttcagcgagttctacgtggagctggaggccaacaatgaaggagtggagtgcctgcggctgctgaatgagatcatcgctgactttgatgagatcatcagtgaagatcgcttccggcagctggagaagatcaagaccatcggcagcacctacatggccgccagcggcctgaatgacagcacctatgacaaggtgggcaagacccacatcaaggccctggccgactttgccatgaagctgatggaccagatgaagtacatcaatgagcacagcttcaacaacttccagatgaagattggcctgaacatcggccctgtggtggccggcgtgattggagccaggaagccccagtatgacatctggggcaacacagtgaatgtggccagcaggatggacagcactggagtgcctgaccgcatccaggtgaccacagacatgtaccaggtgctggccgccaacacctaccagctggagtgccggggcgtggtgaaggtgaagggcaagggggagatgatgacctacttcctgaatggaggcccccccctgtcctag

SEQ ID NO: 142892 - DNA, 3507 bp, synthetic construct
  misc_feature 1..3507: note = Description of Artificial Sequence: Synthetic coding sequence
  source 1..3507: mol_type = other DNA
atgtcctggttcagcggcctgctggtgcccaaggtggatgagaggaagacagcctggggcgagagaaatggccagaagaggagcagaagaagaggcaccagggctgggggcttctgcaccccccgctacatgagctgcctgagagatgctgagccccccagccccaccccagctggccccccacgctgcccctggcaggatgatgccttcatccggcggggcggccctgggaagggcaaggagctgggcctgcgggctgtggccctgggctttgaggacacagaggtgaccaccacagctgggggcacagctgaggtggccccagatgctgtgcccaggagcggccgcagctgctggaggcggctggtgcaggtgttccagagcaagcagttccgcagcgccaagctggagcggctgtaccagcgctacttcttccagatgaaccagagcagcctgaccctgctgatggctgtgctggtgctgctgacagctgtgctgctggccttccacgccgccccagcccggccccagcctgcctacgtggccctgctggcctgtgccgccgccctgtttgtgggcctgatggtggtgtgcaacagacacagcttccggcaggacagcatgtgggtggtgtcctatgtggtgctgggcatcctggccgctgtgcaggtgggcggggccctggccgctgaccccaggagccccagcgctggcctgtggtgccctgtgttctttgtgtacatcgcctacaccctgctgcccatccgcatgagagctgctgtgctgagcggcctgggcctgagcaccctgcacctgatcctggcctggcagctgaacagaggagatgccttcctgtggaagcagctgggcgccaacgtgctgctcttcctgtgcaccaacgtcatcggcatctgcacccactacccagctgaggtgtcccagaggcaggccttccaggagacccggggctacatccaggcccggctgcacctgcagcacgagaaccggcagcaggagcggctgctgctgtctgtgctgccccagcacgtggccatggagatgaaggaggacatcaacaccaagaaggaggacatgatgttccacaagatctacatccagaagcatgacaacgtgtccatcctgtttgctgacatcgagggcttcaccagcctggccagccagtgcacagcccaggagctggtgatgaccctgaatgagctgtttgccaggtttgacaagctggccgctgagaaccactgcctgcgcatcaagatcctgggggactgctactactgtgtgtctggcctgcctgaggcccgggctgaccacgcccactgctgcgtggagatgggcgtggacatgattgaggccatcagcctggtgcgggaggtgactggagtgaatgtgaacatgagggtgggcatccacagcggccgggtgcactgcggcgtgctgggcctgaggaagtggcagtttgatgtgtggagcaatgatgtgaccctggccaaccacatggaggccggcggccgggccggccgcatccacatcacccgggccaccctgcagtacctgaatggagactatgaggtggagcccggccggggcggggagagaaatgcctacctgaaggagcagcacatcgagaccttcctgatcctgggcgccagccagaagaggaaggaggagaaggccatgctggccaagctgcagaggacccgggccaacagcatggagggcctgatgccccgctgggtgcctgaccgggccttcagcaggaccaaggacagcaaggccttccggcagatgggcattgatgacagcagcaaggacaacagaggcacccaggatgccctgaacccagaagatgaggtggatgagttcctgagccgggccattgatgcccggagcattgaccagctgaggaaggaccacgtgcggcgcttcctgctgaccttccagcgggaggacctggagaagaagtacagcaggaaggtggaccccaggtttggagcctacgtggcctgtgccctgctggtgttctgcttcatctgcttcatccagctgctgatcttcccccacagcaccctgatgctgggcatctatgccagcatcttcctgctgctgctgatcaccgtgctgatctgtgctgtgtacagctgtggcagcctcttccccaaggccctgcagaggctgagccgcagcatcgtgcgcagccgggcccacagcacagctgtgggcatcttctctgtgctgctggtgttcaccagcgccatcgccaacatgttcacctgcaaccacacccccatccgcagctgtgccgccaggatgctgaacctgaccccagctgacatcacagcctgccacctgcagcagctgaactacagcctgggcctggatgcccccctgtgtgagggcaccatgcccacctgcagcttccctgagtacttcatcggcaacatgctgctgagcctgctggccagcagcgtcttcctgcacatcagcagcatcggcaagctggccatgatctttgtgctgggcctcatctacctggtgctgctgctgctgggccccccagccaccatctttgacaactatgacctgctgctgggcgtgcacggcctggccagcagcaatgagacctttgatggcctggactgcccagctgctggccgggtggccctgaagtacatgacccctgtgatcctgctggtgtttgccctggccctgtacctgcacgcccagcaggtggagagcacagcccggctggacttcctgtggaagctgcaggccactggagagaaggaggagatggaggagctgcaggcctacaacagaaggctgctgcacaacatcctgcccaaggatgtggccgcccacttcctggcccgggagaggagaaatgatgagctgtactaccagagctgtgaatgtgtggccgtgatgtttgccagcatcgccaacttcagcgagttctacgtggagctggaggccaacaatgaaggagtggagtgcctgcggctgctgaatgagatcatcgctgactttgatgagatcatcagcgaggagcgcttccggcagctggagaagatcaagaccatcggcagcacctacatggccgccagcggcctgaatgccagcacctatgaccaggtgggccgcagccacatcacagccctggccgactatgccatgaggctgatggagcagatgaagcacatcaatgagcacagcttcaacaacttccagatgaagattggcctgaacatgggccctgtggtggccggcgtgattggagccaggaagccccagtatgacatctggggcaacacagtgaatgtgagcagcaggatggacagcactggagtgcctgaccgcatccaggtgaccacagacctgtaccaggtgctggccgccaagggctaccagctggagtgccggggcgtggtgaaggtgaagggcaagggggagatgaccacctacttcctgaatggaggccccagcagctag

SEQ ID NO: 142893 - DNA, 3348 bp, synthetic construct
  misc_feature 1..3348: note = Description of Artificial Sequence: Synthetic coding sequence
  source 1..3348: mol_type = other DNA
atgtcctggttcagcggcctgctggtgcccaaggtggatgagaggaagacagcctggggcgagagaaatggccagaagaggagcagaagaagaggcaccagggctgggggcttctgcaccccccgctacatgagctgcctgagagatgctgagccccccagccccaccccagctggccccccacgctgcccctggcaggatgatgccttcatccggcggggcggccctgggaagggcaaggagctgggcctgcgggctgtggccctgggctttgaggacacagaggtgaccaccacagctgggggcacagctgaggtggccccagatgctgtgcccaggagcggccgcagctgctggaggcggctggtgcaggtgttccagagcaagcagttccgcagcgccaagctggagcggctgtaccagcgctacttcttccagatgaaccagagcagcctgaccctgctgatggctgtgctggtgctgctgacagctgtgctgctggccttccacgccgccccagcccggccccagcctgcctacgtggccctgctggcctgtgccgccgccctgtttgtgggcctgatggtggtgtgcaacagacacagcttccggcaggacagcatgtgggtggtgtcctatgtggtgctgggcatcctggccgctgtgcaggtgggcggggccctggccgctgaccccaggagccccagcgctggcctgtggtgccctgtgttctttgtgtacatcgcctacaccctgctgcccatccgcatgagagctgctgtgctgagcggcctgggcctgagcaccctgcacctgatcctggcctggcagctgaacagaggagatgccttcctgtggaagcagctgggcgccaacgtgctgctcttcctgtgcaccaacgtcatcggcatctgcacccactacccagctgaggtgtcccagaggcaggccttccaggagacccggggctacatccaggcccggctgcacctgcagcacgagaaccggcagcaggagcggctgctgctgtctgtgctgccccagcacgtggccatggagatgaaggaggacatcaacaccaagaaggaggacatgatgttccacaagatctacatccagaagcatgacaacgtgtccatcctgtttgctgacatcgagggcttcaccagcctggccagccagtgcacagcccaggagctggtgatgaccctgaatgagctgtttgccaggtttgacaagctggccgctgagaaccactgcctgcgcatcaagatcctgggggactgctactactgtgtgtctggcctgcctgaggcccgggctgaccacgcccactgctgcgtggagatgggcgtggacatgattgaggccatcagcctggtgcgggaggtgactggagtgaatgtgaacatgagggtgggcatccacagcggccgggtgcactgcggcgtgctgggcctgaggaagtggcagtttgatgtgtggagcaatgatgtgaccctggccaaccacatggaggccggcggccgggccggccgcatccacatcacccgggccaccctgcagtacctgaatggagactatgaggtggagcccggccggggcggggagagaaatgcctacctgaaggagcagcacatcgagaccttcctgatcctgggcgccagccagaagaggaaggaggagaaggccatgctggccaagctgcagaggacccgggccaacagcatggagggcctgatgccccgctgggtgcctgaccgggccttcagcaggaccaaggacagcaaggccttccggcagatgggcattgatgacagcagcaaggacaacagaggcacccaggatgccctgaacccagaagatgaggtggatgagttcctgagccgggccattgatgcccggagcattgaccagctgaggaaggaccacgtgcggcgcttcctgctgaccttccagcgggaggacctggagaagaagtacagcaggaaggtggaccccaggtttggagcctacgtggcctgtgccctgctggtgttctgcttcatctgcttcatccagctgctgatcttcccccacagcaccctgatgctgggcatctatgccagcatcttcctgctgctgctgatcaccgtgctgatctgtgctgtgtacagctgtggcagcctcttccccaaggccctgcagaggctgagccgcagcatcgtgcgcagccgggcccacagcacagctgtgggcatcttctctgtgctgctggtgttcaccagcgccatcgccaacatgtacttcatcggcaacatgctgctgagcctgctggccagctctgtgttcctgcacatcagcagcatcggcaagctggccatgatctttgtgctgggcctcatctacctggtgctgctgctgctgggccccccagccaccatctttgacaactatgacctgctgctgggcgtgcacggcctggccagcagcaatgagacctttgatggcctggactgcccagctgctggccgggtggccctgaagtacatgacccctgtgatcctgctggtgtttgccctggccctgtacctgcacgcccagcaggtggagagcacagcccggctggacttcctgtggaagctgcaggccaccggggagaaggaggagatggaggagctgcaggcctacaacagaaggctgctgcacaacatcctgcccaaggatgtggccgcccacttcctggcccgggagaggagaaatgatgagctgtactaccagagctgtgaatgtgtggccgtgatgtttgccagcatcgccaacttcagcgagttctacgtggagctggaggccaacaatgaaggagtggagtgcctgcggctgctgaatgagatcatcgctgactttgatgagatcatcagcgaggagcgcttccggcagctggagaagatcaagaccatcggcagcacctacatggccgccagcggcctgaatgccagcacctatgaccaggtgggccgcagccacatcacagccctggccgactatgccatgaggctgatggagcagatgaagcacatcaatgagcacagcttcaacaacttccagatgaagattggcctgaacatgggccctgtggtggccggggtcatcggggccaggaagccccagtatgacatctggggcaacacagtgaatgtgagcagcaggatggacagcactggagtgcctgaccgcatccaggtgaccacagacctgtaccaggtgctggccgccaagggctaccagctggagtgccggggcgtggtgaaggtgaagggcaaaggagagatgaccacctacttcctgaatggaggccccagcagctag

SEQ ID NO: 142894 - DNA, 3348 bp, synthetic construct; identical to SEQ ID NO: 142893
  misc_feature 1..3348: note = Description of Artificial Sequence: Synthetic coding sequence
  source 1..3348: mol_type = other DNA

SEQ ID NO: 142895 - DNA, 3243 bp, synthetic construct
  misc_feature 1..3243: note = Description of Artificial Sequence: Synthetic coding sequence
  source 1..3243: mol_type = other DNA
atgcctgccaagggccgctacttcctgaatgaaggagaggagggccctgaccaggatgccctgtatgagaagtaccagctgaccagccagcacggccccctgctgctgaccctgctgctggtggccgccacagcctgtgtggccctgatcatcatcgccttcagccagggcgaccccagccgccaccaggccatcctgggcatggccttcctggtgctggccgtgtttgctgccctgtctgtgctgatgtatgtggagtgcctgctgcggcgctggctgcgggccctggccctgctgacctgggcctgcctggtggccctgggctacgtgctggtgtttgatgcctggaccaaggccgcctgtgcctgggagcaggtgcccttcttcctgttcatcgtgtttgtggtgtacaccctgctgcccttctccatgagaggagctgtggccgtgggcgctgtgtccacagccagccacctgctggtgctgggcagcctgatgggcggcttcaccaccccatctgtgcgggtgggcctgcagctgctggccaatgctgtgatcttcctgtgtggcaacctgactggagccttccacaagcaccagatgcaggatgccagccgggacctcttcacctacacagtgaagtgcatccagatccggaggaagctgcgcatcgagaagaggcagcaggagaacctgctgctgtctgtgctgcctgcccacatctccatgggcatgaagctggccatcatcgagcggctgaaggagcacggggaccggcgctgcatgccagacaacaacttccacagcctgtatgtgaagaggcaccagaatgtgtccatcctgtatgctgacatcgtgggcttcacccagctggccagtgactgcagccccaaggagctggtggtggtgctgaatgagctgtttgggaagtttgaccagatcgccaaggccaatgaatgcatgaggatcaagatcctgggggactgctactactgtgtgtctggcctgcctgtgtccctgcccacccacgccaggaactgtgtgaagatgggcctggacatgtgccaggccatcaagcaggtgcgggaggccactggagtggacatcaacatgagggtgggcatccacagcggaaatgtgctgtgtggggtgattggcctgaggaagtggcagtatgatgtgtggagccatgatgtgtccctggccaacaggatggaggccgccggcgtgcccggccgggtgcacatcacagaggccaccctgaagcacctggacaaggcctatgaggtggaggatggccacggccagcagagggacccctacctgaaggagatgaacatccgcacctacctggtgattgaccccaggagccagcagcccccaccacccagccagcacctgccccggcccaagggagatgctgccctgaagatgagggcctctgtgaggatgacccgctacctggagagctggggcgccgcccggccctttgcccacctgaaccaccgggagagcgtgagcagcggggagacccacgtgcccaatggaagaagacccaagtctgtgccccagaggcacaggaggaccccagaccgctccatgagccccaagggccgctcagaagatgacagctatgatgatgagatgctgagcgccatcgagggcctgagcagcacccggccctgctgcagcaagagtgatgacttctacaccttcggcagcatcttcctggagaagggctttgagcgggagtaccgcctggcccccatcccccgggcccggcatgactttgcctgtgccagcctcatctttgtgtgcatcctgctggtgcacgtgctgctgatgcccaggacagctgccctgggcgtgtcctttggcctggtggcctgtgtgctgggcctggtgctgggcctgtgctttgccaccaagttcagccgctgctgcccagcccggggcaccctgtgcaccatcagcgagcgggtggagacccagcccctgctgcggctgaccctggccgtgctgaccatcggcagcctgctgactgtggccatcatcaacctgcccctgatgcccttccaggtgcctgagctgcctgtgggcaatgaaacaggcctgctggccgccagcagcaagacccgggccctgtgtgagcccctgccctactacacctgcagctgtgtgctgggcttcatcgcctgcagcgtcttcctgaggatgagcctggagcccaaggtggtgctgctgactgtggccctggtggcctacctggtgctcttcaacctgagcccctgctggcagtgggactgctgcggccagggcctgggcaacctgaccaagcccaacggcaccaccagcggcacccccagctgctcctggaaggacctgaagaccatgaccaacttctacctggtgctcttctacatcaccctgctgaccctgagccggcagattgactactactgccgcctggactgcctgtggaagaagaagttcaagaaggagcacgaggagtttgagaccatggagaatgtgaaccggctgctgctggagaatgtgctgcctgcccacgtggccgcccacttcatcggggacaagctgaatgaagactggtaccaccagagctatgactgtgtgtgtgtgatgtttgcctctgtgcctgacttcaaggtgttctacacagaatgtgatgtgaacaaggagggcctggagtgcctgcggctgctgaatgagatcatcgctgactttgatgagctgctgctgaagcccaagttctctggagtggagaagatcaagaccatcggcagcacctacatggctgctgctggcctgtctgtggccagcggccacgagaaccaggagctggagcggcagcacgcccacatcggcgtgatggtggagttcagcatcgccctgatgagcaagctggatggcatcaacagacacagcttcaacagcttccggctgcgggtgggcatcaaccacggccctgtgattgctggggtcatcggggccaggaagccccagtatgacatctggggcaacacagtgaatgtggccagcaggatggagagcactggagagctgggcaagatccaggtgacagaggagacctgcaccatcctgcagggcctgggctacagctgtgaatgtcggggcctcatcaacgtgaagggcaaaggagagctgcggacctactttgtgtgcacagacacagccaagttccagggcctgggcctgaactag

SEQ ID NO: 142896 - DNA, 3243 bp, synthetic construct; identical to SEQ ID NO: 142895
  misc_feature 1..3243: note = Description of Artificial Sequence: Synthetic coding sequence
  source 1..3243: mol_type = other DNA

SEQ ID NO: 142897 - DNA, 1302 bp, synthetic construct
  misc_feature 1..1302: note = Description of Artificial Sequence: Synthetic coding sequence
  source 1..1302: mol_type = other DNA
atgcctgccaagggccgctacttcctgaatgaaggagaggagggccctgaccaggatgccctgtatgagaagtaccagctgaccagccagcacggccccctgctgctgaccctgctgctggtggccgccacagcctgtgtggccctgatcatcatcgccttcagccagggcgaccccagccgccaccaggccatcctgggcatggccttcctggtgctggccgtgtttgctgccctgtctgtgctgatgtatgtggagtgcctgctgcggcgctggctgcgggccctggccctgctgacctgggcctgcctggtggccctgggctacgtgctggtgtttgatgcctggaccaaggccgcctgtgcctgggagcaggtgcccttcttcctgttcatcgtgtttgtggtgtacaccctgctgcccttctccatgagaggagctgtggccgtgggcgctgtgtccacagccagccacctgctggtgctgggcagcctgatgggcggcttcaccaccccatctgtgcgggtgggcctgcagctgctggccaatgctgtgatcttcctgtgtggcaacctgactggagccttccacaagcaccagatgcaggatgccagccgggacctcttcacctacacagtgaagtgcatccagatccggaggaagctgcgcatcgagaagaggcagcaggagaacctgctgctgtctgtgctgcctgcccacatctccatgggcatgaagctggccatcatcgagcggctgaaggagcacggggaccggcgctgcatgccagacaacaacttccacagcctgtatgtgaagaggcaccagaatgtgtccatcctgtatgctgacatcgtgggcttcacccagctggccagtgactgcagccccaaggagctggtggtggtgctgaatgagctgtttgggaagtttgaccagatcgccaaggccaatgaatgcatgaggatcaagatcctgggggactgctactactgtgtgtctggcctgcctgtgtccctgcccacccacgccaggaactgtgtgaagatgggcctggacatgtgccaggccatcaagcaggtgcgggaggccactggagtggacatcaacatgagggtgggcatccacagcggaaatgtgctgtgtggggtgattggcctgaggaagtggcagtatgatgtgtggagccatgatgtgtccctggccaacaggatggaggccgccggcgtgcccggccgggtgcacatcacagaggccaccctgaagcacctggacaaggccctgctgctgcaggtgaggtag

SEQ ID NO: 142898 - DNA, 2205 bp, synthetic construct
  misc_feature 1..2205: note = Description of Artificial Sequence: Synthetic coding sequence
  source 1..2205: mol_type = other DNA
atgcctgccaagggccgctacttcctgaatgaaggagaggagggccctgaccaggatgccctgtatgagaagtaccagctgaccagccagcacggccccctgctgctgaccctgctgctggtggccgccacagcctgtgtggccctgatcatcatcgccttcagccagggcgaccccagccgccaccaggccatcctgggcatggccttcctggtgctggccgtgtttgctgccctgtctgtgctgatgtatgtggagtgcctgctgcggcgctggctgcgggccctggccctgctgacctgggcctgcctggtggccctgggctacgtgctggtgtttgatgcctggaccaaggccgcctgtgcctgggagcaggtgcccttcttcctgttcatcgtgtttgtggtgtacaccctgctgcccttctccatgagaggagctgtggccgtgggcgctgtgtccacagccagccacctgctggtgctgggcagcctgatgggcggcttcaccaccccatctgtgcgggtgggcctgcagctgctggccaatgctgtgatcttcctgtgtggcaacctgactggagccttccacaagcaccagatgcaggatgccagccgggacctcttcacctacacagtgaagtgcatccagatccggaggaagctgcgcatcgagaagaggcagcaggagaacctgctgctgtctgtgctgcctgcccacatctccatgggcatgaagctggccatcatcgagcggctgaaggagcacggggaccggcgctgcatgccagacaacaacttccacagcctgtatgtgaagaggcaccagaatgtgtccatcctgtatgctgacatcgtgggcttcacccagctggccagtgactgcagccccaaggagctggtggtggtgctgaatgagctgtttgggaagtttgaccagatcgccaaggccaatgaatgcatgaggatcaagatcctgggggactgctactactgtgtgtctggcctgcctgtgtccctgcccacccacgccaggaactgtgtgaagatgggcctggacatgtgccaggccatcaagcaggtgcgggaggccactggagtggacatcaacatgagggtgggcatccacagcggaaatgtgctgtgtggggtgattggcctgaggaagtggcagtatgatgtgtggagccatgatgtgtccctggccaacaggatggaggccgccggcgtgcccggccgggtgcacatcacagaggccaccctgaagcacctggacaaggcctatgaggtggaggatggccacggccagcagagggacccctacctgaaggagatgaacatccgcacctacctggtgattgaccccaggagccagcagcccccaccacccagccagcacctgccccggcccaagggagatgctgccctgaagatgagggcctctgtgaggatgacccgctacctggagagctggggcgccgcccggccctttgcccacctgaaccaccgggagagcgtgagcagcggggagacccacgtgcccaatggaagaagacccaagtctgtgccccagaggcacaggaggaccccagaccgctccatgagccccaagggccgctcagaagatgacagctatgatgatgagatgctgagcgccatcgagggcctgagcagcacccggccctgctgcagcaagagtgatgacttctacaccttcggcagcatcttcctggagaagggctttgagcgggagtaccgcctggcccccatcccccgggcccggcatgactttgcctgtgccagcctcatctttgtgtgcatcctgctggtgcacgtgctgctgatgcccaggacagctgccctgggcgtgtcctttggcctggtggcctgtgtgctgggcctggtgctgggcctgtgctttgccaccaagttcagccgctgctgcccagcccggggcaccctgtgcaccatcagcgagcgggtggagacccagcccctgctgcggctgaccctggccgtgctgaccatcggcagcctgctgactgtggccatcatcaacctgcccctgatgcccttccaggtgcctgagctgcctgtgggcaatgaaacaggcctgctggccgccagcagcaagacccgggccctgtgtgagcccctgccccacctgcacacagtgttcagccggctgaatgagctgaccagctag

SEQ ID NO: 142899 - DNA, 3756 bp, synthetic construct
  misc_feature 1..3756: note = Description of Artificial Sequence: Synthetic coding sequence
  source 1..3756: mol_type = other DNA
atggagctgagtgatgtgcgctgcctgaccggcagcgaggagctgtacaccatccaccccaccccacctgctggagatggccgcagcgccagccggccccagaggctgctgtggcagacagctgtgcgccacatcacagagcagcgcttcatccacggccaccggggcggcagcggcagcggcagcggcggcagcggcaaggccagtgaccctgctgggggcggccccaaccaccacgccccccagctgagcggggacagcgccctgcccctgtacagcctgggccctggagagcgggcccacagcacctgtggcaccaaggtgtttcctgagaggagcggcagcggcagcgccagcggcagcggcggcggcggggacctgggcttcctgcacctggactgtgcccccagcaacagcgacttcttcctgaatggaggctacagctacagaggagtcatcttccccaccctgaggaacagcttcaagagccgggacctggagcggctgtaccagcgctacttcctgggccagaggaggaagtctgaggtggtgatgaatgtgctggatgtgctgaccaagctgaccctgctggtgctgcacctgagcctggccagcgcccccatggaccccctgaagggcatcctgctgggcttcttcaccggcatcgaggtggtgatctgtgccctggtggtggtgaggaaggacaccaccagccacacctacctgcagtacagcggcgtggtgacctgggtggccatgaccacccagatcctggccgccggcctgggctacggcctgctgggagatggcatcggctacgtgctcttcaccctgtttgccacctacagcatgctgcccctgcccctgacctgggccatcctggccggcctgggcaccagcctgctgcaggtgatcctgcaggtggtgatcccccggctggccgtcatcagcatcaaccaggtggtggcccaggccgtgctcttcatgtgcatgaacacagctggcatcttcatctcctacctgagtgaccgggcccagaggcaggccttcctggagacccggcgctgtgtggaggcccggctgcggctggagacagagaaccagaggcaggagcggctggtgctgtctgtgctgcccaggtttgtggtgctggagatgatcaatgacatgaccaacgtggaggatgagcacctgcagcaccagttccaccgcatctacatccacagatatgaaaatgtgtccatcctgtttgctgatgtgaagggcttcaccaacctgagcaccaccctgagcgcccaggagctggtgaggatgctgaatgagctgtttgccaggtttgaccggctggcccacgagcaccactgcctgcgcatcaagatcctgggggactgctactactgtgtgtctggcctgcctgagccccggcaggaccacgcccactgctgcgtggagatgggcctgtccatgatcaagaccatccgctacgtgcgcagcaggaccaagcatgatgtggacatgagaattggcatccacagcggctctgtgctgtgtggggtgctgggcctgaggaagtggcagtttgatgtgtggagctgggatgtggacatcgccaacaagctggagagcggcggcatccctggccgcatccacatcagcaaggccaccctggactgcctgaatggagactacaacgtggaggagggccacggcaaggagagaaatgagttcctgaggaagcacaacatcgagacctacctgatcaagcagcctgaggacagcctgctgagcctgcctgaagatattgtgaaggagagcgtgagcagcagtgacagaagaaacagcggggccaccttcacagagggctcctggagccctgagctgccctttgacaacatcgtgggcaagcagaacaccctggccgccctgaccaggaacagcatcaacctgctgcccaaccacctggcccaggccctgcacgtgcagagcggccctgaggagatcaacaagagaattgagcacaccatcgacctgcggagcggggacaagctgcggcgggagcacatcaagcccttcagcctgatgttcaaggacagcagcctggagcacaagtacagccagatgagagatgaggtgttcaagagcaacctggtgtgtgccttcatcgtgctgctcttcatcacagccatccagagcctgctgcccagcagccgggtgatgcccatgaccatccagttcagcatcctgatcatgctgcacagcgccctggtgctgatcaccacagctgaggactacaagtgcctgcccctcatcctgaggaagacctgctgctggatcaatgagacctacctggccagaaatgtcatcatctttgccagcatcctgatcaacttcctgggcgccatcctgaacatcctgtggtgtgactttgacaagagcatccccctgaagaacctgaccttcaacagcagcgctgtgttcacagacatctgcagctacccagagtactttgtgttcaccggggtgctggccatggtgacctgtgctgtgttcctgcggctgaacagcgtgctgaagctggccgtgctgctgatcatgattgccatctatgccctgctgacagaaacagtgtatgccggcctcttcctgcgctatgacaacctgaaccacagcggggaggacttcctgggcaccaaggaggtgtccctgctgctgatggccatgttcctgctggccgtgttctaccacggccagcagctggagtacacagcccggctggacttcctgtggagggtgcaggccaaggaggagatcaatgagatgaaggagctgcgggagcacaatgaaaacatgctgaggaacatcctgcccagccacgtggcccggcacttcctggagaaggaccgggacaatgaggagctgtacagccagagctatgatgctgtgggcgtgatgtttgccagcatccctggctttgctgacttctacagccagacagagatgaacaaccagggcgtggagtgcctgcggctgctgaatgagatcatcgctgactttgatgagctgctgggggaggaccgcttccaggacatcgagaagatcaagaccatcggcagcacctacatggctgtgtctggcctgagccctgagaagcagcagtgtgaggacaagtggggccacctgtgtgccctggccgacttcagcctggccctgacagagagcatccaggagatcaacaagcacagcttcaacaactttgagctgagaattggcatcagccacggctctgtggtggccggcgtgattggagccaagaagccccagtatgacatctggggcaagacagtgaacctggccagcaggatggacagcactggagtgtctggccgcatccaggtgcctgaggagacctacctgatcctgaaggaccagggctttgcctttgactacagaggagagatctacgtgaagggcatcagcgagcaggagggcaagatcaagacctacttcctgctgggccgggtgcagcccaaccccttcatcctgcccccccggcggctgcccggccagtacagcctggccgctgtggtgctgggcctggtgcagagcctgaaccggcagaggcagaagcagctgctgaatgaaaacaacaacacaggcatcatcaagggccactacaacagaaggaccctgctgagccccagcggcacagagcccggggcccaggccgagggcacagacaagagtgacctgccctag

SEQ ID NO: 142900 - DNA, 4062 bp, synthetic construct
  misc_feature 1..4062: note = Description of Artificial Sequence: Synthetic coding sequence
  source 1..4062: mol_type = other DNA
atggccagccccccccaccagcagctgctgcaccaccacagcacagaggtgtcctgtgacagcagcggggacagcaacagcgtgcgggtgaagatcaaccccaagcagctgagcagcaacagccaccccaagcactgcaagtacagcatcagcagcagctgcagcagcagcggggacagcggcggcgtgcccaggagagtgggcggcggcggccgcctgcggcggcagaagaagctgccccagctgtttgagcgggccagcagccgctggtgggaccccaagtttgattctgtgaacctggaggaggcctgcctggagcgctgcttcccccagacccagaggcgcttccgctatgccctcttctacatcggctttgcctgcctgctgtggagcatctactttgctgtgcacatgaggagccggctgattgtgatggtggccccagccctgtgcttcctgctggtgtgtgtgggcttcttcctgttcaccttcaccaagctgtatgcccggcactacgcctggaccagcctggccctgaccctgctggtgtttgccctgaccctggccgcccagttccaggtgctgacccctgtgtctggccgcggggacagcagcaacctgacagccacagcccggcccacagacacctgcctgagccaggtgggcagcttctccatgtgcatcgaggtgctcttcctgctgtacacagtgatgcacctgcccctgtacctgagcctgtgcctgggcgtggcctacagcgtgctgtttgagaccttcggctaccacttcagagatgaggcctgcttccccagccctggggccggggccctgcactgggagctgctgagccggggcctgctgcacggctgcatccacgccatcggcgtgcacctgtttgtgatgagccaggtgcgcagccgcagcaccttcctgaaggtgggccagagcatcatgcacggcaaggacctggaggtggagaaggccctgaaggagaggatgatccacagcgtgatgccccgcatcatcgcagatgacctgatgaagcagggagatgaggagagtgaaaattctgtgaagagacatgccaccagcagccccaagaacaggaagaagaagagcagcatccagaaggcccccatcgccttccggcccttcaagatgcagcagatcgaggaggtgtccatcctgtttgctgacatcgtgggcttcaccaagatgtctgccaacaagagcgcccacgccctggtgggcctgctgaatgacctgtttggccgctttgaccggctgtgtgaggagaccaagtgtgagaagatcagcaccctgggggactgctactactgtgtggccggctgcccagagcccagggctgaccacgcctactgctgcatcgagatgggcctgggcatgatcaaggccatcgagcagttctgccaggagaagaaggagatggtgaacatgagggtgggcgtgcacacaggcaccgtgctgtgtggcatcctgggcatgaggcgcttcaagtttgatgtgtggagcaatgatgtgaacctggccaacctgatggagcagctgggcgtggccggcaaggtgcacatcagcgaggccacagccaagtacctggatgacagatatgagatggaggatggcaaggtgattgagcggctgggccagagcgtggtggccgaccagctgaagggcctgaagacctacctgatcagcggccagagggccaaggagagccgctgcagctgtgccgaggccctgctgagcggctttgaggtgattgatggcagccaggtgagcagcggcccccggggccagggcacagccagcagtggaaatgtgtctgacctggcccagacagtgaagacctttgacaacctgaagacctgccccagctgtggcatcacctttgcccccaagtctgaggccggggctgagggcggggccccccagaatggctgccaggatgagcacaagaacagcaccaaggccagcggcggccccaaccccaagacccagaatggcctgctgagccccccccaggaggagaagctgaccaacagccagaccagcctgtgtgagatcctgcaggagaagggccgctgggccggcgtgtccctggaccagagcgccctgctgcccctgcgcttcaagaacatccgggagaagacagatgcccactttgtggatgtgatcaaggaggacagcctgatgaaggactacttcttcaagccacccatcaaccagttcagcctgaacttcctggaccaggagctggagaggagctaccgcaccagctaccaggaggaggtgatcaagaacagccctgtgaagacctttgccagccccaccttcagcagcctgctggatgtgttcctgagcaccaccgtcttcctgaccctgagcaccacctgcttcctgaagtatgaagctgccaccgtgcccccacctcctgctgccctggccgtgttttctgctgccctgctgctggaggtgctgagcctggccgtgtccatccgcatggtgttcttcctggaggatgtgatggcctgcaccaagaggctgctggagtggattgctggctggctgcccaggcactgcatcggggccatcctggtgtccctgcctgccctggccgtgtacagccacgtgaccagtgaatatgagaccaacatccacttccctgtgttcaccggcagcgctgccctgattgctgtggtgcactactgcaacttctgccagctgagctcctggatgaggagcagcctggccaccgtggtgggcgccggccccctgctgctgctgtatgtgtccctgtgcccagacagctctgtgctgaccagccccctggatgctgtgcagaacttcagcagcgagaggaacccctgcaacagctctgtgccccgggacctgcggcggcctgccagcctcatcggccaggaggtggtgctggtgttcttcctgctgctgctgctggtgtggttcctgaaccgggagtttgaggtgtcctaccgcctgcactaccatggagatgtggaggccgacctgcacaggaccaagatccagagcatgagggaccaggccgactggctgctgaggaacatcatcccctaccacgtggccgagcagctgaaggtgtcccagacctacagcaagaaccacgacagcggcggcgtcatctttgccagcatcgtgaacttcagcgagttctatgaagaaaattatgaaggaggcaaggagtgctacagagtgctgaatgagctgattggagactttgatgagctgctgagcaagccagactacagcagcattgagaagatcaagaccatcggggccacctacatggccgccagcggcctgaacacagcccaggcccaggacggcagccacccccaggagcacctgcagatcctgtttgaatttgccaaggagatgatgagggtggtggatgacttcaacaacaacatgctgtggttcaacttcaagctgcgggtgggcttcaaccacggccccctgacagctggggtgattggcaccaccaagctgctgtatgacatctggggagacacagtgaacatcgccagcaggatggacaccaccggggtggagtgccgcatccaggtgtctgaggagagctacagagtgctgagcaagatgggctatgactttgactaccggggcaccgtgaatgtgaagggcaagggccagatgaagacctacctgtaccccaagtgcacagaccacagggtcatcccccagcaccagctgagcatcagcccagacatccgggtgcaggtggatggcagcatcggccgcagccccacagatgagatcgccaacctggtgcccagcgtgcagtatgtggacaagaccagcctgggcagtgacagcagcacccaggccaaggatgcccacctgagccccaagaggccctggaaggagcctgtgaaggccgaggagcggggccgctttgggaaggccatcgagaaggatgactgtgatgagaccggcatcgaggaggccaatgagctgaccaagctgaatgtgtccaagtctgtgtag

SEQ ID NO: 142901 - DNA, 531 bp, synthetic construct
  misc_feature 1..531: note = Description of Artificial Sequence: Synthetic coding sequence
  source 1..531: mol_type = other DNA
atgaccatgtgcagcggggcccggctggccctgctggtgtatggcatcatcatgcacagctctgtgtacagcagccctgctgctgctggcctgcgcttccctggcatccggcctgaggaggaggcctatggagaagatggcaaccccctgcctgactttgatggcagcgagcccccaggagctggcagccctgccagcgcccccagggctgctgctgcctggtacagacctgctggaagaagagatgtggcccacggcatcctgaatgaggcctacaggaaggtgctggaccagctgtctgctgggaagcacctgcagagcctggtggcccggggcgtgggcggcagcctgggcggcggcgctggagatgatgctgagcccctgagcaagaggcacagtgatggcatcttcacagacagctacagccgctacaggaagcagatggctgtgaagaagtacctggccgctgtgctgggcaagcgctacaagcagagggtgaagaacaagggcagaagaattgcctacctgtag

SEQ ID NO: 142902 - DNA, 531 bp, synthetic construct; identical to SEQ ID NO: 142901
  misc_feature 1..531: note = Description of Artificial Sequence: Synthetic coding sequence
  source 1..531: mol_type = other DNA

SEQ ID NO: 142903 - DNA, 948 bp, synthetic construct
  misc_feature 1..948: note = Description of Artificial Sequence: Synthetic coding sequence
  source 1..948: mol_type = other DNA
atgctgaccaagagggccctgcagaagccctgcagcgaccgcttcctgaggacagcccagatcaacagaagcagaagacctgtgacctctgtgaccagcggcagcagcagccgcagccgggccagcccccaccggcccctcttcctgagcagcgccagcctgagcgccccacccagcctgcgggtgaccctgcccccaggcagcgcccggctgcagacctttgagcagaacaccagcctgggcaagagggtgccccagctgctgctgctgctgcccctggtgcctgctgccagcgcccagacccccaccccagatggagatgccagccgggtggtgaccccagcccaggagctggaggaggccctgtgcccccccagctacctggccgccctgctggccgccggcggcgtggagggcatgaccatgtgcagcggggcccggctggccctgctggtgtatggcatcatcatgcacagctctgtgtacagcagccctgctgctgctggcctgcgcttccctggcatccggcctgaggaggaggcctacggggaggatggcaaccccctgcctgactttgatggcagcgagcccccaggggccggcagccctgccagcgcccccagggctgctgctgcctggtacagacctgctggaagaagagatgtggcccacggcatcctgaatgaggcctacaggaaggtgctggaccagctgtctgctgggaagcacctgcagagcctggtggcccggggcgtgggcggcagcctgggcggcggcgctggagatgatgctgagcccctgagcaagaggcacagtgatggcatcttcacagacagctacagccgctacaggaagcagatggctgtgaagaagtacctggccgctgtgctgggcaagcgctacaagcagagggtgaagaacaagggccgccgcatcgcctacctgtag

SEQ ID NO: 142904 - DNA, 531 bp, synthetic construct; identical to SEQ ID NO: 142901
  misc_feature 1..531: note = Description of Artificial Sequence: Synthetic coding sequence
  source 1..531: mol_type = other DNA

SEQ ID NO: 142905 - DNA, 1407 bp, synthetic construct
  misc_feature 1..1407: note = Description of Artificial Sequence: Synthetic coding sequence
  source 1..1407: mol_type = other DNA
atggccggcgtggtgcacgtgtccctggccgccctgctgctgctgcccatggccccagccatgcacagcgactgcatcttcaagaaggagcaggccatgtgcctggagaagatccagagggccaatgagctgatgggcttcaatgacagcagccctggctgccccggcatgtgggacaacatcacctgctggaagccagcccacgtgggggagatggtgctggtgtcctgcccagagctgttccgcatcttcaacccagaccaggtgtgggagacagagaccatcggggagagtgactttggagacagcaacagcctggacctgagtgacatgggcgtggtgtccaggaactgcacagaagatggctggagcgagcccttcccccactactttgatgcctgtggctttgatgaatatgaaagtgaaacaggagaccaggactactactacctgtctgtgaaggccctgtacacagtgggctacagcaccagcctggtgaccctgaccacagccatggtgatcctgtgccgcttcaggaagctgcactgcaccaggaacttcatccacatgaacctgtttgtgtccttcatgctgcgggccatcagcgtcttcatcaaggactggatcctgtatgcagagcaggacagcaaccactgcttcatcagcacagtggagtgcaaggctgtgatggtgttcttccactactgtgtggtgagcaactacttctggctgttcatcgagggcctgtacctgttcaccctgctggtggagaccttcttccctgagcggcgctacttctactggtacaccatcatcggctggggcacccccaccgtgtgtgtgacagtgtgggccaccctgcggctgtactttgatgacaccggctgctgggacatgaatgacagcacagccctgtggtgggtgatcaagggccctgtggtgggcagcatcatggtgaactttgtgctcttcatcggcatcatcgtcatcctggtgcagaagctgcagagcccagacatgggcggcaatgaaagcagcatctacctgcggctggcccggagcaccctgctgctgatccccctgtttggcatccactacacagtgtttgccttctccccagaaaatgtgtccaagcgggagcggctggtgtttgagctgggcctgggcagcttccagggctttgtggtggccgtgctgtactgcttcctgaatggagaggtgcaggccgagatcaagaggaagtggaggtcctggaaggtgaaccgctactttgctgtggacttcaagcaccgccaccccagcctggccagcagcggcgtgaatggaggcacccagctgagcatcctgagcaagagcagcagccagatccgcatgagcggcctgcctgctgacaacctggccacctag

SEQ ID NO: 142906 - DNA, 594 bp, synthetic construct
  misc_feature 1..594: note = Description of Artificial Sequence: Synthetic coding sequence
  source 1..594: mol_type = other DNA
atggtgttcttccactactgtgtggtgagcaactacttctggctgttcatcgagggcctgtacctgttcaccctgctggtggagaccttcttccctgagcggcgctacttctactggtacaccatcatcggctggggcacccccaccgtgtgtgtgacagtgtgggccaccctgcggctgtactttgatgacaccggctgctgggacatgaatgacagcacagccctgtggtgggtgatcaagggccctgtggtgggcagcatcatggtgaactttgtgctcttcatcggcatcatcgtcatcctggtgcagaagctgcagagcccagacatgggcggcaatgaaagcagcatctacctgaccaacctgagcccccgggtgcccaagaaggcccgggaggaccccctgcctgtgcccagcgaccagcacagcctgcccttcctgagctgtgtgcagaagtgctactgcaagccccagagggcccagcagcacagctgcaagatgtctgagctgagcaccatcaccctgcggctggcccggagcaccctgctgctgatccccctgtttggcatccactacacagtgtttgcctag

SEQ ID NO: 142907 - DNA, 1491 bp, synthetic construct
  misc_feature 1..1491: note = Description of Artificial Sequence: Synthetic coding sequence
  source 1..1491: mol_type = other DNA
atggccggcgtggtgcacgtgtccctggccgccctgctgctgctgcccatggccccagccatgcacagcgactgcatcttcaagaaggagcaggccatgtgcctggagaagatccagagggccaatgagctgatgggcttcaatgacagcagccctggctgccccggcatgtgggacaacatcacctgctggaagccagcccacgtgggggagatggtgctggtgtcctgcccagagctgttccgcatcttcaacccagaccaggtgtgggagacagagaccatcggggagagtgactttggagacagcaacagcctggacctgagtgacatgggcgtggtgtccaggaactgcacagaagatggctggagcgagcccttcccccactactttgatgcctgtggctttgatgaatatgaaagtgaaacaggagaccaggactactactacctgtctgtgaaggccctgtacacagtgggctacagcaccagcctggtgaccctgaccacagccatggtgatcctgtgccgcttcaggaagctgcactgcaccaggaacttcatccacatgaacctgtttgtgtccttcatgctgcgggccatcagcgtcttcatcaaggactggatcctgtatgcagagcaggacagcaaccactgcttcatcagcacagtggagtgcaaggctgtgatggtgttcttccactactgtgtggtgagcaactacttctggctgttcatcgagggcctgtacctgttcaccctgctggtggagaccttcttccctgagcggcgctacttctactggtacaccatcatcggctggggcacccccaccgtgtgtgtgacagtgtgggccaccctgcggctgtactttgatgacaccggctgctgggacatgaatgacagcacagccctgtggtgggtgatcaagggccctgtggtgggcagcatcatggtgaactttgtgctcttcatcggcatcatcgtcatcctggtgcagaagctgcagagcccagacatgggcggcaatgaaagcagcatctacttcagctgtgtgcagaagtgctactgcaagccccagagggcccagcagcacagctgcaagatgtctgagctgagcaccatcaccctgcggctggcccggagcaccctgctgctgatccccctgtttggcatccactacacagtgtttgccttctccccagaaaatgtgtccaagcgggagcggctggtgtttgagctgggcctgggcagcttccagggctttgtggtggccgtgctgtactgcttcctgaatggagaggtgcaggccgagatcaagaggaagtggaggtcctggaaggtgaaccgctactttgctgtggacttcaagcaccgccaccccagcctggccagcagcggcgtgaatggaggcacccagctgagcatcctgagcaagagcagcagccagatccgcatgagcggcctgcctgctgacaacctggccacctag

SEQ ID NO: 142908 - DNA, 1575 bp, synthetic construct
  misc_feature 1..1575: note = Description of Artificial Sequence: Synthetic coding sequence
  source 1..1575: mol_type = other DNA
atggccggcgtggtgcacgtgtccctggccgccctgctgctgctgcccatggccccagccatgcacagcgactgcatcttcaagaaggagcaggccatgtgcctggagaagatccagagggccaatgagctgatgggcttcaatgacagcagccctggctgccccggcatgtgggacaacatcacctgctggaagccagcccacgtgggggagatggtgctggtgtcctgcccagagctgttccgcatcttcaacccagaccaggtgtgggagacagagaccatcggggagagtgactttggagacagcaacagcctggacctgagtgacatgggcgtggtgtccaggaactgcacagaagatggctggagcgagcccttcccccactactttgatgcctgtggctttgatgaatatgaaagtgaaacaggagaccaggactactactacctgtctgtgaaggccctgtacacagtgggctacagcaccagcctggtgaccctgaccacagccatggtgatcctgtgccgcttcaggaagctgcactgcaccaggaacttcatccacatgaacctgtttgtgtccttcatgctgcgggccatcagcgtcttcatcaaggactggatcctgtatgcagagcaggacagcaaccactgcttcatcagcacagtggagtgcaaggctgtgatggtgttcttccactactgtgtggtgagcaactacttctggctgttcatcgagggcctgtacctgttcaccctgctggtggagaccttcttccctgagcggcgctacttctactggtacaccatcatcggctggggcacccccaccgtgtgtgtgacagtgtgggccaccctgcggctgtactttgatgacaccggctgctgggacatgaatgacagcacagccctgtggtgggtgatcaagggccctgtggtgggcagcatcatggtgaactttgtgctcttcatcggcatcatcgtcatcctggtgcagaagctgcagagcccagacatgggcggcaatgaaagcagcatctacctgaccaacctgagcccccgggtgcccaagaaggcccgggaggaccccctgcctgtgcccagcgaccagcacagcctgcccttcctgagctgtgtgcagaagtgctactgcaagccccagagggcccagcagcacagctgcaagatgtctgagctgagcaccatcaccctgcggctggcccggagcaccctgctgctgatccccctgtttggcatccactacacagtgtttgccttctccccagaaaatgtgtccaagcgggagcggctggtgtttgagctgggcctgggcagcttccagggctttgtggtggccgtgctgtactgcttcctgaatggagaggtgcaggccgagatcaagaggaagtggaggtcctggaaggtgaaccgctactttgctgtggacttcaagcaccgccaccccagcctggccagcagcggcgtgaatggaggcacccagctgagcatcctgagcaagagcagcagccagatccgcatgagcggcctgcctgctgacaacctggccacctag

SEQ ID NO: 142909 - DNA, 225 bp, synthetic construct
  misc_feature 1..225: note = Description of Artificial Sequence: Synthetic coding sequence
  source 1..225: mol_type = other DNA
atggccggcgtggtgcacgtgtccctggccgccctgctgctgctgcccatggccccagccatgcacagcgactgcatcttcaagaaggagcaggccatgtgcctggagaagatccagagggccaatgagctgatgggcttcaatgacagcagccctggctgccccggcatgtgggacaacatcacctgctggaagccagcccacgtgggggagatggtgctgtag

SEQ ID NO: 142910 - DNA, 447 bp, synthetic construct
  misc_feature 1..447: note = Description of Artificial Sequence: Synthetic coding sequence
  source 1..447: mol_type = other DNA
tgagccaccctgcggctgtactttgatgacaccggctgctgggacatgaatgacagcacagccctgtggtgggtgatcaagggccctgtggtgggcagcatcatggtgaactttgtgctcttcatcggcatcatcgtcatcctggtgcagaagctgcagagcccagacatgggcggcaatgaaagcagcatctacctgaccaacctgagcccccgggtgcccaagaaggcccgggaggaccccctgcctgtgcccagcgaccagcacagcctgcccttcctgcggctggcccggagcaccctgctgctgatccccctgtttggcatccactacacagtgtttgccttctccccagaaaatgtgtccaagcgggagcggctggtgtttgagctgggcctgggcagcttccagggctttgtggtggccgtgctgtactgcttcctgtag

SEQ ID NO: 142911 - DNA, 1344 bp, synthetic construct
  misc_feature 1..1344: note = Description of Artificial Sequence: Synthetic coding sequence
  source 1..1344: mol_type = other DNA
atggccggcgtggtgcacgtgtccctggccgccctgctgctgctgcccatggccccagccatgcacagcgactgcatcttcaagaaggagcaggccatgtgcctggagaagatccagagggccaatgagctgatgggcttcaatgacagcagccctggctgccccggcatgtgggacaacatcacctgctggaagccagcccacgtgggggagatggtgctggtgtcctgcccagagctgttccgcatcttcaacccagaccaggacatgggcgtggtgtccaggaactgcacagaagatggctggagcgagcccttcccccactactttgatgcctgtggctttgatgaatatgagagcgagaccggggaccaggactactactacctgtctgtgaaggccctgtacacagtgggctacagcaccagcctggtgaccctgaccacagccatggtgatcctgtgccgcttcaggaagctgcactgcaccaggaacttcatccacatgaacctgtttgtgtccttcatgctgcgggccatctctgtgttcatcaaggactggatcctgtatgcagagcaggacagcaaccactgcttcatcagcacagtggagtgcaaggctgtgatggtgttcttccactactgtgtggtgagcaactacttctggctgttcatcgagggcctgtacctgttcaccctgctggtggagaccttcttccctgagcggcgctacttctactggtacaccatcatcggctggggcacccccaccgtgtgtgtgacagtgtgggccaccctgcggctgtactttgatgacaccggctgctgggacatgaatgacagcacagccctgtggtgggtgatcaagggccctgtggtgggcagcatcatggtgaactttgtgctcttcatcggcatcatcgtcatcctggtgcagaagctgcagagcccagacatgggcggcaatgaaagcagcatctacctgcggctggcccggagcaccctgctgctgatccccctgtttggcatccactacacagtgtttgccttctccccagaaaatgtgtccaagcgggagcggctggtgtttgagctgggcctgggcagcttccagggctttgtggtggccgtgctgtactgcttcctgaatggagaggtgcaggccgagatcaagaggaagtggaggtcctggaaggtgaaccgctactttgctgtggacttcaagcaccgccaccccagcctggccagcagtggagtgaatggaggcacccagctgagcatcctgagcaagagcagcagccagatccgcatgagcggcctgcctgctgacaacctggccacctag

SEQ ID NO: 142912 - DNA, 705 bp, synthetic construct
  misc_feature 1..705: note = Description of Artificial Sequence: Synthetic coding sequence
  source 1..705: mol_type = other DNA
atggaccccggcctgcagcaggccctgaatggcatggcccctcctggggacacagccatgcacgtgcctgctggctctgtggccagccacctgggcaccaccagccgcagctacttctacctgaccacagccaccctggccctgtgcctggtgttcaccgtggccaccatcatggtgctggtggtgcagaggacagacagcatccccaacagcccagacaacgtgcccctgaagggcggcaactgcagcgaggacctgctgtgcatcctgaagagggcccccttcaagaagtcctgggcctacctgcaggtggccaagcacctgaacaagaccaagctgtcctggaacaaggatggcatcctgcacggcgtgcgctaccaggacggcaacctggtgatccagtttcctggcctgtacttcatcatctgccagctgcagttcctggtgcagtgccccaacaacagcgtggacctgaagctggagctgctgatcaacaagcacatcaagaagcaggccctggtgacagtgtgtgagagcggcatgcagaccaagcacgtgtaccagaacctgagccagttcctgctggactacctgcaggtgaacaccaccatctctgtgaatgtggacaccttccagtacatcgacaccagcaccttccccctggagaatgtgctgagcatcttcctgtacagcaacagcgactag

SEQ ID NO: 142913 - DNA, 585 bp, synthetic construct
  misc_feature 1..585: note = Description of Artificial Sequence: Synthetic coding sequence
  source 1..585: mol_type = other DNA
atggaggagaagctgaagaagaccaagatcatctttgtggtgggcggccctggcagcggcaagggcacccagtgtgagaagatcgtgcagaagtatggctacacccacctgagcactggagacctgctgcggtctgaggtgagcagcggcagcgcccggggcaagaagctgtctgagatcatggagaagggccagctggtgcccctggagaccgtgctggacatgctgagagatgccatggtggccaaggtgaacaccagcaagggcttcctgattgatggctacccccgggaggtgcagcagggcgaggagtttgaaagaagaattggccagcccaccctgctgctgtatgtggatgctggccctgagaccatgacccagaggctgctgaagagaggagagaccagcggccgggtggatgacaatgaggagaccatcaagaagaggctggagacctactacaaggccacagagcctgtgattgccttctatgagaagaggggcatcgtgaggaaggtgaatgctgagggctctgtggacagcgtcttcagccaggtgtgcacccacctggatgccctgaagtag

SEQ ID NO: 142914 - DNA, 585 bp, synthetic construct; identical to SEQ ID NO: 142913
  misc_feature 1..585: note = Description of Artificial Sequence: Synthetic coding sequence
  source 1..585: mol_type = other DNA

SEQ ID NO: 142915 - DNA, 720 bp, synthetic construct
  misc_feature 1..720: note = Description of Artificial Sequence: Synthetic coding sequence
  source 1..720: mol_type = other DNA
atggcccccagcgtgcctgctgctgagcctgagtaccccaagggcatccgggctgtgctgctgggccccccaggggccggcaagggcacccaggccccccggctggccgagaacttctgtgtgtgccacctggccaccggggacatgctgcgggccatggtggccagcggcagcgagctgggcaagaagctgaaggccaccatggatgctgggaagctggtgtctgatgagatggtggtggagctgattgagaagaacctggagacccccctgtgcaagaatggcttcctgctggatggcttccccaggacagtgcggcaggccgagatgctggatgacctgatggagaagaggaaggagaagctggacagcgtcatcgagttcagcatcccagacagcctgctgatccgccgcatcaccggccgcctcatccaccccaagagcggccgcagctaccacgaggagttcaacccccccaaggagcccatgaaggatgacatcaccggggagcccctcatccgccgcagtgatgacaatgagaaggccctgaagatccggctgcaggcctaccacacccagaccacccccctcatcgagtactacaggaagaggggcatccacagcgccattgatgccagccagaccccagatgtggtgtttgccagcatcctggccgccttcagcaaggccacctgcaaggacctggtgatgttcatctag

SEQ ID NO: 142916 - DNA, 699 bp, synthetic construct
  misc_feature 1..699: note = Description of Artificial Sequence: Synthetic coding sequence
  source 1..699: mol_type = other DNA
atggcccccagcgtgcctgctgctgagcctgagtaccccaagggcatccgggctgtgctgctgggccccccaggggccggcaagggcacccaggccccccggctggccgagaacttctgtgtgtgccacctggccaccggggacatgctgcgggccatggtggccagcggcagcgagctgggcaagaagctgaaggccaccatggatgctgggaagctggtgtctgatgagatggtggtggagctgattgagaagaacctggagacccccctgtgcaagaatggcttcctgctggatggcttccccaggacagtgcggcaggccgagatgctggatgacctgatggagaagaggaaggagaagctggacagcgtcatcgagttcagcatcccagacagcctgctgatccgccgcatcaccggccgcctcatccaccccaagagcggccgcagctaccacgaggagttcaacccccccaaggagcccatgaaggatgacatcaccggggagcccctcatccgccgcagtgatgacaatgagaaggccctgaagatccggctgcaggcctaccacacccagaccacccccctcatcgagtactacaggaagaggggcatccacagcgccattgatgccagccagaccccagatgtggtgtttgccagcatcctggccgccttcagcaaggccaccagctag

SEQ ID NO: 142917 - DNA, 609 bp, synthetic construct
  misc_feature 1..609: note = Description of Artificial Sequence: Synthetic coding sequence
  source 1..609: mol_type = other DNA
atggcccccagcgtgcctgctgctgagcctgagtaccccaagggcatccgggctgtgctgctgggccccccaggggccggcaagggcacccaggccccccggctggccgagaacttctgtgtgtgccacctggccaccggggacatgctgcgggccatggtggccagcggcagcgagctgggcaagaagctgaaggccaccatggatgctgggaagctggtgtctgatgagatggtggtggagctgattgagaagaacctggagacccccctgtgcaagaatggcttcctgctggatggcttccccaggacagtgcggcaggccgagatgctggatgacctgatggagaagaggaaggagaagctggacagcgtcatcgagttcagcatcccagacagcctgctgatccgccgcatcaccggccgcctcatccaccccaagagcggccgcagctaccacgaggagttcaacccccccaaggagcccatgaaggatgacatcaccggggagcccctcatccgccgcagcgtcatcggccaggccaagaggagcttcctgcggctggccaagatcagctttgatgtgctgatcaagaaggccctggcctag

SEQ ID NO: 142918 - DNA, 474 bp, synthetic construct
  misc_feature 1..474: note = Description of Artificial Sequence: Synthetic coding sequence
  source 1..474: mol_type = other DNA
atgacccggctggccctgcacgagctgaagaacctgacccagtacagctggctgctggatggcttccccaggaccctgccccaggccgaggccctggaccgggcctaccagattgacaccgtcatcaacctgaatgtgccctttgaggtgatcaagcagaggctgacagcccgctggatccacccagccagcggccgggtgtacaacatcgagttcaacccccccaagacagtgggcattgatgacctgaccggggagcccctcatccagcgggaggatgacaagccagagaccgtcatcaagaggctgaaggcctatgaggaccagaccaagcctgtgctggagtactaccagaagaagggcgtgctggagaccttctctggaacagagaccaacaagatctggccctacgtgtatgccttcctgcagaccaaggtgccccagaggagccagaaggcctctgtgaccccctag

SEQ ID NO: 142919 - DNA, 684 bp, synthetic construct
  misc_feature 1..684: note = Description of Artificial Sequence: Synthetic coding sequence
  source 1..684: mol_type = other DNA
atgggcgccagcgcccggctgctgcgggccgtcatcatgggcgcccctggcagcggcaagggcaccgtgagcagccgcatcaccacccactttgagctgaagcacctgagcagcggggacctgctgcgggacaacatgctgcggggcacagaaattggagtgctggccaaggccttcatcgaccagggcaagctgatcccagatgatgtgatgacccggctggccctgcacgagctgaagaacctgacccagtacagctggctgctggatggcttccccaggaccctgccccaggccgaggccctggaccgggcctaccagattgacaccgtcatcaacctgaatgtgccctttgaggtgatcaagcagaggctgacagcccgctggatccacccagccagcggccgggtgtacaacatcgagttcaacccccccaagacagtgggcattgatgacctgaccggggagcccctcatccagcgggaggatgacaagccagagaccgtcatcaagaggctgaaggcctatgaggaccagaccaagcctgtgctggagtactaccagaagaagggcgtgctggagaccttctctggaacagagaccaacaagatctggccctacgtgtatgccttcctgcagaccaaggtgccccagaggagccagaaggcctctgtgaccccctag

SEQ ID NO: 142920 - DNA, 564 bp, synthetic construct
  misc_feature 1..564: note = Description of Artificial Sequence: Synthetic coding sequence
  source 1..564: mol_type = other DNA
atgggcgccagcgcccggctgctgcgggccgtcatcatgggcgcccctggcagcggcaagggcaccgtgagcagccgcatcaccacccactttgagctgaagcacctgagcagcggggacctgctgcgggacaacatgctgcggggcaccggcttccccaggaccctgccccaggccgaggccctggaccgggcctaccagattgacaccgtcatcaacctgaatgtgccctttgaggtgatcaagcagaggctgacagcccgctggatccacccagccagcggccgggtgtacaacatcgagttcaacccccccaagacagtgggcattgatgacctgaccggggagcccctcatccagcgggaggatgacaagccagagaccgtcatcaagaggctgaaggcctatgaggaccagaccaagcctgtgctggagtactaccagaagaagggcgtgctggagaccttctctggaacagagaccaacaagatctggccctacgtgtatgccttcctgcagaccaaggtgccccagaggagccagaaggcctctgtgaccccctag

SEQ ID NO: 142921 - DNA, 474 bp, synthetic construct; identical to SEQ ID NO: 142918
  misc_feature 1..474: note = Description of Artificial Sequence: Synthetic coding sequence
  source 1..474: mol_type = other DNA

SEQ ID NO: 142922 - DNA, 1611 bp, synthetic construct
  misc_feature 1..1611: note = Description of Artificial Sequence: Synthetic coding sequence
  source 1..1611: mol_type = other DNA
atgtgcagcaagccagaggaccctgtggagtacctggagagctgcctgcagaaggtgaaggagctgggcggctgtgacaaggtgaagtgggacacctttgtgtcccaggagaagaagaccctgccccccctgaatggaggccagagccgccgctccttcctgagaaatgtgatgcctgagaacagcaacttcccctacagaagatatgaccggctgccccccatccaccagttcagcattgaaagtgacacagacctgtctgaaacagctgagctgattgaggagtatgaggtgtttgaccccacccggccccggcccaagatcatcctggtgattggaggccctggcagcggcaagggcacccagagcctgaagattgctgagagatatggcttccagtacatctctgtgggggagctgctgaggaagaagatccacagcaccagcagcaacaggaagtggagcctgattgccaagatcatcaccactggagagctggccccccaggagaccaccatcacagagatcaagcagaagctgatgcagatcccagatgaggagggcatcgtgattgatggcttccccagagatgtggcccaggccctgagctttgaggaccagatctgcaccccagacctggtggtgttcctggcctgtgccaaccagaggctgaaggagcggctgctgaagagagctgagcagcagggccgcccagatgacaacgtgaaggccacccagaggcggctgatgaacttcaagcagaatgctgcccccctggtgaagtacttccaggagaagggcctcatcatgacctttgatgctgacagagatgaagatgaggtgttctatgacatctccatggctgtggacaacaagctgttccccaacaaggaggccgctgctggcagcagtgacctggaccccagcatgatcctggacaccggggagatcatcgacaccggcagtgactatgaggaccagggagatgaccagctgaatgtgtttggagaggacaccatgggcggcttcatggaggacctgaggaagtgcaagatcatcttcatcatcggcggccctggcagcggcaagggcacccagtgtgagaagctggtggagaagtatggcttcacccacctgagcactggagagctgctgcgggaggagctggccagcgagagcgagaggagcaagctgatccgggacatcatggagcggggggacctggtgcccagcggcatcgtgctggagctgctgaaggaggccatggtggccagcctgggggacacccggggcttcctgattgatggctacccccgggaggtgaagcagggcgaggagtttggaagaagaattggagacccccagctggtgatctgcatggactgcagcgctgacaccatgaccaaccggctgctgcagaggagccgcagcagcctgcctgtggatgacaccaccaagaccatcgccaagaggctggaggcctactaccgggccagcatccctgtgattgcctactatgagaccaagacccagctgcacaagatcaatgctgagggcaccccagaagatgtgttcctgcagctgtgcacagccatcgacagcatcttctag

SEQ ID NO: 142923 - DNA, 1689 bp, synthetic construct
  misc_feature 1..1689: note = Description of Artificial Sequence: Synthetic coding sequence
  source 1..1689: mol_type = other DNA
atgaacaccaatgatgccaaggagtacctggcccggcgggagatcccccagctgtttgagagcctgctgaatggcctgatgtgcagcaagccagaggaccctgtggagtacctggagagctgcctgcagaaggtgaaggagctgggcggctgtgacaaggtgaagtgggacacctttgtgtcccaggagaagaagaccctgccccccctgaatggaggccagagccgccgctccttcctgagaaatgtgatgcctgagaacagcaacttcccctacagaagatatgaccggctgccccccatccaccagttcagcattgaaagtgacacagacctgtctgaaacagctgagctgattgaggagtatgaggtgtttgaccccacccggccccggcccaagatcatcctggtgattggaggccctggcagcggcaagggcacccagagcctgaagattgctgagagatatggcttccagtacatctctgtgggggagctgctgaggaagaagatccacagcaccagcagcaacaggaagtggagcctgattgccaagatcatcaccactggagagctggccccccaggagaccaccatcacagagatcaagcagaagctgatgcagatcccagatgaggagggcatcgtgattgatggcttccccagagatgtggcccaggccctgagctttgaggaccagatctgcaccccagacctggtggtgttcctggcctgtgccaaccagaggctgaaggagcggctgctgaagagagctgagcagcagggccgcccagatgacaacgtgaaggccacccagaggcggctgatgaacttcaagcagaatgctgcccccctggtgaagtacttccaggagaagggcctcatcatgacctttgatgctgacagagatgaagatgaggtgttctatgacatctccatggctgtggacaacaagctgttccccaacaaggaggccgctgctggcagcagtgacctggaccccagcatgatcctggacaccggggagatcatcgacaccggcagtgactatgaggaccagggagatgaccagctgaatgtgtttggagaggacaccatgggcggcttcatggaggacctgaggaagtgcaagatcatcttcatcatcggcggccctggcagcggcaagggcacccagtgtgagaagctggtggagaagtatggcttcacccacctgagcactggagagctgctgcgggaggagctggccagcgagagcgagaggagcaagctgatccgggacatcatggagcggggggacctggtgcccagcggcatcgtgctggagctgctgaaggaggccatggtggccagcctgggggacacccggggcttcctgattgatggctacccccgggaggtgaagcagggcgaggagtttggaagaagaattggagacccccagctggtgatctgcatggactgcagcgctgacaccatgaccaaccggctgctgcagaggagccgcagcagcctgcctgtggatgacaccaccaagaccatcgccaagaggctggaggcctactaccgggccagcatccctgtgattgcctactatgagaccaagacccagctgcacaagatcaatgctgagggcaccccagaagatgtgttcctgcagctgtgcacagccatcgacagcatcttctag

SEQ ID NO: 142924 - DNA, 531 bp, synthetic construct
  misc_feature 1..531: note = Description of Artificial Sequence: Synthetic coding sequence
  source 1..531: mol_type = other DNA
atgtgcagcaagccagaggaccctgtggagtacctggagagctgcctgcagaaggtgaaggagctgggcggctgtgacaaggtgaagtgggacacctttgtgtcccaggagaagaagaccctgccccccctgaatggaggccagagccgccgctccttcctgagaaatgtgatgcctgagaacagcaacttcccctacagaagatatgaccggctgccccccatccaccagttcagcattgaaagtgacacagacctgtctgaaacagctgagctgattgaggagtatgaggtgtttgaccccacccggccccggcccaagatcatcctggtgattggaggccctggcagcggcaagggcacccagagcctgaagattgctgagagatatggcttccagtacatctctgtgggggagctgctgaggaagaagatccacagcaccagcagcaacaggaagtggagcctgattgccaagatcatcaccactggagagctggccccccaggagaccaccatcacagagatctag

SEQ ID NO: 142925 - DNA, 1647 bp, synthetic construct
  misc_feature 1..1647: note = Description of Artificial Sequence: Synthetic coding sequence
  source 1..1647: mol_type = other DNA
atggccaagttcatgacccctgtgatccaggacaaccccagcggctggggcccctgtgctgtgcctgagcagttccgggacatgccctaccagcccttcagcaaaggagaccggctgggcaaggtggccgactggacaggagccacctaccaggacaagcgctacaccaacaagtacagcagccagtttggaggcggcagccagtatgcctacttccatgaagaagatgagagcagcttccagctggtggacacagcccggacccagaagacagcctaccagaggaacaggatgagatttgcccagaggaacctgcggcgggacaaggacagaagaaacatgctgcagttcaacctgcagatcctgcccaagagcgccaagcagaaggagcgggagcgcatccggctgcagaagaagttccagaagcagtttggagtgcggcagaagtgggaccagaagagccagaagccccgggacagctctgtggaggtgcggagtgactgggaggtgaaggaggagatggacttcccccagctgatgaagatgagatacctggaggtgtctgagccccaggacatcgagtgctgcggggccctggagtactatgacaaggcctttgaccgcatcaccaccaggtctgagaagcccctgcggagcatcaagaggatcttccacacagtgaccaccacagatgatcctgtgatcaggaagctggccaagacccagggcaatgtgtttgccacagatgccatcctggccaccctgatgagctgcaccaggtctgtgtacagctgggacatcgtggtgcagagggtgggcagcaagctgttctttgacaagagggacaacagcgactttgacctgctgactgtgtctgaaacagccaatgagcccccccaggatgagggcaacagcttcaacagccccaggaacctggccatggaggccacctacatcaaccacaacttcagccagcagtgcctgaggatgggcaaggagcgctacaacttccccaaccccaacccctttgtggaggatgacatggacaagaatgaaattgcctctgtggcctaccgctaccgccgctggaagctgggagatgacatcgacctgattgtgcgctgtgaacatgatggagtgatgaccggggccaatggagaggtgtccttcatcaacatcaagaccctgaatgagtgggacagccgccactgcaatggagtggactggaggcagaagctggacagccagagaggagctgtgattgccacagagctgaagaacaacagctacaagctggcccgctggacctgctgtgccctgctggccggcagcgagtacctgaagctgggctacgtgagccgctaccacgtgaaggacagcagcagacatgtgatcctgggcacccagcagttcaagcccaatgaatttgccagccagatcaacctgtctgtggagaatgcctggggcatcctgcgctgtgtgattgacatctgcatgaagctggaggagggcaagtacctgatcctgaaggaccccaacaagcaggtgatccgggtgtacagcctgcctgatggcaccttcagcagtgatgaagatgaggaggaggaggaggaggaggaggaggaggaggaggaggaggagacctag

SEQ ID NO: 142926 - DNA, 1278 bp, synthetic construct
  misc_feature 1..1278: note = Description of Artificial Sequence: Synthetic coding sequence
  source 1..1278: mol_type = other DNA
atggctgctggaggagaccacggcagcccagacagctaccgcagccccctggccagccgctatgccagccctgagatgtgctttgtgttcagtgaccgctacaagttccgcacctggaggcagctgtggctgtggctggccgaggccgagcagaccctgggcctgcccatcacagatgagcagatccaggagatgaagagcaacctggagaacatcgacttcaagatggctgctgaggaggagaagaggctgcggcatgatgtgatggcccacgtgcacaccttcggccactgctgccccaaggctgctggcatcatccacctgggcgccaccagctgctacgtgggggacaacacagacctgatcatcctgagaaatgccctggacctgctgctgcccaagctggcccgggtcatcagccggctggccgactttgccaaggagcgggccagcctgcccaccctgggcttcacccacttccagcctgcccagctgaccaccgtgggcaagcgctgctgcctgtggatccaggacctgtgcatggacctgcagaacctgaagagggtgagagatgacctgcgcttccggggcgtgaagggcaccaccggcacccaggccagcttcctgcagctgtttgaaggagatgaccacaaggtggagcagctggacaagatggtgacagagaaggccggcttcaagagggccttcatcatcaccggccagacctacaccaggaaggtggacatcgaggtgctgtctgtgctggccagcctgggcgcctctgtgcacaagatctgcacagacatccggctgctggccaacctgaaggagatggaggagccctttgagaagcagcagatcggcagcagcgccatgccctacaagaggaaccccatgaggtctgagcgctgctgcagcctggcccggcacctgatgaccctggtgatggaccccctgcagacagcctctgtgcagtggtttgagaggaccctggatgacagcgccaacagacgcatctgcctggccgaggccttcctgacagctgacaccatcctgaacaccctgcagaacatcagcgagggcctggtggtgtaccccaaggtgattgaaagacgcatccggcaggagctgcccttcatggccacagagaacatcatcatggccatggtgaaggccggcggcagccggcaggtgcagcgcttcctggaggaggaggtgtaccccctgctgaagccctatgaatctgtgatgaaggtgaaggccgagctgtgcctgtag

SEQ ID NO: 142927 - DNA, 1497 bp, synthetic construct
  misc_feature 1..1497: note = Description of Artificial Sequence: Synthetic coding sequence
  source 1..1497: mol_type = other DNA
atggctgctggaggagaccacggcagcccagacagctaccgcagccccctggccagccgctatgccagccctgagatgtgctttgtgttcagtgaccgctacaagttccgcacctggaggcagctgtggctgtggctggccgaggccgagcagaccctgggcctgcccatcacagatgagcagatccaggagatgaagagcaacctggagaacatcgacttcaagatggctgctgaggaggagaagaggctgcggcatgatgtgatggcccacgtgcacaccttcggccactgctgccccaaggctgctggcatcatccacctgggcgccaccagctgctacgtgggggacaacaccagcctcatcctgagccggggcgtcatcaaggcctactgcaacctgcggctgcccggcagtgacagcagccctgtgtctgtgtcccagctggcccgggtcatcagccggctggccgactttgccaaggagcgggccagcctgcccaccctgggcttcacccacttccagcctgcccagctgaccaccgtgggcaagcgctgctgcctgtggatccaggacctgtgcatggacctgcagaacctgaagagggtgagagatgacctgcgcttccggggcgtgaagggcaccaccggcacccaggccagcttcctgcagctgtttgaaggagatgaccacaaggtggagcagctggacaagatggtgacagagaaggccggcttcaagagggccttcatcatcaccggccagacctacaccaggaaggtggacatcgaggtgctgtctgtgctggccagcctgggcgcctctgtgcacaagatctgcacagacatccggctgctggccaacctgaaggagatggaggagccctttgagaagcagcagatcggcagcagcgccatgccctacaagaggaaccccatgaggtctgagcgctgctgcagcctggcccggcacctgatgaccctggtgatggaccccctgcagacagcctctgtgcagtggtttgagaggaccctggatgacagcgccaacagacgcatctgcctggccgaggccttcctgacagctgacaccatcctgaacaccctgcagaacatcagcgagggcctggtggtgtaccccaaggtgattgaaagacgcatccggcaggagctgcccttcatggccacagagaacatcatcatggccatggtgaaggccggcggcagccggcaggactgccacgagaagatccgggtgctgagccagcaggccgcctctgtggtgaagcaggagggcggggacaatgacctgattgaaagaatccaggtggatgcctacttcagccccatccacagccagctggaccacctgctggaccccagcagcttcaccggccgggccagccagcaggtgcagcgcttcctggaggaggaggtgtaccccctgctgaagccctatgagagcgtgatgaaggtgaaggccgagctgtgcctgtag

SEQ ID NO: 142928 - DNA, 915 bp, synthetic construct
  misc_feature 1..915: note = Description of Artificial Sequence: Synthetic coding sequence
  source 1..915: mol_type = other DNA
atggacctgcagaacctgaagagggtgagagatgacctgcgcttccggggcgtgaagggcaccaccggcacccaggccagcttcctgcagctgtttgaaggagatgaccacaaggtggagcagctggacaagatggtgacagagaaggccggcttcaagagggccttcatcatcaccggccagacctacaccaggaaggtggacatcgaggtgctgtctgtgctggccagcctgggcgcctctgtgcacaagatctgcacagacatccggctgctggccaacctgaaggagatggaggagccctttgagaagcagcagatcggcagcagcgccatgccctacaagaggaaccccatgaggtctgagcgctgctgcagcctggcccggcacctgatgaccctggtgatggaccccctgcagacagcctctgtgcagtggtttgagaggaccctggatgacagcgccaacagacgcatctgcctggccgaggccttcctgacagctgacaccatcctgaacaccctgcagaacatcagcgagggcctggtggtgtaccccaaggtgattgaaagacgcatccggcaggagctgcccttcatggccacagagaacatcatcatggccatggtgaaggccggcggcagccggcaggactgccacgagaagatccgggtgctgagccagcaggccgcctctgtggtgaagcaggagggcggggacaatgacctgattgaaagaatccaggtggatgcctacttcagccccatccacagccagctggaccacctgctggaccccagcagcttcaccggccgggccagccagcaggtgcagcgcttcctggaggaggaggtgtaccccctgctgaagccctatgagagcgtgatgaaggtgaaggccgagctgtgcctgtag

SEQ ID NO: 142929 - DNA, 384 bp, synthetic construct
  misc_feature 1..384: note = Description of Artificial Sequence: Synthetic coding sequence
  source 1..384: mol_type = other DNA
atggctgctggaggagaccacggcagcccagacagctaccgcagccccctggccagccgctatgccagccctgagatgtgctttgtgttcagtgaccgctacaagttccgcacctggaggcagctgtggctgtggctggccgaggccgagcagaccctgggcctgcccatcacagatgagcagatccaggagatgaagagcaacctggagaacatcgacttcaagatggctgctgaggaggagaagaggctgcggcatgatgtgatggcccacgtgcacaccttcggccactgctgccccaaggctgctggcatcatccacctgggcgccaccagctgctacgtgggggacaacacagtgggcgcctgtgtggtgtacacctag

SEQ ID NO: 142930 - DNA, 1371 bp, synthetic construct
  misc_feature 1..1371: note = Description of Artificial Sequence: Synthetic coding sequence
  source 1..1371: mol_type = other DNA
atggcctttgctgagacctacccagctgccagcagcctgcccaatggagactgtggccggccccgggcccggcctgggggcaacagagtgacagtggtgctgggcgcccagtggggagatgagggcaagggcaaggtggtggacctgctggcccaggatgctgacatcgtgtgccgctgccagggcggcaacaatgccggccacacagtggtggtggacagcgtggagtatgacttccacctgctgcccagcggcatcatcaaccccaacgtgacagccttcatcggaaatggagtggtgatccacctgcccggcctgtttgaggaggccgagaagaatgtgcagaagggcaagggcctggagggctgggagaagaggctcatcatcagtgaccgggcccacatcgtgtttgacttccaccaggccgcagatggcatccaggagcagcagaggcaggagcaggccggcaagaacctgggcaccaccaagaagggcatcggccctgtgtacagcagcaaggccgcccggagcggcctgaggatgtgtgacctggtgtctgactttgatggcttcagcgagcgcttcaaggtgctggccaaccagtacaagagcatctaccccaccctggagattgatattgaaggagagctgcagaagctgaagggctacatggagaagatcaagcccatggtgagagatggagtgtacttcctgtatgaggccctgcacggcccccccaagaagatcctggtggagggcgccaatgctgccctgctggacatcgactttggcacctacccctttgtgaccagcagcaactgcaccgtgggcggcgtgtgcaccggcctgggcatgccaccccagaatgtgggggaggtgtatggagtggtgaaggcctacaccaccagggtgggcatcggggccttccccacagagcaggacaatgaaattggagagctgctgcagacccggggccgggagtttggagtgaccaccggcaggaagaggcgctgtggctggctggacctggtgctgctgaagtatgcccacatgatcaatggcttcaccgccctggccctgaccaagctggacatcctggacatgttcacagagatcaaggtgggcgtggcctacaagctggatggagagatcatcccccacatcccagccaaccaggaggtgctgaacaaggtggaggtgcagtacaagaccctgcccggctggaacacagacatcagcaatgcccgggccttcaaggagctgcctgtgaatgcccagaactacgtgcgcttcattgaagatgagctgcagatccctgtgaagtggattggagtgggcaagagccgggagagcatgatccagctgttctag

SEQ ID NO: 142931 - DNA, 1308 bp, synthetic construct
  misc_feature 1..1308: note = Description of Artificial Sequence: Synthetic coding sequence
  source 1..1308: mol_type = other DNA
atggcctttgctgagacctacccagctgccagcagcctgcccaatggagactgtgatgagggcaagggcaaggtggtggacctgctggcccaggatgctgacatcgtgtgccgctgccagggcggcaacaatgccggccacacagtggtggtggacagcgtggagtatgacttccacctgctgcccagcggcatcatcaaccccaacgtgacagccttcatcggaaatggagtggtgatccacctgcccggcctgtttgaggaggccgagaagaatgtgcagaagggcaagggcctggagggctgggagaagaggctcatcatcagtgaccgggcccacatcgtgtttgacttccaccaggccgcagatggcatccaggagcagcagaggcaggagcaggccggcaagaacctgggcaccaccaagaagggcatcggccctgtgtacagcagcaaggccgcccggagcggcctgaggatgtgtgacctggtgtctgactttgatggcttcagcgagcgcttcaaggtgctggccaaccagtacaagagcatctaccccaccctggagattgacatcgagggggagctgcagaagctgaagggctacatggagaagatcaagcccatggtgagagatggagtgtacttcctgtatgaggccctgcacggcccccccaagaagatcctggtggagggcgccaatgctgccctgctggacatcgactttggcacctacccctttgtgaccagcagcaactgcaccgtgggcggcgtgtgcaccggcctgggcatgccaccccagaatgtgggggaggtgtatggagtggtgaaggcctacaccaccagggtgggcattggagccttccccacagagcaggacaatgagatcggggagctgctgcagacccggggccgggagtttggagtgaccactggaaggaagagaagatgtggctggctggacctggtgctgctgaagtatgcccacatgatcaatggcttcaccgccctggccctgaccaagctggacatcctggacatgttcacagagatcaaggtgggcgtggcctacaagctggatggagagatcatcccccacatcccagccaaccaggaggtgctgaacaaggtggaggtgcagtacaagaccctgcccggctggaacacagacatcagcaatgcccgggccttcaaggagctgcctgtgaatgcccagaactacgtgcgcttcattgaagatgagctgcagatccctgtgaagtggattggagtgggcaagagccgggagagcatgatccagctgttctag

SEQ ID NO: 142932 - DNA, 1236 bp, synthetic construct
  misc_feature 1..1236: note = Description of Artificial Sequence: Synthetic coding sequence
  source 1..1236: mol_type = other DNA
atgtggatccagcagctgctgggcctgagctccatgagcatccgctggccaggccggcccctgggcagccacgcctggatcctgattgccatgttccagctggccgtggacctgcctgcctgtgaggccctgggccctggccctgagttctggctgctgcccaggagccccccccggcccccccggctgtggagcttccgcagcggccagcctgcccgggtgcctgcccctgtgtggagccccaggcctccccgggtggagcgcatccacggccagatgcagatgccccgggcccggcgggcccaccggccccgggaccaggccgccgccctggtgcccaaggccggcctggccaagcccccagctgctgccaagagcagccccagcctggccagcagcagcagcagcagcagcagcgctgtggccggcggggcccctgagcagcaggccctgctgcggcggggcaagaggcacctgcagggagatggcctgagcagctttgacagccggggcagccggcccaccacagaaacagagttcatcgcctggggccccactggagatgaggaggccctggagagcaacaccttccctggggtgtatggccccaccaccgtgtccatcctgcagaccaggaagaccaccgtggccgccaccaccaccaccaccaccacagccacccccatgaccctgcagaccaagggcttcacagagagcctggacccccggcggcgcatccctggaggagtgtccaccacagagcccagcaccagccccagcaacaacggggaggtgacccagcccccacgcatcctgggggaggccagcggcctggccgtgcaccagatcatcaccatcaccgtgtccctcatcatggtgattgctgccctgatcaccaccctggtgctgaagaactgctgtgcccagagcggcaacaccaggaggaacagccaccagaggaagaccaaccagcaggaggagagctgccagaacctgacagacttccccagcgcccgggtgcccagcagcctggacatcttcaccgcctacaatgagaccctgcagtgcagccatgaatgtgtgcgggcctctgtgcctgtgtacacagatgagaccctgcacagcaccactggagagtacaagagcaccttcaatggaaaccggcccagcagcagtgacagacacctgatccctgtggcctttgtgtctgagaagtggtttgagatcagctgctag

SEQ ID NO: 142933 - DNA, 1236 bp, synthetic construct; identical to SEQ ID NO: 142932
  misc_feature 1..1236: note = Description of Artificial Sequence: Synthetic coding sequence
  source 1..1236: mol_type = other DNA

SEQ ID NO: 142934 - DNA, 1155 bp, synthetic construct
  misc_feature 1..1155: note = Description of Artificial Sequence: Synthetic coding sequence
  source 1..1155: mol_type = other DNA
atggtgtctggggactacagcctgggcctgaatgacctgaatgtgtccccacctgagctgactgtgcacgtgggggacagcgccctgatgggctgtgtgttccagagcacagaggacaagtgcatcttcaagattgactggaccctgagccctggagagcacgccaaggatgaatatgtgctgtactactacagcaacctgtctgtgcccatcggccgcttccagaacagagtgcacctgatgggagacatcctgtgcaatgatggcagcctgctgctgcaggatgtgcaggaggccgaccagggcacctacatctgtgagatccggctgaagggggagagccaggtgttcaagaaggctgtggtgctgcacgtgctgcctgaggagcccaaggagctgatggtgcacgtgggcggcctcatccagatgggctgtgtgttccagagcacagaggtgaagcacgtgaccaaggtggagtggatcttctctggaagaagagccaaggaggagatcgtgttccgctactaccacaagctgaggatgtctgtggagtacagccagagctggggccacttccagaacagagtgaacctggtgggggacatcttcagaaatgatggcagcatcatgctgcagggcgtgcgggagagtgatggcggcaactacacctgcagcatccacctgggcaacctggtgttcaagaagaccatcgtgctgcacgtgtccccagaggagcccaggaccctggtgaccccagctgccctgcggcccctggtgctgggcggcaaccagctggtgatcatcgtgggcatcgtgtgtgccaccatcctgctgctgcctgtgctgatcctgattgtgaagaagacctgtggcaacaagagctctgtgaacagcacagtgctggtgaagaacaccaagaagaccaaccctgagatcaaggagaagccctgccactttgagcgctgtgagggggagaagcacatctacagccccatcatcgtgcgggaggtgattgaggaggaggagcccagcgagaagtctgaggccacctacatgaccatgcaccctgtgtggcccagcctgcggagtgacaggaacaacagcctggagaagaagagcggcggcggcatgcccaagacccagcaggccttctag

SEQ ID NO: 142935 - DNA, 1185 bp, synthetic construct
  misc_feature 1..1185: note = Description of Artificial Sequence: Synthetic coding sequence
  source 1..1185: mol_type = other DNA
atgttctgccccctgaagctgatcctgctgcctgtgctgctggactacagcctgggcctgaatgacctgaatgtgtccccacctgagctgactgtgcacgtgggggacagcgccctgatgggctgtgtgttccagagcacagaggacaagtgcatcttcaagattgactggaccctgagccctggagagcacgccaaggatgaatatgtgctgtactactacagcaacctgtctgtgcccatcggccgcttccagaacagagtgcacctgatgggagacatcctgtgcaatgatggcagcctgctgctgcaggatgtgcaggaggccgaccagggcacctacatctgtgagatccggctgaagggggagagccaggtgttcaagaaggctgtggtgctgcacgtgctgcctgaggagcccaaggagctgatggtgcacgtgggcggcctcatccagatgggctgtgtgttccagagcacagaggtgaagcacgtgaccaaggtggagtggatcttctctggaagaagagccaaggaggagatcgtgttccgctactaccacaagctgaggatgtctgtggagtacagccagagctggggccacttccagaacagagtgaacctggtgggggacatcttcagaaatgatggcagcatcatgctgcagggcgtgcgggagagtgatggcggcaactacacctgcagcatccacctgggcaacctggtgttcaagaagaccatcgtgctgcacgtgtccccagaggagcccaggaccctggtgaccccagctgccctgcggcccctggtgctgggcggcaaccagctggtgatcatcgtgggcatcgtgtgtgccaccatcctgctgctgcctgtgctgatcctgattgtgaagaagacctgtggcaacaagagctctgtgaacagcacagtgctggtgaagaacaccaagaagaccaaccctgagatcaaggagaagccctgccactttgagcgctgtgagggggagaagcacatctacagccccatcatcgtgcgggaggtgattgaggaggaggagcccagcgagaagtctgaggccacctacatgaccatgcaccctgtgtggcccagcctgcggagtgacaggaacaacagcctggagaagaagagcggcggcggcatgcccaagacccagcaggccttctag

SEQ ID NO: 142936 - DNA, 468 bp, synthetic construct
  misc_feature 1..468: note = Description of Artificial Sequence: Synthetic coding sequence
  source 1..468: mol_type = other DNA
atgttctgccccctgaagctgatcctgctgcctgtgctgctggactacagcctgggcctgaatgacctgaatgtgtccccacctgagctgactgtgcacgtgggggacagcgccctgatgggctgtgtgttccagagcacagaggacaagtgcatcttcaagattgactggaccctgagccctggagagcacgccaaggatgaatatgtgctgtactactacagcaacctgtctgtgcccatcggccgcttccagaacagagtgcacctgatgggagacatcctgtgcaatgatggcagcctgctgctgcaggatgtgcaggaggccgaccagggcacctacatctgtgagatccggctgaagggggagagccaggtgttcaagaaggctgtggtgctgcacgtgctgcctgaggagcccaaggagctgatggtgcacgtgggcggcctcatccagatgggctgctag

SEQ ID NO: 142937 - DNA, 663 bp, synthetic construct
  misc_feature 1..663: note = Description of Artificial Sequence: Synthetic coding sequence
  source 1..663: mol_type = other DNA
atgggctgtgtgttccagagcacagaggacaagtgcatcttcaagattgactggaccctgagccctggagaacatgccaaggatgaatatgtgctgtactactacagcaacctgtctgtgcccatcggccgcttccagaacagagtgcacctgatgggagacatcctgtgcaatgatggcagcctgctgctgcaggatgtgcaggaggccgaccagggcacctacatctgtgagatccggctgaagggggagagccaggtgttcaagaaggctgtggtgctgcacgtgctgcctgaggagcccaaggagctgatggtgcacgtgggcggcctcatccagatgggctgtgtgttccagagcacagaggtgaagcacgtgaccaaggtggagtggatcttcagcggccggcgggccaaggaggagatcgtgttccgctactaccacaagctgaggatgtctgtggagtacagccagagctggggccacttccagaacagagtgaacctggtgggggacatcttcagaaatgatggcagcatcatgctgcagggcgtgcgggagagtgatggcggcaactacacctgcagcatccacctgggcaacctggtgttcaagaagaccatcgtgctgcacgtgtccccagaggagcccaggaagtggtag

SEQ ID NO: 142938 - DNA, 1128 bp, synthetic construct
  misc_feature 1..1128: note = Description of Artificial Sequence: Synthetic coding sequence
  source 1..1128: mol_type = other DNA
atgagcagccacaagggctctgtggtggcccagggcaatggagccccagccagcaaccgggaggccgacacagtggagctggccgagctgggccccctgctggaggagaagggcaagagggtcatcgccaacccccccaaggccgaggaggagcagacctgccctgtgccccaggaggaggaggaggaggtgcgggtgctgaccctgcccctgcaggcccaccacgccatggagaagatggaggagtttgtgtacaaggtgtgggagggccgctggagggtcatcccctatgatgtgctgcctgactggctgaaggacaatgactacctgctgcacggccaccggccccccatgcccagcttccgggcctgcttcaagagcatcttccgcatccacacagaaacaggcaacatctggacccacctgctgggctttgtgctcttcctgttcctgggcatcctgaccatgctgcggcccaacatgtacttcatggcccccctgcaggagaaggtggtgtttggcatgttcttcctgggcgctgtgctgtgcctgtccttctcctggctgttccacacagtgtactgccacagcgagaaggtgtccaggaccttcagcaagctggactacagcggcatcgccctgctgatcatgggcagctttgtgccctggctgtactacagcttctactgcagcccccagcccaggctcatctacctgagcatcgtgtgtgtgctgggcatcagcgccatcatcgtggcccagtgggacagatttgccacccccaagcaccggcagacccgggccggggtcttcctgggcctgggcctgtctggagtggtgcccaccatgcacttcaccatcgccgagggctttgtgaaggccaccaccgtgggccagatgggctggttcttcctgatggctgtgatgtacatcaccggggccggcctgtatgctgcccgcatccctgagcgcttcttccctgggaagtttgacatctggttccagagccaccagatcttccacgtgctggtggtggccgccgcctttgtgcacttctatggagtgagcaacctgcaggagttccgctatggcctggagggcggctgcacagatgacaccctgctgtag

SEQ ID NO: 142939 - DNA, 516 bp, synthetic construct
  misc_feature 1..516: note = Description of Artificial Sequence: Synthetic coding sequence
  source 1..516: mol_type = other DNA
atgagcagccacaagggctctgtggtggcccagggcaatggagccccagccagcaaccgggaggccgacacagtggagctggccgagctgggccccctgctggaggagaagggcaagagggtcatcgccaacccccccaaggccgaggaggagcagacctgccctgtgccccaggaggaggaggaggaggtgcgggtgctgaccctgcccctgcaggcccaccacgccatggagaagatggaggagtttgtgtacaaggtgtgggagggccgctggagggtcatcccctatgatgtgctgcctgactggctgaaggacaatgactacctgctgcacggccaccggccccccatgcccagcttccgggcctgcttcaagagcatcttccgcatccacacagaaacaggcaacatctggacccacctgctggccacagcccacctgcccctgcaccggctgtgccccggccacttctgccaccactgtggggctgtgggccctgtgtgccacagctag

SEQ ID NO: 142940 - DNA, 801 bp, synthetic construct
  misc_feature 1..801: note = Description of Artificial Sequence: Synthetic coding sequence
  source 1..801: mol_type = other DNA
atgagcagccacaagggctctgtggtggcccagggcaatggagccccagccagcaaccgggaggccgacacagtggagctggccgagctgggccccctgctggaggagaagggcaagagggtcatcgccaacccccccaaggccgaggaggagcagacctgccctgtgccccaggaggaggaggaggaggtgcgggtgctgaccctgcccctgcaggcccaccacgccatggagaagatggaggagtttgtgtacaaggtgtgggagggccgctggagggtcatcccctatgatgtgctgcctgactggctgaaggacaatgactacctgctgcacggccaccggccccccatgcccagcttccgggcctgcttcaagagcatcttccgcatccacacagaaacaggcaacatctggacccacctgctgggctttgtgctcttcctgttcctgggcatcctgaccatgctgcggcccaacatgtacttcatggcccccctgcaggagaaggtggtgtttggcatgttcttcctgggcgctgtgctgtgcctgtccttctcctggctgttccacacagtgtactgccacagcgagaaggtgtccaggaccttcagcaagctggactacagcggcatcgccctgctgatcatgggcagctttgtgccctggctgtactacagcttctactgcagcccccagcccaggctcatctacctgagcatcgtgtgtgtgctgggcatcagcgccatcatcgtggcccagtgggacagatttgccacccccaagcaccggcagacctag

SEQ ID NO: 142941 - DNA, 618 bp, synthetic construct
  misc_feature 1..618: note = Description of Artificial Sequence: Synthetic coding sequence
  source 1..618: mol_type = other DNA
atgagcagccacaagggctctgtggtggcccagggcaatggagccccagccagcaaccgggaggccgacacagtggagctggccgagctgggccccctgctggaggagaagggcaagagggtcatcgccaacccccccaaggccgaggaggagcagacctgccctgtgccccaggaggaggaggaggaggtgcgggtgctgaccctgcccctgcaggcccaccacgccatggagaagatggaggagtttgtgtacaaggtgtgggagggccgctggagggtcatcccctatgatgtgctgcctgactggctgaaggacaatgactacctgctgcacggccaccggccccccatgcccagcttccgggcctgcttcaagagcatcttccgcatccacacagaaacaggcaacatctggacccacctgctgggctttgtgctcttcctgttcctgggcatcctgaccatgctgcggcccaacatgtacttcatggcccccctgcaggagaaggtggtgtttggcatgttcttcctgggcgctgtgctgtgcctgtccttctcctggctgttccacacagtgtactgccacagcgagaaggtgtccaggaccttctcctag

SEQ ID NO: 142942 - DNA, 1128 bp, synthetic construct; identical to SEQ ID NO: 142938
  misc_feature 1..1128: note = Description of Artificial Sequence: Synthetic coding sequence
  source 1..1128: mol_type = other DNA

SEQ ID NO: 142943 - DNA, 1161 bp, synthetic construct
  misc_feature 1..1161: note = Description of Artificial Sequence: Synthetic coding sequence
  source 1..1161: mol_type = other DNA
atgaatgagcccacagagaaccggctgggctgcagcaggaccccagagccagacatccggctgaggaagggccaccagctggatggcaccaggagaggagacaatgacagccaccagggcgacctggagcccatcctggaggcctctgtgctgagcagccaccacaagaagagcagcgaggagcacgagtacagtgatgaggccccccaggaggatgagggcttcatgggcatgagccccctgctgcaggcccaccacgccatggagaagatggaggagtttgtgtgcaaggtgtgggagggccgctggagggtcatcccccatgatgtgctgcctgactggctgaaggacaatgacttcctgctgcacggccacaggcctcccatgcccagcttccgggcctgcttcaagagcatcttccgcatccacacagagaccggcaacatctggacccacctgctgggctgtgtgttcttcctgtgcctgggcatcttctacatgttccggcccaacatcagctttgtggcccccctgcaggagaaggtggtgtttggcctcttcttcctgggcgccatcctgtgcctgtccttctcctggctgttccacacagtgtactgccacagcgagggcgtgtcccggctcttcagcaagctggactacagcggcatcgccctgctgatcatgggcagctttgtgccctggctgtactacagcttctactgcaacccccagccctgcttcatctacctgattgtcatctgtgtgctgggcattgctgccatcatcgtgtcccagtgggacatgtttgccaccccccagtaccggggcgtgcgggccggggtcttcctgggcctgggcctgagcggcatcatccccaccctgcactacgtgatcagcgagggcttcctgaaggccgccaccatcggccagatcggctggctgatgctgatggccagcctgtacatcactggagctgccctgtatgctgcccgcatccctgagcgcttcttccctggaaaatgtgacatctggttccacagccaccagctgttccacatctttgtggtggccggggcctttgtgcacttccacggcgtgagcaacctgcaggagttccgcttcatgattggaggcggctgcagtgaagaagatgccctgtag

SEQ ID NO: 142944 - DNA, 735 bp, synthetic construct
  misc_feature 1..735: note = Description of Artificial Sequence: Synthetic coding sequence
  source 1..735: mol_type = other DNA
atgctgctgctgggcgctgtgctgctgctgctggccctgcccggccatgaccaggagaccaccacccagggccctggggtgctgctgcccctgcccaagggggcctgcaccggctggatggccggcatccctggccaccctggccacaacggggcccctggaagagatggaagagatggcaccccaggagagaagggggagaagggggaccccggcctcatcggccccaagggggacatcggggagactggagtgcctggagctgagggcccccggggcttccctggcatccagggcaggaaaggagagcccggggagggcgcctacgtgtacagaagtgccttctctgtgggcctggagacctacgtgaccatccccaacatgcccatccgcttcaccaagatcttctacaaccagcagaaccactatgatggcagcacaggcaagttccactgcaacatccctggcctgtactactttgcctaccacatcaccgtgtacatgaaggatgtgaaggtgtccctcttcaagaaggacaaggccatgctgttcacctatgaccagtaccaggagaacaacgtggaccaggccagcggctctgtgctgctgcacctggaggtgggggaccaggtgtggctgcaggtgtatggagagggggagagaaatggcctgtatgctgacaatgacaatgacagcaccttcaccggcttcctgctgtaccatgacaccaactag

SEQ ID NO: 142945 - DNA, 735 bp, synthetic construct; identical to SEQ ID NO: 142944
  misc_feature 1..735: note = Description of Artificial Sequence: Synthetic coding sequence
  source 1..735: mol_type = other DNA

SEQ ID NO: 142946 - DNA, 735 bp, synthetic construct; identical to SEQ ID NO: 142944
  misc_feature 1..735: note = Description of Artificial Sequence: Synthetic coding sequence
  source 1..735: mol_type = other DNA

SEQ ID NO: 142947 - DNA, 1491 bp, synthetic construct
  misc_feature 1..1491: note = Description of Artificial Sequence: Synthetic coding sequence
  source 1..1491: mol_type = other DNA
atggccctgtggaggggcagcgcctatgccggcttcctggccctggccgtgggctgtgtgttcctgctggagcctgagctgcccggcagcgccctgcggagcctgtggagcagcctgtgcctgggccctgccccagcccctcctggccctgtgtccccagagggccgcctggccgccgcctgggatgccctgattgtgcggcctgtgcggcgctggaggagagtggccgtgggcgtgaatgcctgtgtggatgtggtgctgagcggcgtgaagctgctgcaggccctgggcctgagccctggaaatggcaaggaccacagcatcctgcacagcagaaatgacctggaggaggccttcatccacttcatgggcaaaggagctgctgctgagcgcttcttcagtgacaaggagaccttccatgacatcgcccaggtggccagcgagttccctggggcccagcactacgtgggcggcaatgctgccctgattggccagaagtttgctgccaacagcgacctgaaggtgctgctgtgtggccctgtgggccccaagctgcacgagctgctggatgacaacgtgtttgtgcccccagagagcctgcaggaggtggatgagttccacctgatcctggagtaccaggccggggaggagtggggccagctgaaggcccctcatgccaaccgcttcatcttcagccatgacctgagcaatggagccatgaacatgctggaggtgtttgtgagcagcctggaggagttccagcctgacctggtggtgctgagcggcctgcacatgatggagggccagagcaaggagctgcagaggaagaggctgctggaggtggtgaccagcatcagtgacatccccaccggcatccctgtgcacctggagctggcctccatgaccaaccgggagctgatgagcagcatcgtgcaccaggtgtttcctgctgtgaccagcctgggcctgaatgagcaggagctgctcttcctgacccagagcgccagcggcccccacagcagcctgagctcctggaatggagtgcctgatgtgggcatggtgtctgacatcctcttctggatcctgaaggagcacggccgcagcaagagccgggccagtgacctgacccgcatccacttccacaccctggtgtaccacatcctggccaccgtggatggccactgggccaaccagctggccgctgtggccgccggggcccgggtggccggcacccaggcctgtgccacagagaccatcgacaccagccgggtgtccctgcgggccccccaggagttcatgaccagccacagcgaggccggcagcagaattgtgctgaaccccaacaagcctgtggtggagtggcaccgggagggcatctccttccacttcacccctgtgctggtgtgcaaggaccccatcagaacagtgggcctgggagatgccatctctgctgagggcctcttctacagcgaggtgcacccccactactag

SEQ ID NO: 142948 - DNA, 1041 bp, synthetic construct
  misc_feature 1..1041: note = Description of Artificial Sequence: Synthetic coding sequence
  source 1..1041: mol_type = other DNA
atgggcaaaggagctgctgctgagcgcttcttcagtgacaaggagaccttccatgacatcgcccaggtggccagcgagttccctggggcccagcactacgtgggcggcaatgctgccctgattggccagaagtttgctgccaacagcgacctgaaggtgctgctgtgtggccctgtgggccccaagctgcacgagctgctggatgacaacgtgtttgtgcccccagagagcctgcaggaggtggatgagttccacctgatcctggagtaccaggccggggaggagtggggccagctgaaggcccctcatgccaaccgcttcatcttcagccatgacctgagcaatggagccatgaacatgctggaggtgtttgtgagcagcctggaggagttccagcctgacctggtggtgctgagcggcctgcacatgatggagggccagagcaaggagctgcagaggaagaggctgctggaggtggtgaccagcatcagtgacatccccaccggcatccctgtgcacctggagctggcctccatgaccaaccgggagctgatgagcagcatcgtgcaccagcaggtgtttcctgctgtgaccagcctgggcctgaatgagcaggagctgctcttcctgacccagagcgccagcggcccccacagcagcctgagctcctggaatggagtgcctgatgtgggcatggtgtctgacatcctcttctggatcctgaaggagcacggccgcagcaagagccgggccagtgacctgacccgcatccacttccacaccctggtgtaccacatcctggccaccgtggatggccactgggccaaccagctggccgctgtggccagcagctgtggctgggacaccggcctgcggcacaggaaccaccgccaccagcccagcgtgtctgagggcaccccccgggtgcatgacttcccctttggaggccgcctgcaggactgcatcaagcccaagcaggccagcagcaggatggcccagaggggcaacatcctgcccctgcacaccagcattggagtgtag

SEQ ID NO: 142949 - DNA, 1251 bp, synthetic construct
  misc_feature 1..1251: note = Description of Artificial Sequence: Synthetic coding sequence
  source 1..1251: mol_type = other DNA
atggccctgtggaggggcagcgcctatgccggcttcctggccctgggcctgagccctggaaatggcaaggaccacagcatcctgcacagcagaaatgacctggaggaggccttcatccacttcatgggcaaaggagctgctgctgagcgcttcttcagtgacaaggagaccttccatgacatcgcccaggtggccagcgagttccctggggcccagcactacgtgggcggcaatgctgccctgattggccagaagtttgctgccaacagcgacctgaaggtgctgctgtgtggccctgtgggccccaagctgcacgagctgctggatgacaacgtgtttgtgcccccagagagcctgcaggaggtggatgagttccacctgatcctggagtaccaggccggggaggagtggggccagctgaaggccccccacgccaaccgcttcatcttcagccatgacctgagcaatggagccatgaacatgctggaggtgtttgtgagcagcctggaggagttccagcctgacctggtggtgctgagcggcctgcacatgatggagggccagagcaaggagctgcagaggaagaggctgctggaggtggtgaccagcatcagtgacatccccaccggcatccctgtgcacctggagctggcctccatgaccaaccgggagctgatgagcagcatcgtgcaccagcaggtgtttcctgctgtgaccagcctgggcctgaatgagcaggagctgctcttcctgacccagagcgccagcggcccccacagcagcctgagctcctggaatggagtgcctgatgtgggcatggtgtctgacatcctcttctggatcctgaaggagcacggccgcagcaagagccgggccagtgacctgacccgcatccacttccacaccctggtgtaccacatcctggccaccgtggatggccactgggccaaccagctggccgctgtggccgccggggcccgggtggccggcacccaggcctgtgccacagagaccatcgacaccagccgggtgtccctgcgggccccccaggagttcatgaccagccacagcgaggccggcagcagaattgtgctgaaccccaacaagcctgtggtggagtggcaccgggagggcatctccttccacttcacccctgtgctggtgtgcaaggaccccatcagaacagtgggcctgggagatgccatctctgctgagggcctcttctacagcgaggtgcacccccactactag

SEQ ID NO: 142950 - DNA, 669 bp, synthetic construct
  misc_feature 1..669: note = Description of Artificial Sequence: Synthetic coding sequence
  source 1..669: mol_type = other DNA
atggccgccagctgccgggtggtgaccagcatcagtgacatccccaccggcatccctgtgcacctggagctggcctccatgaccaaccgggagctgatgagcagcatcgtgcaccaggtgtttcctgctgtgaccagcctgggcctgaatgagcaggagctgctcttcctgacccagagcgccagcggcccccacagcagcctgagctcctggaatggagtgcctgatgtgggcatggtgtctgacatcctcttctggatcctgaaggagcacggccgcagcaagagccgggccagtgacctgacccgcatccacttccacaccctggtgtaccacatcctggccaccgtggatggccactgggccaaccagctggccgctgtggccgccggggcccgggtggccggcacccaggcctgtgccacagagaccatcgacaccagccgggtgtccctgcgggccccccaggagttcatgaccagccacagcgaggccggcagcagaattgtgctgaaccccaacaagcctgtggtggagtggcaccgggagggcatctccttccacttcacccctgtgctggtgtgcaaggaccccatcagaacagtgggcctgggagatgccatctctgctgagggcctcttctacagcgaggtgcacccccactactag

SEQ ID NO: 142951 - DNA, 546 bp, synthetic construct
  misc_feature 1..546: note = Description of Artificial Sequence: Synthetic coding sequence
  source 1..546: mol_type = other DNA
atgggcaacatctttgccaacctcttcaagggcctgtttgggaagaaggagatgaggatcctgatggtgggcctggatgctgctgggaagaccaccatcctgtacaagctgaagctgggggagatcgtgaccaccatccccaccatcggcttcaacgtggagaccgtggagtacaagaacatctccttcaccgtgtgggatgtgggcggccaggacaagatccggcccctgtggaggcactacttccagaacacccagggcctcatctttgtggtggacagcaatgaccgggagcgggtgaatgaggcccgggaggagctgatgaggatgctggctgaagatgagctgagagatgctgtgctgctggtgtttgccaacaagcaggacctgcccaatgccatgaatgctgctgagatcacagacaagctgggcctgcacagcctgcggcacaggaactggtacatccaggccacctgtgccaccagcggagatggcctgtatgagggcctggactggctgagcaaccagctgaggaaccagaagtag

SEQ ID NO: 142952 - DNA, 546 bp, synthetic construct; identical to SEQ ID NO: 142951
  misc_feature 1..546: note = Description of Artificial Sequence: Synthetic coding sequence
  source 1..546: mol_type = other DNA

SEQ ID NO: 142953 - DNA, 546 bp, synthetic construct; identical to SEQ ID NO: 142951
  misc_feature 1..546: note = Description of Artificial Sequence: Synthetic coding sequence
  source 1..546: mol_type = other DNA

SEQ ID NO: 142954 - DNA, 519 bp, synthetic construct
  misc_feature 1..519: note = Description of Artificial Sequence: Synthetic coding sequence
  source 1..519: mol_type = other DNA
atgggcaacatctttgccaacctcttcaagggcctgtttgggaagaaggagatgaggatcctgatggtgggcctggatgctgctgggaagaccaccatcctgtacaagctgaagctgggggagatcgtgaccaccatccccaccatcggcttcaacgtggagaccgtggagtacaagaacatctccttcaccgtgtgggatgtgggcggccaggacaagatccggcccctgtggaggcactacttccagaacacccagggcctcatctttgtggtggacagcaatgaccgggagcgggtgaatgaggcccaggatgagctgagagatgctgtgctgctggtgtttgccaacaagcaggacctgcccaatgccatgaatgctgctgagatcacagacaagctgggcctgcacagcctgcggcacaggaactggtacatccaggccacctgtgccaccagcggagatggcctgtatgagggcctggactggctgagcaaccagctgaggaaccagaagtag

SEQ ID NO: 142955 - DNA, 546 bp, synthetic construct
  misc_feature 1..546: note = Description of Artificial Sequence: Synthetic coding sequence
  source 1..546: mol_type = other DNA
atgggcaacatctttggaaacctgctgaagagcctgattggcaagaaggagatgaggatcctgatggtgggcctggatgctgctgggaagaccaccatcctgtacaagctgaagctgggggagatcgtgaccaccatccccaccatcggcttcaacgtggagaccgtggagtacaagaacatctccttcaccgtgtgggatgtgggcggccaggacaagatccggcccctgtggaggcactacttccagaacacccagggcctcatctttgtggtggacagcaatgaccgggagcgggtgaatgaggcccgggaggagctgatgaggatgctggctgaagatgagctgagagatgctgtgctgctggtgtttgccaacaagcaggacctgcccaatgccatgaatgctgctgagatcacagacaagctgggcctgcacagcctgcggcacaggaactggtacatccaggccacctgtgccaccagcggagatggcctgtatgagggcctggactggctggccaaccagctgaagaacaagaagtag

SEQ ID NO: 142956 - DNA, 435 bp, synthetic construct
  misc_feature 1..435: note = Description of Artificial Sequence: Synthetic coding sequence
  source 1..435: mol_type = other DNA
atgggcaacatctttggaaacctgctgaagagcctgattggcaagaaggagatgaggatcctgatggtgggcctggatgctgctgggaagaccaccatcctgtacaagctgaagctgggggagatcgtgaccaccatccccaccatcggcctcatctttgtggtggacagcaatgaccgggagcgggtgaatgaggcccgggaggagctgatgaggatgctggccgaggatgagctgagagatgctgtgctgctggtgtttgccaacaagcaggacctgcccaatgccatgaatgctgctgagatcacagacaagctgggcctgcacagcctgcggcacaggaactggtacatccaggccacctgtgccaccagcggagatggcctgtatgagggcctggactggctggccaaccagctgaagaacaagaagtag

SEQ ID NO: 142957 - DNA, 153 bp, synthetic construct
  misc_feature 1..153: note = Description of Artificial Sequence: Synthetic coding sequence
  source 1..153: mol_type = other DNA
atgggcaacatctttggaaacctgctgaagagcctgattggcaagaaggagatgaggatcctgatggtgggcctggatgctgctgggaagaccaccatcctgtacaagctgaagctgggggagatcgtgaccaccatccccaccatcggctag

SEQ ID NO: 142958 - DNA, 309 bp, synthetic construct
  misc_feature 1..309: note = Description of Artificial Sequence: Synthetic coding sequence
  source 1..309: mol_type = other DNA
atgggcaacatctttggaaacctgctgaagagcctgattggcaagaaggagatgaggatcctgatggtgggcctggatgctgctgggaagaccaccatcctgtacaagctgaagctgggggagatcgtgaccaccatccccaccatcggcttcaacgtggagaccgtggagtacaagaacatctccttcaccgtgtgggatgtgggcggccaggacaagatccggcccctgtggaggcactacttccagaacacccagggcctcatctttgtggtggacagcaatgaccgggagcgggtgaatgaatag

SEQ ID NO: 142959 - DNA, 546 bp, synthetic construct; identical to SEQ ID NO: 142955
  misc_feature 1..546: note = Description of Artificial Sequence: Synthetic coding sequence
  source 1..546: mol_type = other DNA

SEQ ID NO: 142960 - DNA, 123 bp, synthetic construct
  misc_feature 1..123: note = Description of Artificial Sequence: Synthetic coding sequence
  source 1..123: mol_type = other DNA
atgggcaacatctttggaaacctgctgaagagcctgattggcaagaaggagatgaggatcctgatggtgggcctggatgctgctgggaagaccaccatcctgtacaagctgaagctgggctag

SEQ ID NO: 142961 - DNA, 543 bp, synthetic construct
  misc_feature 1..543: note = Description of Artificial Sequence: Synthetic coding sequence
  source 1..543: mol_type = other DNA
atgggcctgaccatcagcagcctcttcagccggctgtttgggaagaagcagatgaggatcctgatggtgggcctggatgctgctgggaagaccaccatcctgtacaagctgaagctgggggagatcgtgaccaccatccccaccatcggcttcaacgtggagaccgtggagtacaagaacatctgcttcaccgtgtgggatgtgggcggccaggaccgcatccggcccctgtggaagcactacttccagaacacccagggcctcatctttgtggtggacagcaatgaccgggagcgcatccaggaggtggctgatgagctgcagaagatgctgctggtggatgagctgagagatgctgtgctgctgctgtttgccaacaagcaggacctgcccaatgccatggccatcagcgagatgacagacaagctgggcctgcagagcctgaggaacagaacctggtacgtgcaggccacctgtgccacccagggcaccggcctgtatgagggcctggactggctgagcaatgagctgagcaagaggtag

SEQ ID NO: 142962 - DNA, 384 bp, synthetic construct
  misc_feature 1..384: note = Description of Artificial Sequence: Synthetic coding sequence
  source 1..384: mol_type = other DNA
atgggcctgaccatcagcagcctcttcagccggctgtttgggaagaagcagatgaggatcctgatggtgggcctggatgctgctgggaagaccaccatcctgtacaagctgaagctgggggagatcgtgaccaccatccccaccatcggcttcaacgtggagaccgtggagtacaagaacatctgcttcaccgtgtgggatgtgggcggccaggaccgcatccggcccctgtggaagcactacttccagaacacccagggcctcatctttgtggtggacagcaatgaccgggagcgcatccaggaggtggctgatgagctgcagaagatgctgctggtggatgagctgagagatgctgtgctgctgctgtttgccaacaagtag

SEQ ID NO: 142963 - DNA, 69 bp, synthetic construct
  misc_feature 1..69: note = Description of Artificial Sequence: Synthetic coding sequence
  source 1..69: mol_type = other DNA
atgggcctgaccatcagcagcctcttcagccggctgtttgggaagaagcagatgaggatcctgatgtag

SEQ ID NO: 142964 - DNA, 543 bp, synthetic construct
  misc_feature 1..543: note = Description of Artificial Sequence: Synthetic coding sequence
  source 1..543: mol_type = other DNA
atgggcctgactgtgtctgccctcttcagccgcatctttgggaagaagcagatgaggatcctgatggtgggcctggatgctgctgggaagaccaccatcctgtacaagctgaagctgggggagatcgtgaccaccatccccaccatcggcttcaacgtggagaccgtggagtacaagaacatctgcttcaccgtgtgggatgtgggcggccaggacaagatccggcccctgtggaggcactacttccagaacacccagggcctcatctttgtggtggacagcaatgaccgggagcgggtgcaggagagcgcagatgagctgcagaagatgctgcaggaggatgagctgagagatgctgtgctgctggtgtttgccaacaagcaggacatgcccaatgccatgcctgtgtctgagctgacagacaagctgggcctgcagcacctgcggagcaggacctggtacgtgcaggccacctgtgccacccagggcaccggcctgtatgatggcctggactggctgagccatgagctgagcaagaggtag

SEQ ID NO: 142965 - DNA, 1245 bp, synthetic construct
  misc_feature 1..1245: note = Description of Artificial Sequence: Synthetic coding sequence
  source 1..1245: mol_type = other DNA
atggccagccccaggaccaggaaggtgctgaaggaggtgcgggtgcaggatgagaacaacgtgtgctttgaatgtggggccttcaacccccagtgggtgtctgtgacctacggcatctggatctgcctggagtgcagcggccgccaccggggcctgggcgtgcacctgagctttgtgcgctctgtgaccatggacaagtggaaggacatcgagctggagaagatgaaggccggcggcaatgccaagttccgggagttcctggagagccaggaggactatgacccctgctggagcctgcaggagaagtacaacagcagagctgctgccctcttccgggacaaggtggtggccctggccgagggccgggagtggagcctggagagcagccctgcccagaactggaccccaccccagcccaggaccctgcccagcatggtgcaccgggtgtctggccagccccagagcgtgacagccagcagtgacaaggcctttgaggactggctgaatgatgacctgggcagctaccagggcgcccagggcaacagatatgtgggcttcggcaacaccccaccaccccagaagaaggaggatgacttcctgaacaatgccatgagcagcctgtacagcggctggagcagcttcaccaccggggccagcagatttgccagcgctgccaaggagggcgccaccaagtttggcagccaggccagccagaagttctggggccacaagcagcagcctgagcccgccagcgagctgggccacagcctgaatgaaaatgtgctgaagccagcccaggagaaggtgaaggagggcaagatctttgatgatgtgagcagcggcgtgtcccagctggccagcaagggcgtgggcagcaagggctggagagatgtgaccaccttcttcagcggcaaggccgagggccccctggacagccccagcgagggccacagctaccagaacagcggcctggaccacttccagaacagcaacatcgaccagagcttctgggagaccttcggcagcgctgagcccaccaagaccaggaagagccccagcagtgacagctggacctgtgccgacaccagcacagagcggcgcagcagtgacagctgggaggtgtggggcagcgccagcaccaacagaaacagcaacagtgatggaggagagggcggggagggcaccaagaaggctgtgcccccagctgtgcccacagatgatggctgggacaaccagaactggtag

SEQ ID NO: 142966 - DNA, 1212 bp, synthetic construct
  misc_feature 1..1212: note = Description of Artificial Sequence: Synthetic coding sequence
  source 1..1212: mol_type = other DNA
atggccagccccaggaccaggaaggtgctgaaggaggtgcgggtgcaggatgagaacaacgtgtgctttgaatgtggggccttcaacccccagtgggtgtctgtgacctacggcatctggatctgcctggagtgcagcggccgccaccggggcctgggcgtgcacctgagctttgtgcgctctgtgaccatggacaagtggaaggacatcgagctggagaagatgaaggccggcggcaatgccaagttccgggagttcctggagagccaggaggactatgacccctgctggagcctgcaggagaagtacaacagcagagctgctgccctcttccgggacaaggtggtggccctggccgagggccgggagtggagcctggagagcagccctgcccagaactggaccccaccccagcccaggaccctgcccagcatggtgcaccgggtgtctggccagccccagagcgtgacagccagcagtgacaaggcctttgaggactggctgaatgatgacctgggcagctaccagggcgcccagggcaacagatatgtgggcttcggcaacaccccaccaccccagaagaaggaggatgacttcctgaacaatgccatgagcagcctgtacagcggctggagcagcttcaccaccggggccagcagatttgccagcgctgccaaggagggcgccaccaagtttggcagccaggccagccagaaggccagcgagctgggccacagcctgaatgaaaatgtgctgaagccagcccaggagaaggtgaaggagggcaagatctttgatgatgtgagcagcggcgtgtcccagctggccagcaagtgccagaggcggctgtgctgccaccagagccactgcagcgctggccacctgggccgggccttctgccctgtgtcctggcatgaggccctgtgtggccagacaggccgggaggagcaggccagcctgctgccccccaagcacgtggtgggcgccctggaggtgtgtgcccggggctgcccccgctgccacgtgccccacaccccaggcacagctgctgagtggccaggccgcctgtgcctgagccgggagagcgtggtgagagatggcggcaccagcccccccttcttccggggcaagcagagggccccctggacagccccccggcgggccaccgtcatcagaacagctgtgtggaccaccagcaagacagccacctag

SEQ ID NO: 142967 - DNA, 1221 bp, synthetic construct
  misc_feature 1..1221: note = Description of Artificial Sequence: Synthetic coding sequence
  source 1..1221: mol_type = other DNA
atggccagccccaggaccaggaaggtgctgaaggaggtgcgggtgcaggatgagaacaacgtgtgctttgaatgtggggccttcaacccccagtgggtgtctgtgacctacggcatctggatctgcctggagtgcagcggccgccaccggggcctgggcgtgcacctgagctttgtgcgctctgtgaccatggacaagtggaaggacatcgagctggagaagatgaaggccggcggcaatgccaagttccgggagttcctggagagccaggaggactatgacccctgctggagcctgcaggagaagtacaacagcagagctgctgccctcttccgggacaaggtggtggccctggccgagggccgggagtggagcctggagagcagccctgcccagaactggaccccaccccagcccaggaccctgcccagcatggtgcaccgggtgtctggccagccccagagcgtgacagccagcagtgacaaggcctttgaggactggctgaatgatgacctgggcagctaccagggcgcccagggcaacagatatgtgggcttcggcaacaccccaccaccccagaagaaggaggatgacttcctgaacaatgccatgagcagcctgtacagcggctggagcagcttcaccaccggggccagcagatttgccagcgctgccaaggagggcgccaccaagtttggcagccaggccagccagaaggccagcgagctgggccacagcctgaatgaaaatgtgctgaagccagcccaggagaaggtgaaggagggcaagatctttgatgatgtgagcagcggcgtgtcccagctggccagcaaggtgcagggcgtgggcagcaagggctggagagatgtgaccaccttcttcagcggcaaggccgagggccccctggacagccccagcgagggccacagctaccagaacagcggcctggaccacttccagaacagcaacatcgaccagagcttctgggagaccttcggcagcgctgagcccaccaagaccaggaagagccccagcagtgacagctggacctgtgccgacaccagcacagagcggcgcagcagtgacagctgggaggtgtggggcagcgccagcaccaacagaaacagcaacagtgatggaggagagggcggggagggcaccaagaaggctgtgcccccagctgtgcccacagatgatggctgggacaaccagaactggtag

SEQ ID NO: 142968 - DNA, 882 bp, synthetic construct
  misc_feature 1..882: note = Description of Artificial Sequence: Synthetic coding sequence
  source 1..882: mol_type = other DNA
atgctgagcagcgagagctcctggagcctgcggcgcatcaccatcctggccggcccctgcagaagaagcaccacagctgagccccggcccagcctgggcatccgggtgtctggccagccccagagcgtgacagccagcagtgacaaggcctttgaggactggctgaatgatgacctgggcagctaccagggcgcccagggcaaccgctacgtgggctttggaaacaccccaccaccccagaagaaggaggatgacttcctgaacaatgccatgagcagcctgtacagcggctggagcagcttcaccactggagccagcagatttgccagcgctgccaaggagggcgccaccaagtttggcagccaggccagccagaaggccagcgagctgggccacagcctgaatgaaaatgtgctgaagccagcccaggagaaggtgaaggagggcaagatctttgatgatgtgtcctctggagtgtcccagctggccagcaaggtgcagggcgtgggcagcaagggctggagagatgtgaccaccttcttcagcggcaaggccgagggccccctggacagccccagcgagggccacagctaccagaacagcggcctggaccacttccagaacagcaacatcgaccagagcttctgggagacctttggatctgctgagcccaccaagaccaggaagagccccagcagtgacagctggacctgtgccgacaccagcacagaaagaagaagcagtgacagctgggaggtgtggggcagcgccagcaccaacagaaacagcaacagtgatggaggagagggcggggagggcaccaagaaggctgtgcccccagctgtgcccacagatgatggctgggacaaccagaactggtag

SEQ ID NO: 142969 - DNA, 1086 bp, synthetic construct
  misc_feature 1..1086: note = Description of Artificial Sequence: Synthetic coding sequence
  source 1..1086: mol_type = other DNA
atgaggaccacctttgtgcgctctgtgaccatggacaagtggaaggacatcgagctggagaagatgaaggccggcggcaatgccaagttccgggagttcctggagagccaggaggactatgacccctgctggagcctgcaggagaagtacaacagcagagctgctgccctcttccgggacaaggtggtggccctggccgagggccgggagtggagcctggagagcagccctgcccagaactggaccccaccccagcccaggaccctgcccagcatggtgcaccgggtgtctggccagccccagagcgtgacagccagcagtgacaaggcctttgaggactggctgaatgatgacctgggcagctaccagggcgcccagggcaaccgctacgtgggctttggaaacaccccaccaccccagaagaaggaggatgacttcctgaacaatgccatgagcagcctgtacagcggctggagcagcttcaccactggagccagcagatttgccagcgctgccaaggagggcgccaccaagtttggcagccaggccagccagaagttctggggccacaagcagcagcctgagcccgccagcgagctgggccacagcctgaatgaaaatgtgctgaagccagcccaggagaaggtgaaggagggcaagatctttgatgatgtgtcctctggagtgtcccagctggccagcaaaggagtgggcagcaagggctggagagatgtgaccaccttcttcagcggcaaggccgagggccccctggacagccccagcgagggccacagctaccagaacagcggcctggaccacttccagaacagcaacatcgaccagagcttctgggagacctttggatctgctgagcccaccaagaccaggaagagccccagcagtgacagctggacctgtgccgacaccagcacagaaagaagaagcagtgacagctgggaggtgtggggcagcgccagcaccaacagaaacagcaacagtgatggaggagagggcggggagggcaccaagaaggctgtgcccccagctgtgcccacagatgatggctgggacaaccagaactggtag

SEQ ID NO: 142970 - DNA, 786 bp, synthetic construct
  misc_feature 1..786: note = Description of Artificial Sequence: Synthetic coding sequence
  source 1..786: mol_type = other DNA
atggccagccccaggaccaggaaggtgctgaaggaggtgcgggtgcaggatgagaacaacgtgtgctttgaatgtggggccttcaacccccagtgggtgtctgtgacctacggcatctggatctgcctggagtgcagcggccgccaccggggcctgggcgtgcacctgagctttgtgcgctctgtgaccatggacaagtggaaggacatcgagctggagaagatgaaggccggcggcaatgccaagttccgggagttcctggagagccaggaggactatgacccctgctggagcctgcaggagaagtacaacagcagagctgctgccctcttccgggacaaggtggtggccctggccgagggccgggagtggagcctggagagcagccctgcccagaactggaccccaccccagcccaggaccctgcccagcatggtgcaccgggtgtctggccagccccagagcgtgacagccagcagtgacaaggcctttgaggactggctgaatgatgacctgggcagctaccagggcgcccagggcaacagatatgtgggcttcggcaacaccccaccaccccagaagaaggaggatgacttcctgaacaatgccatgagcagcctgtacagcggctggagcagcttcaccaccggggccagcagatttgccagcgctgccaaggagggcgccaccaagtttggcagccaggccagccagaaggccagcgagctgggccacagcctgaatgaaaatgtgctgaagccagcccaggagaaggtgaaggagtag

SEQ ID NO: 142971 - DNA, 240 bp, synthetic construct
  misc_feature 1..240: note = Description of Artificial Sequence: Synthetic coding sequence
  source 1..240: mol_type = other DNA
atggccagccccaggaccaggaaggtgctgaaggaggtgcgggtgcaggatgagaacaacgtgtgctttgaatgtggggccttcaacccccagtgggtgtctgtgacctacggcatctggatctgcctggagtgcagcggccgccaccggggcctgggcgtgcacctgagctttgtgcgctctgtgaccatggacaagtggaaggacatcgagctggagaagatgaaggccggcggctag

SEQ ID NO: 142972 - DNA, 369 bp, synthetic construct
  misc_feature 1..369: note = Description of Artificial Sequence: Synthetic coding sequence
  source 1..369: mol_type = other DNA
atggccagccccaggaccaggaaggtgctgaaggaggtgcgggtgcaggatgagaacaacgtgtgctttgaatgtggggccttcaacccccagtgggtgtctgtgacctacggcatctggatctgcctggagtgcagcggccgccaccggggcctgggcgtgcacctgagctttgtgcgctctgtgaccatggacaagtggaaggacatcgagctggagaagatgaaggccggcggcaatgccaagttccgggagttcctggagagccaggaggactatgacccctgctggagcctgcaggagaagtacaacagcagagctgctgccctcttccgggacaaggtggtggccctggccgagggccgctag

SEQ ID NO: 142973 - DNA, 759 bp, synthetic construct
  misc_feature 1..759: note = Description of Artificial Sequence: Synthetic coding sequence
  source 1..759: mol_type = other DNA
atggtggcctccatgaggctggcctaccaggagctgcagattgacaggaagaaggaggagaagaagctgcagaacctggagggcaagaagcgggagcaggccgagcggctgggcatgggcctggtgagccgcagctctgtgagccacagcgtgctgtctgagatgcaggtgattgagcaggagacccctgtgtctgccaagagcagccgcagccagctggacctgtttgatgatgtgggcacctttgccagcggcccccccaagtacaaggacaaccccttcagcctgggggagagctttggcagccgctgggacacagatgctgcctggggcatggacagagtggaggagaaggagcctgaggtgaccatcagcagcatccggcccatcagcgagcgggccaccaacagaagagaggtggagagccgcagcagcggcctggagagcagcgaggcccggcagaagtttgctggggccaaggccatcagcagtgacatgttcttcggccgggaggtggatgctgaatatgaggcccggagccggctgcagcagctgagcggcagcagcgccatcagcagcagtgacctgtttggagacatggatggagcccacggggccggctctgtgtccctgggcaatgtgctgcccacagctgacatcgcccagttcaagcagggcgtgaagtctgtggccggcaagatggctgtgctggccaatggagtgatgaacagcctgcaggacagatatggcagctactag

SEQ ID NO: 142974 - DNA, 1245 bp, synthetic construct
  misc_feature 1..1245: note = Description of Artificial Sequence: Synthetic coding sequence
  source 1..1245: mol_type = other DNA
atgcaggtgggcggcaatgccaatgccacagccttcttccggcagcacggctgcacagccaatgatgccaacaccaagtacaacagcagagctgcccagatgtaccgggagaagatccggcagctgggcagcgctgccctggcccggcacggcacagaccccccagcctgggatgccccagccacagagcccagcggcacccagcagcctgcccccagcacagagagcagcggcctggcccagcctgagcacggccccaacacagacctgctgggcaccagccccaaggccagcctggagctgaagagcagcatcatcggcaagaagaagccagctgctgccaagaagggcctgggcgccaagaagggcctgggcgcccagaaggtgagcagccagagcttcagcgagattgagcggcaggcccaggtggccgagaagctgcgggagcagcaggccgcagatgccaagaagcaggccgaggagagcatggtggcctccatgaggctggcctaccaggagctgcagattgacaggaagaaggaggagaagaagctgcagaacctggagggcaagaagcgggagcaggccgagcggctgggcatgggcctggtgagccgcagctctgtgagccacagcgtgctgtctgagatgcaggtgattgagcaggagacccctgtgtctgccaagagcagccgcagccagctggacctgtttgatgatgtgggcacctttgccagcggcccccccaagtacaaggacaaccccttcagcctgggggagagctttggcagccgctgggacacagatgctgcctggggcatggacagagtggaggagaaggagcctgaggtgaccatcagcagcatccggcccatcagcgagcgggccaccaacagaagagaggtggagagccgcagcagcggcctggagagcagcgaggcccggcagaagtttgctggggccaaggccatcagcagtgacatgttcttcggccgggaggtggatgctgaatatgaggcccggagccggctgcagcagctgagcggcagcagcgccatcagcagcagtgacctgtttggagacatggatggagcccacggggccggctctgtgtccctgggcaatgtgctgcccacagctgacatcgcccagttcaagcagggcgtgaagtctgtggccggcaagatggctgtgctggccaatggagtgatgaacagcctgcaggacagatatggcagctactag

SEQ ID NO: 142975 - DNA, 1158 bp, synthetic construct
  misc_feature 1..1158: note = Description of Artificial Sequence: Synthetic coding sequence
  source 1..1158: mol_type = other DNA
atggctgctgagcccaacaagacagagatccagaccctcttcaagaggctgcgggctgtgcccaccaacaaggcctgctttgactgtggggccaagaaccccagctgggccagcatcacctatggagtcttcctgtgcatcgactgcagcggcgtgcacaggagcctgggcgtgcacctgtccttcatccgcagcacagagctggacagcaactggaactggttccagctgcgctgcatgcaggtgggcggcaatgccaatgccctgggcgccaagaagggcctgggcgcccagaaggtgagcagccagagcttcagcgagattgaaaggcaggcccaggtggccgagaagctgcgggagcagcaggccgcagatgccaagaagcaggccgaggagagcatggtggcctccatgaggctggcctaccaggagctgcagattgacaggaagaaggaggagaagaagctgcagaacctggagggcaagaagcgggagcaggccgagcggctgggcatgggcctggtgagccgcagctctgtgagccacagcgtgctgtctgagatgcaggtgattgagcaggagacccctgtgtctgccaagagcagccgcagccagctggacctgtttgatgatgtgggcacctttgccagcggcccccccaagtacaaggacaaccccttcagcctgggggagagctttggcagccgctgggacacagatgctgcctggggcatggacagagtggaggagaaggagcctgaggtgaccatcagcagcatccggcccatcagcgagcgggccaccaacagaagagaggtggagagccgcagcagcggcctggagagcagcgaggcccggcagaagtttgctggggccaaggccatcagcagtgacatgttcttcggccgggaggtggatgctgaatatgaggcccggagccggctgcagcagctgagcggcagcagcgccatcagcagcagtgacctgtttggagacatggatggagcccatggagctggctctgtgtccctgggcaatgtgctgcccacagctgacatcgcccagttcaagcagggcgtgaagtctgtggccggcaagatggctgtgctggccaacggggtgatgaacagcctgcaggacagatatggcagctactag

SEQ ID NO: 142976 - DNA, 1566 bp, synthetic construct
  misc_feature 1..1566: note = Description of Artificial Sequence: Synthetic coding sequence
  source 1..1566: mol_type = other DNA
atggctgctgagcccaacaagacagagatccagaccctcttcaagaggctgcgggctgtgcccaccaacaaggcctgctttgactgtggggccaagaaccccagctgggccagcatcacctatggagtcttcctgtgcatcgactgcagcggcgtgcacaggagcctgggcgtgcacctgtccttcatccgcagcacagagctggacagcaactggaactggttccagctgcgctgcatgcaggtgggcggcaatgccaatgccacagccttcttccggcagcacggctgcacagccaatgatgccaacaccaagtacaacagccgggccgcccagatgtaccgggagaagatccggcagctgggcagcgctgccctggcccggcatggaacagacctgtggattgacaacatgagcagcgctgtgcccaaccacagccctgagaagaaggacagcgacttcttcacagagcacacccagcccccagcctgggatgccccagccacagagcccagcggcacccagcagcctgcccccagcacagagagcagcggcctggcccagcctgagcacggccccaacacagacctgctgggcaccagccccaaggccagcctggagctgaagagcagcatcatcggcaagaagaagccagctgctgccaagaagggcctgggcgccaagaagggcctgggcgcccagaaggtgagcagccagagcttcagcgagattgaaaggcaggcccaggtggccgagaagctgcgggagcagcaggccgcagatgccaagaagcaggccgaggagagcatggtggcctccatgaggctggcctaccaggagctgcagattgacaggaagaaggaggagaagaagctgcagaacctggagggcaagaagcgggagcaggccgagcggctgggcatgggcctggtgagccgcagctctgtgagccacagcgtgctgtctgagatgcaggtgattgagcaggagacccctgtgtctgccaagagcagccgcagccagctggacctgtttgatgatgtgggcacctttgccagcggcccccccaagtacaaggacaaccccttcagcctgggggagagctttggcagccgctgggacacagatgctgcctggggcatggacagagtggaggagaaggagcctgaggtgaccatcagcagcatccggcccatcagcgagcgggccaccaacagaagagaggtggagagccgcagcagcggcctggagagcagcgaggcccggcagaagtttgctggggccaaggccatcagcagtgacatgttcttcggccgggaggtggatgctgaatatgaggcccggagccggctgcagcagctgagcggcagcagcgccatcagcagcagtgacctgtttggagacatggatggagcccatggagctggctctgtgtccctgggcaatgtgctgcccacagctgacatcgcccagttcaagcagggcgtgaagtctgtggccggcaagatggctgtgctggccaacggggtgatgaacagcctgcaggacagatatggcagctactag

SEQ ID NO: 142977 - DNA, 1551 bp, synthetic construct
  misc_feature 1..1551: note = Description of Artificial Sequence: Synthetic coding sequence
  source 1..1551: mol_type = other DNA
atgggagaccccagcaagcaggacatcctgaccatcttcaagaggctgcggtctgtgcccaccaacaaggtgtgctttgactgtggggccaagaaccccagctgggccagcatcacctacggcgtcttcctgtgcatcgactgcagcggcagccacaggagcctgggcgtgcacctgtccttcatccgcagcacagagctggacagcaactggagctggttccagctgcgctgcatgcaggtgggcggcaatgccagcgccagcagcttcttccaccagcacggctgcagcaccaatgacaccaatgccaagtacaacagcagagctgcccagctgtaccgggagaagatcaagagcctggccagccaggccaccaggaagcacggcacagacctgtggctggacagctgtgtggtgccccccctgagccccccacccaaggaggaggacttctttgccagccacgtgtccccagaggtgtctgacacagcctgggccagcgccatcgccgagcccagcagcctgaccagcaggcctgtggagaccaccctggagaacaatgaaggaggccaggagcagggccccagcgtggagggcctgaatgtgcccaccaaggccaccctggaggtgagcagcatcatcaagaagaagcccaaccaggccaagaagggcctgggcgccaagaagggcagcctgggcgcccagaagctggccaacacctgcttcaatgaaattgagaagcaggcccaggccgctgacaagatgaaggagcaggaggacctggccaaggtggtgtccaaggaggagagcatcgtgagcagcctgcggctggcctacaaggacctggagatccagatgaagaaggatgagaagatgaacatcagcggcaagaagaatgtggacagcgaccggctgggcatgggctttggaaactgccgcagcgtcatcagccacagcgtgaccagtgacatgcagaccatcgagcaggagagccccatcatggccaagcccaggaagaagtacaatgatgacagtgatgacagctacttcaccagcagcagcagctactttgatgagcctgtggagctgcggagcagcagcttcagctcctgggatgacagcagtgacagctactggaagaaggagaccagcaaggacacagaaacagtgctgaagaccaccggctacagcgaccggcccacagcccggaggaagccagactatgagcctgtggagaacacagatgaggcccagaagaagtttggaaatgtgaaggccatcagcagtgacatgtacttcggccggcagagccaggccgactatgagacccgggcccggctggagcggctgagcgccagcagcagcatcagcagcgctgacctgtttgaggagcccaggaagcagcctgctggcaactacagcctgagctctgtgctgcccaatgccccagacatggcccagttcaagcagggcgtgcgctctgtggccggcaagctgtctgtgtttgccaacggggtggtgaccagcatccaggacagatatggcagctag

SEQ ID NO: 142978 - DNA, 1335 bp, synthetic construct
  misc_feature 1..1335: note = Description of Artificial Sequence: Synthetic coding sequence
  source 1..1335: mol_type = other DNA
atgggagaccccagcaagcaggacatcctgaccatcttcaagaggctgcggtctgtgcccaccaacaaggtgtgctttgactgtggggccaagaaccccagctgggccagcatcacctacggcgtcttcctgtgcatcgactgcagcggcagccacaggagcctgggcgtgcacctgtccttcatccgcagcacagagctggacagcaactggagctggttccagctgcgctgcatgcaggtgggcggcaatgccagcgctgtgtctgacacagcctgggccagcgccatcgccgagcccagcagcctgaccagcaggcctgtggagaccaccctggagaacaatgaaggaggccaggagcagggccccagcgtggagggcctgaatgtgcccaccaaggccaccctggaggtgagcagcatcatcaagaagaagcccaaccaggccaagaagggcctgggcgccaagaagggcagcctgggcgcccagaagctggccaacacctgcttcaatgaaattgagaagcaggcccaggccgctgacaagatgaaggagcaggaggacctggccaaggtggtgtccaaggaggagagcatcgtgagcagcctgcggctggcctacaaggacctggagatccagatgaagaaggatgagaagatgaacatcagcggcaagaagaatgtggacagcgaccggctgggcatgggctttggaaactgccgcagcgtcatcagccacagcgtgaccagtgacatgcagaccatcgagcaggagagccccatcatggccaagcccaggaagaagtacaatgatgacagtgatgacagctacttcaccagcagcagcagctactttgatgagcctgtggagctgcggagcagcagcttcagctcctgggatgacagcagtgacagctactggaagaaggagaccagcaaggacacagaaacagtgctgaagaccaccggctacagcgaccggcccacagcccggaggaagccagactatgagcctgtggagaacacagatgaggcccagaagaagtttggaaatgtgaaggccatcagcagtgacatgtacttcggccggcagagccaggccgactatgagacccgggcccggctggagcggctgagcgccagcagcagcatcagcagcgctgacctgtttgaggagcccaggaagcagcctgctggcaactacagcctgagctctgtgctgcccaatgccccagacatggcccagttcaagcagggcgtgcgctctgtggccggcaagctgtctgtgtttgccaacggggtggtgaccagcatccaggacagatatggcagctag

SEQ ID NO: 142979 - DNA, 1419 bp, synthetic construct
  misc_feature 1..1419: note = Description of Artificial Sequence: Synthetic coding sequence
  source 1..1419: mol_type = other DNA
atgggagaccccagcaagcaggacatcctgaccatcttcaagaggctgcggtctgtgcccaccaacaaggtgtgctttgactgtggggccaagaaccccagctgggccagcatcacctacggcgtcttcctgtgcatcgactgcagcggcagccacaggagcctgggcgtgcacctgtccttcatccgcagcacagagctggacagcaactggagctggttccagctgcgctgcatgcaggtgggcggcaatgccagcgccctgtggctggacagctgtgtggtgccccccctgagccccccacccaaggaggaggacttctttgccagccacgtgtccccagaggtgtctgacacagcctgggccagcgccatcgccgagcccagcagcctgaccagcaggcctgtggagaccaccctggagaacaatgaaggaggccaggagcagggccccagcgtggagggcctgaatgtgcccaccaaggccaccctggaggtgagcagcatcatcaagaagaagcccaaccaggccaagaagggcctgggcgccaagaagggcagcctgggcgcccagaagctggccaacacctgcttcaatgaaattgagaagcaggcccaggccgctgacaagatgaaggagcaggaggacctggccaaggtggtgtccaaggaggagagcatcgtgagcagcctgcggctggcctacaaggacctggagatccagatgaagaaggatgagaagatgaacatcagcggcaagaagaatgtggacagcgaccggctgggcatgggctttggaaactgccgcagcgtcatcagccacagcgtgaccagtgacatgcagaccatcgagcaggagagccccatcatggccaagcccaggaagaagtacaatgatgacagtgatgacagctacttcaccagcagcagcagctactttgatgagcctgtggagctgcggagcagcagcttcagctcctgggatgacagcagtgacagctactggaagaaggagaccagcaaggacacagaaacagtgctgaagaccaccggctacagcgaccggcccacagcccggaggaagccagactatgagcctgtggagaacacagatgaggcccagaagaagtttggaaatgtgaaggccatcagcagtgacatgtacttcggccggcagagccaggccgactatgagacccgggcccggctggagcggctgagcgccagcagcagcatcagcagcgctgacctgtttgaggagcccaggaagcagcctgctggcaactacagcctgagctctgtgctgcccaatgccccagacatggcccagttcaagcagggcgtgcgctctgtggccggcaagctgtctgtgtttgccaacggggtggtgaccagcatccaggacagatatggcagctag

SEQ ID NO: 142980 - DNA, 822 bp, synthetic construct
  misc_feature 1..822: note = Description of Artificial Sequence: Synthetic coding sequence
  source 1..822: mol_type = other DNA
tgactggccctcttccaggtgtctgacacagcctgggccagcgccatcgccgagcccagcagcctgaccagcaggcctgtggagaccaccctggagaacaatgaaggaggccaggagcagggccccagcgtggagggcctgaatgtgcccaccaaggccaccctggaggtgagcagcatcatcaagaagaagcccaaccaggccaagaagggcctgggcgccaagaagggcagcctgggcgcccagaagctggccaacacctgcttcaatgaaattgagaagcaggcccaggccgctgacaagatgaaggagcaggaggacctggccaaggtggtgtccaaggaggagagcatcgtgagcagcctgcggctggcctacaaggacctggagatccagatgaagaaggatgagaagatgaacatcagcggcaagaagaatgtggacagcgaccggctgggcatgggcttcggcaactgccgcagcgtcatcagccacagcgtgaccagtgacatgcagaccatcgagcaggagagccccatcatggccaagcccaggaagaagtacaatgatgacagtgatgacagctacttcaccagcagcagccggcccacagcccggaggaagccagactatgagcctgtggagaacacagatgaggcccagaagaagtttggaaatgtgaaggccatcagcagtgacatgtacttcggccggcagagccaggccgactatgagacccgggcccggctggagcggctgagcgccagcagcagcatcagcagcgctgacctgtttgaggagcccaggaagcagcctgcctag

SEQ ID NO: 142981 - DNA, 459 bp, synthetic construct
  misc_feature 1..459: note = Description of Artificial Sequence: Synthetic coding sequence
  source 1..459: mol_type = other DNA
atgggagaccccagcaagcaggacatcctgaccatcttcaagaggctgcggtctgtgcccaccaacaaggtgtgctttgactgtggggccaagaaccccagctgggccagcatcacctacggcgtcttcctgtgcatcgactgcagcggcagccacaggagcctgggcgtgcacctgtccttcatccgcagcacagagctggacagcaactggagctggttccagctgcgctgcatgcaggtgggcggcaatgccagcgctgtgtctgacacagcctgggccagcgccatcgccgagcccagcagcctgaccagcaggcctgtggagaccaccctggagaacaatgaaggaggccaggagcagggccccagcgtggagggcctgaatgtgcccaccaaggccaccctggaggtgagcagcatcatcaagaagaagcccaaccaggccaagaagggctag

SEQ ID NO: 142982 - DNA, 5550 bp, synthetic construct
  misc_feature 1..5550: note = Description of Artificial Sequence: Synthetic coding sequence
  source 1..5550: mol_type = other DNA
atgtatgagggcaagaagaccaagaacatgttcctgacccgggccctggagaagatcctggccgacaaggaggtgaagaaggcccaccacagccagctgaggaaggcctgtgaggtggccctggaggagatcaaggccgagacagagaagcagagcccccctcatggagaggccaaggccggcagcagcaccctgccccctgtgaagagcaagaccaacttcattgaagctgacaagtacttcctgccctttgagctggcctgccagagcaaatgtcccagaattgtgtccaccagcctggactgcctgcagaagctgattgcctacggccacctgactggaaatgccccagacagcaccacccctgggaagaagctgattgaccgcatcatcgagaccatctgtggctgcttccagggcccccagacagatgagggcgtgcagctgcagatcatcaaggccctgctgacagctgtgaccagccagcacatcgagatccacgagggcaccgtgctgcaggccgtgaggacctgctacaacatctacctggccagcaagaacctgatcaaccagaccacagccaaggccaccctgacccagatgctgaatgtcatctttgccaggatggagaaccaggccctgcaggaggccaagcagatggagaaggagcggcaccggcagcaccaccacctgctgcagagccctgtgagccaccacgagcctgagagcccccagctgcgctacctgcccccccagacagtggaccacatcagccaggagcatgaaggagacctggacctgcacaccaatgatgtggacaagagcctgcaggatgacacagagccagaaaatggaagtgacatcagcagcgcagaaaatgagcagacagaggccgaccaggccacagctgctgagaccctgagcaagaatgaggtgctgtatgatggagaaaatcatgactgtgaggagaagccccaggacatcgtgcagaacatcgtggaggagatggtgaacatcgtggtgggggacatgggagagggcaccaccatcaatgccagcgcagatggcaacatcggcaccattgaagatggcagtgacagcgagaacatccaggccaacggcatccctggcacccccatctctgtggcctacacccccagcctgcctgatgaccggctgtctgtgagcagcaatgacacccaggagagcggcaacagcagcggccccagccctggggccaagttcagccacatcctgcagaaggatgccttcctggtgttccgcagcctgtgcaagctgtccatgaagcccctgagtgatggccccccagaccccaagagccatgagctgcggagcaagatcctgagcctgcagctgctgctgagcatcctgcagaatgccggccccatcttccgcaccaatgagatgttcatcaatgccatcaagcagtacctgtgtgtggccctgagcaagaatggagtgtcctctgtgcctgaggtgtttgagctgagcctgagcatcttcctgaccctgctgagcaacttcaagacccacctgaagatgcagatcgaggtgttcttcaaggagatcttcctgtacatcctggagaccagcaccagcagctttgaccacaagtggatggtgatccagaccctgacccgcatctgtgctgatgcccagagcgtggtggacatctacgtgaactatgactgtgacctgaatgctgccaacatctttgagcggctggtgaatgacctgagcaagatcgcccagggccggggcagccaggagctgggcatgagcaatgtgcaggagctgagcctgaggaagaagggcctggagtgcctggtgtccatcctgaagtgcatggtggagtggagcaaggaccagtatgtgaaccccaacagccagaccaccctgggccaggagaagcccagcgagcaggagatgtctgagatcaagcaccctgagaccatcaacagatatggcagcctgaacagcctggagagcaccagcagcagcggcatcggcagctacagcacccagatgagcggcacagacaaccctgagcagtttgaggtgctgaagcagcagaaggagatcatcgagcagggcatcgacctcttcaacaagaagcccaagaggggcatccagtacctgcaggagcagggcatgctgggcaccaccccagaagatattgcccagttcctgcaccaggaggagcggctggacagcacccaggtgggggagttcctgggggacaatgacaagttcaacaaggaggtgatgtatgcctacgtggaccagcacgacttcagcggcaaggactttgtgtctgccctgaggatgttcctggagggcttccggctgcctggagaggcccagaagattgaccggctgatggagaagtttgctgcccgctacctggagtgcaaccagggccagaccctgtttgccagcgctgacacagcctacgtgctggcctacagcatcatcatgctgaccacagacctgcacagcccccaggtgaagaacaagatgaccaaggagcagtacatcaagatgaacagaggcatcaatgacagcaaggacctgcctgaggagtacctgagcgccatctacaatgaaattgctgggaagaagatctccatgaaggagaccaaggagctgaccatccccaccaagagcagcaagcagaatgtggccagcgagaagcagaggcggctgctgtacaacctggagatggagcagatggccaagacagccaaggccctgatggaggccgtgagccacgtgcaggcccccttcaccagcgccacccacctggagcacgtgcggcccatgttcaagctggcctggacccccttcctggccgccttctctgtgggcctgcaggactgtgatgacacagaggtggccagcctgtgcctggagggcatccgctgtgccatccgcatcgcctgcatcttcagcatccagctggagagagatgcctacgtgcaggccctggcccgcttcaccctgctgactgtgagcagcggcatcacagagatgaagcagaagaacatcgacaccatcaagaccctcatcaccgtggcccacacagatggcaactacctgggcaacagctggcatgagatcctgaagtgcatcagccagctggagctggcccagctgattggcaccggggtgaagccccgctacatcagcggcaccgtgcggggccgggagggcagcctgaccggcaccaaggaccaggccccagatgaatttgtgggcctgggcctggtgggcggcaatgtggactggaagcagatcgccagcatccaggagagcattggagagaccagcagccagagcgtggtggtggccgtggaccgcatcttcaccggcagcacccggctggatggaaatgccatcgtggactttgtgcgctggctgtgtgctgtgtccatggatgagctgctgagcaccacccaccccaggatgttcagcctgcagaagatcgtggagatctcctactacaacatgggccgcatccggctgcagtggagccgcatctgggaggtgattggagaccacttcaacaaggtgggctgcaaccccaatgaagatgtggccatctttgctgtggacagcctgcggcagctgtccatgaagttcctggagaagggggagctggccaacttccgcttccagaaggacttcctgcggccctttgagcacatcatgaagaggaacagaagccccaccatccgggacatggtggtgcgctgcatcgcccagatggtgaacagccaggccgccaacatccgcagcggctggaagaacatcttcagcgtcttccacctggccgccagtgaccaggatgagagcatcgtggagctggccttccagaccaccggccacatcgtgaccctggtgtttgagaagcacttccctgccaccatcgacagcttccaggatgctgtgaagtgcctgtctgaatttgcctgcaatgctgccttcccagacacctccatggaggccatccgcctcatccgccactgtgccaagtatgtgtctgaccggccccaggccttcaaggagtacaccagtgatgacatgaatgtggcccctgaggacagagtgtgggtgcggggctggttccccatcctgtttgagctgagctgcatcatcaaccgctgcaagctggatgtgaggacccggggcctgactgtgatgtttgagatcatgaagacctacggccacacctatgagaagcactggtggcaggacctcttccgcatcgtgttccgcatctttgacaacatgaagctgcctgagcagcagacagagaaggccgagtggatgaccaccacctgcaaccacgccctgtatgccatctgtgatgtgttcacccagtacctggaggtgctgagtgatgtgctgctggatgacatctttgcccagctgtactggtgtgtgcagcaggacaatgagcagctggcccggagcggcaccaactgcctggagaatgtggtgatcctgaatggagagaagttcaccctggagatctgggacaagacctgcaactgcaccctggacatcttcaagaccaccatcccccacgccctgctgacctggaggcccaacagcggggagacagcccctcctccacccagccctgtgtctgagaagcccctggacaccatcagccagaagtctgtggacatccatgacagcatccagcccaggtctgtggacaaccggccccaggcccccctggtgtctgccagcgctgtgaatgaggaggtgtccaagatcaagagcacagccaagtttcctgagcagaagctgtttgctgccctgctgatcaagtgtgtggtgcagctggagctgatccagaccatcgacaacatcgtgttcttccctgccaccagcaagaaggaggatgctgagaacctggccgccgcccagagagatgctgtggactttgatgtgcgggtggacacccaggaccagggcatgtaccgcttcctgaccagccagcagctgttcaagctgctggactgcctgctggagagccacagatttgccaaggccttcaacagcaacaatgagcagaggacagccctgtggaaggccggcttcaagggcaagagcaagcccaacctgctgaagcaggagaccagcagcctggcctgtggcctgcgcatcctcttcaggatgtacatggatgagagccgggtgtctgcctgggaggaggtgcagcagaggctgctgaatgtgtgcagcgaggccctgagctacttcctgaccctgaccagcgagagccaccgggaggcctggaccaacctgctgctgctcttcctgaccaaggtgctgaagatcagtgacaaccgcttcaaggcccacgccagcttctactaccccctgctgtgtgagatcatgcagtttgacctgatccctgagctgcgggctgtgctgcggcgcttcttcctgcgcatcggcgtggtgttccagatcagccagcccccagagcaggagctgggcatcaacaagcagtag

SEQ ID NO: 142983 - DNA, 5358 bp, synthetic construct
  misc_feature 1..5358: note = Description of Artificial Sequence: Synthetic coding sequence
  source 1..5358: mol_type = other DNA
atgcaggagagccagaccaagtccatgtttgtgtcccgggccctggagaagatcctggccgacaaggaggtgaagaggccccagcacagccagctgcggcgggcctgccaggtggccctggatgagatcaaggccgagattgagaagcagaggctgggcacagctgccccacccaaggccaacttcattgaagctgacaagtacttcctgccctttgagctggcctgccagagcaagagcccccgggtggtgtccaccagcctggactgcctgcagaagctgattgcctacggccacatcactggaaatgccccagattctggggcccctgggaagaggctgattgaccgcatcgtggagaccatctgcagctgcttccagggcccccagacagatgagggcgtgcagctgcagatcatcaaggccctgctgacagctgtgaccagcccccacatcgagatccacgagggcaccatcctgcagacagtgaggacctgctacaacatctacctggccagcaagaacctgatcaaccagaccacagccaaggccaccctgacccagatgctgaatgtcatcttcaccaggatggagaaccaggtgctgcaggaggcccgggagctggagaagcccatccagagcaagccccagagccctgtgatccaggccgctgctgtgagccccaagtttgtgcggctgaagcacagccaggcccagagcaagcccaccaccccagagaagacagacctgaccaacggggagcacgcccggagtgacagcggcaaggtgtccacagaaaatggagatgccccccgggagcggggcagcagcctgtctggaacagatgatggagcccaggaggtggtgaaggacatcctggaggatgtggtgaccagcgccatcaaggaggccgctgagaagcacggcctgacagagcctgagcgggtgctgggggagctggagtgccaggagtgtgccatccccccaggagtggatgagaacagccagaccaacggcattgctgatgaccggcagagcctgagcagcgctgacaacctggagagtgatgcccagggccaccaggtggccgcccgcttcagccacgtgctgcagaaggatgccttcctggtgttccgcagcctgtgcaagctgtccatgaagcccctgggggagggccccccagaccccaagagccatgagctgcggagcaaggtggtgtccctgcagctgctgctgtctgtgctgcagaatgccggccctgtgttccgcacccatgagatgttcatcaatgccatcaagcagtacctgtgtgtggccctgagcaagaatggagtgtcctctgtgcctgatgtgtttgagctgagcctggccatcttcctgaccctgctgagcaacttcaagatgcacctgaagatgcagatcgaggtgttcttcaaggagatcttcctgaacatcctggagaccagcaccagcagctttgagcaccgctggatggtgatccagaccctgacccgcatctgtgctgatgcccagtgtgtggtggacatctacgtgaactatgactgtgacctgaatgctgccaacatctttgagcggctggtgaatgacctgagcaagatcgcccagggccgcagcggccacgagctgggcatgacccccctgcaggagctgagcctgaggaagaagggcctggagtgcctggtgtccatcctgaagtgcatggtggagtggagcaaggacctgtatgtgaaccccaaccaccagaccagcctgggccaggagcggctgacagaccaggagattggagatggcaagggcctggacatggcccggcgctgcagcgtgacctccatggagagcacagtgagcagcggcacccagaccaccgtgcaggatgatcctgagcagtttgaagtcatcaagcagcagaaggagatcattgaacatggaattgagctgttcaacaagaagcccaagaggggcatccagttcctgcaggagcagggcatgctgggcacctctgtggaggacatcgcccagttcctgcaccaggaggagcggctggacagcacccaggtgggggacttcctgggggacagcgcccgcttcaacaaggaggtgatgtatgcctacgtggaccagctggacttctgtgagaaggagtttgtgtctgccctgcggaccttcctggagggcttccggctgcccggggaggcccagaagattgaccggctgatggagaagtttgctgcccgctacatcgagtgcaaccagggccagaccctgtttgccagcgctgacacagcctacgtgctggcctacagcatcatcatgctgaccacagacctgcacagcccccaggtgaagaacaagatgaccaaggagcagtacatcaagatgaacagaggcatcaatgacagcaaggacctgcctgaggagtacctgagcagcatctatgaggagattgagggcaagaagatcgccatgaaggagaccaaggagctgaccatcgccaccaagagcaccaagcagaatgtggccagcgagaagcagaggcggctgctgtacaacctggagatggagcagatggccaagacagccaaggccctgatggaggccgtgagccacgccaaggcccccttcaccagcgccacccacctggaccacgtgcggcccatgttcaagctggtgtggacccccctgctggccgcctacagcatcggcctgcagaactgtgatgacacagaggtggccagcctgtgcctggagggcatccgctgtgccatcagaattgcctgcatcttcggcatgcagctggagagagatgcctacgtgcaggccctggcccgcttcagcctgctgacagccagcagcagcatcacagagatgaagcagaagaacatcgacaccatcaagaccctcatcaccgtggcccacacagatggcaactacctgggcaacagctggcatgagatcctgaagtgcatcagccagctggagctggcccagctgattggaactggagtgaagacccgctacctgagcggcagcggccgggagcgggagggcagcctgaagggccacaccctggccggggaggagttcatgggcctgggcctgggcaacctggtgtctggaggagtggacaagaggcagatggccagcttccaggagagcgtgggggagaccagcagccagagcgtggtggtggccgtggaccgcatcttcaccggcagcacccggctggatggaaatgccatcgtggactttgtgcgctggctgtgtgctgtgtccatggatgagctggccagcccccaccaccccaggatgttcagcctgcagaagatcgtggagatctcctactacaacatgaaccgcatccggctgcagtggagccgcatctggcacgtgattggagaccacttcaacaaggtgggctgcaaccccaatgaagatgtggccatctttgctgtggacagcctgcggcagctgtccatgaagttcctggagaagggggagctggccaacttccgcttccagaaggacttcctgcggccctttgagcacatcatgaagaagaacagaagccccaccatccgggacatggccatccgctgcatcgcccagatggtgaacagccaggccgccaacatccgcagcggctggaagaacatctttgctgtgttccaccaggccgccagtgaccatgatggcaacatcgtggagctggccttccagaccacctgccacatcgtgaccaccatcttccagcaccacttccctgctgccatcgacagcttccaggatgctgtgaagtgcctgtctgaatttgcctgcaatgctgccttcccagacacctccatggaggccatccgcctcatccgcttctgtgggaagtatgtgtctgagcggccccgggtgctgcaggagtacaccagtgatgacatgaatgtggcccctggggacagagtgtgggtgcggggctggttccccatcctgtttgagctgagctgcatcatcaaccgctgcaagctggatgtgaggacccggggcctgactgtgatgtttgagatcatgaagagctatggccacacctttgagaagcactggtggcaggacctcttcagaattgtgttccgcatctttgacaacatgaagctgcctgagcagctgtctgagaagtctgagtggatgaccaccacctgcaaccacgccctgtatgccatctgtgatgtgttcacccagttctatgaggccctgaatgaggtgctgctgagtgatgtgtttgcccagctgcagtggtgtgtgaagcaggacaatgagcagctggcccggagcggcaccaactgcctggagaacctggtgatcagcaatggagagaagttcagccctgaggtgtgggatgagacctgcaactgcatgctggacatcttcaagaccaccatcccccacgtgctgctgacctggaggcctgtgggcatggaggaggacagcagcgagaagcacctggatgtggacctggaccggcagagcctgagcagcattgacaagaaccccagcgagcggggccagagccagctgagcaaccccacagatgacagctggaagggccggccctatgccaaccagaagctgtttgccagcctgctgatcaagtgtgtggtgcagctggagctgatccagaccatcgacaacatcgtgttctacccagccaccagcaagaaggaggatgctgagcacatggtggccgcccagcaggacaccctggatgctgacatccacattgaaacagaggaccagggcatgtacaagtacatgagcagccagcacctgttcaagctgctggactgcctgcaggagagccacagcttcagcaaggccttcaacagcaactatgagcagaggacagtgctgtggagggctggcttcaagggcaagagcaagcccaacctgctgaagcaggagaccagcagcctggcctgctgcctgcgcatcctcttcaggatgtatgtggatgaaaatagaagagacagctgggaggagatccagcagaggctgctgactgtgtgcagcgaggccctggcctacttcatcaccgtgaacagcgagagccaccgggaggcctggaccagcctgctgctgctgctgctgaccaagaccctgaagatcaatgatgagaagttcaaggcccacgcctccatgtactacccctacctgtgtgagatcatgcagtttgacctgatccctgagctgcgggctgtgctgaggaagttcttcctgcgcatcggcgtggtgtacaagatctggatccctgaggagcccagccaggtgcctgctgccctgagccctgtgtggtag

SEQ ID NO: 142984 - DNA, 2499 bp, synthetic construct
  misc_feature 1..2499: note = Description of Artificial Sequence: Synthetic coding sequence
  source 1..2499: mol_type = other DNA
atgcaggagagccagaccaagtccatgtttgtgtcccgggccctggagaagatcctggccgacaaggaggtgaagaggccccagcacagccagctgcggcgggcctgccaggtggccctggatgagatcaaggccgagattgagaagcagaggctgggcacagctgccccacccaaggccaacttcattgaagctgacaagtacttcctgccctttgagctggcctgccagagcaagagcccccgggtggtgtccaccagcctggactgcctgcagaagctgattgcctacggccacatcactggaaatgccccagattctggggcccctgggaagaggctgattgaccgcatcgtggagaccatctgcagctgcttccagggcccccagacagatgagggcgtgcagctgcagatcatcaaggccctgctgacagctgtgaccagcccccacatcgagatccacgagggcaccatcctgcagacagtgaggacctgctacaacatctacctggccagcaagaacctgatcaaccagaccacagccaaggccaccctgacccagatgctgaatgtcatcttcaccaggatggagaaccaggtgctgcaggaggcccgggagctggagaagcccatccagagcaagccccagagccctgtgatccaggccgctgctgtgagccccaagtttgtgcggctgaagcacagccaggcccagagcaagcccaccaccccagagaagacagacctgaccaacggggagcacgcccggagtgacagcggcaaggtgtccacagaaaatggagatgccccccgggagcggggcagcagcctgtctggaacagatgatggagcccaggaggtggtgaaggacatcctggaggatgtggtgaccagcgccatcaaggaggccgctgagaagcacggcctgacagagcctgagcgggtgctgggggagctggagtgccaggagtgtgccatccccccaggagtggatgagaacagccagaccaacggcattgctgatgaccggcagagcctgagcagcgctgacaacctggagagtgatgcccagggccaccaggtggccgcccgcttcagccacgtgctgcagaaggatgccttcctggtgttccgcagcctgtgcaagctgtccatgaagcccctgggggagggccccccagaccccaagagccatgagctgcggagcaaggtggtgtccctgcagctgctgctgtctgtgctgcagaatgccggccctgtgttccgcacccatgagatgttcatcaatgccatcaagcagtacctgtgtgtggccctgagcaagaatggagtgtcctctgtgcctgatgtgtttgagctgagcctggccatcttcctgaccctgctgagcaacttcaagatgcacctgaagatgcagatcgaggtgttcttcaaggagatcttcctgaacatcctggagaccagcaccagcagctttgagcaccgctggatggtgatccagaccctgacccgcatctgtgctgatgcccagtgtgtggtggacatctacgtgaactatgactgtgacctgaatgctgccaacatctttgagcggctggtgaatgacctgagcaagatcgcccagggccgcagcggccacgagctgggcatgacccccctgcaggagctgagcctgaggaagaagggcctggagtgcctggtgtccatcctgaagtgcatggtggagtggagcaaggacctgtatgtgaaccccaaccaccagaccagcctgggccaggagcggctgacagaccaggagattggagatggcaagggcctggacatggcccggcgctgcagcgtgacctccatggagagcacagtgagcagcggcacccagaccaccgtgcaggatgatcctgagcagtttgaagtcatcaagcagcagaaggagatcattgaacatggaattgagctgttcaacaagaagcccaagaggggcatccagttcctgcaggagcagggcatgctgggcacctctgtggaggacatcgcccagttcctgcaccaggaggagcggctggacagcacccaggtgggggacttcctgggggacagcgcccgcttcaacaaggaggtgatgtatgcctacgtggaccagctggacttctgtgagaaggagtttgtgtctgccctgcggaccttcctggagggcttccggctgcccggggaggcccagaagattgaccggctgatggagaagtttgctgcccgctacatcgagtgcaaccagggccagaccctgtttgccagcgctgacacagcctacgtgctggcctacagcatcatcatgctgaccacagacctgcacagcccccaggtgaagaacaagatgaccaaggagcagtacatcaagatgaacagaggcatcaatgacagcaaggacctgcctgaggagtacctgagcagcatctatgaggagattgagggcaagaagatcgccatcaagaagaactag

SEQ ID NO: 142985 - DNA, 591 bp, synthetic construct
  misc_feature 1..591: note = Description of Artificial Sequence: Synthetic coding sequence
  source 1..591: mol_type = other DNA
atgggctctgtgaacagccggggccacaaggccgaggcccaggtggtgatgatgggcctggacagcgctgggaagaccaccctgctgtacaagctgaagggccaccagctggtggagaccctgcccaccgtgggcttcaacgtggagcccctgaaggcccctggccacgtgtccctgaccctgtgggatgtgggcggccaggcccccctgcgggcctcctggaaggactacctggagggcacagacatcctggtgtatgtgctggacagcacagatgaggcccggctgcctgagagcgctgctgagctgacagaggtgctgaatgaccccaacatggccggcgtgcccttcctggtgctggccaacaagcaggaggccccagatgccctgcccctgctgaagatccggaaccggctgagcctggagcgcttccaggaccactgctgggagctgcggggctgcagcgccctgaccggggagggcctgcctgaggccctgcagagcctgtggagcctgctgaagagccgcagctgcatgtgcctgcaggcccgggcccacggggctgagcggggggacagcaagaggagctag

SEQ ID NO: 142986 - DNA, 966 bp, synthetic construct
  misc_feature 1..966: note = Description of Artificial Sequence: Synthetic coding sequence
  source 1..966: mol_type = other DNA
atgttcagcctgatggccagctgctgcggctggttcaagcgctggagggagcctgtgcggctggccaacaagcaggacaaggagggcgccctgggggaggctgatgtgattgagtgcctgagcctggagaagctggtgaatgagcacaagtgcctgtgccagatcgagccctgcagcgccatcagcggctacggcaagaagattgacaagagcatcaagaagggcctgtactggctgctgcacgtgattgcccgggactttgatgccctgaatgaaagaatccagaaggagaccacagagcagagggccctggaggagcaggagaagcaggagagagctgagcgggtgaggaagctgcgggaggagaggaagcagaatgagcaggagcaggccgagctggatggcaccagcggcctggccgagctggaccctgagcccaccaaccccttccagcccatcgccagcgtcatcattgaaaatgaaggcaagctggagcgggagaagaagaaccagaagatggagaaggacagtgatggctgccacctgaagcacaagatggagcacgagcagatcgagacccagggccaggtgaaccacaacggccagaagaacaatgaatttggcctggtggagaactacaaggaggccctgacccagcagctgaagaatgaagatgaaacagaccggcccagcctggagagcgccaacgggaagaagaagaccaagaagctgaggatgaagaggaaccaccgggtggagcccctgaacattgatgactgtgcccctgagagccccaccccacctcctcctcctcctcctgtgggctggggcacccccaaggtgacccggctgcccaagctggagcccctgggggagacccaccacaatgacttctacaggaagcccctgccccccctggccgtgccccagaggcccaacagtgatgcccatgatgtgatctcctag

SEQ ID NO: 142987 - DNA, 1287 bp, synthetic construct
  misc_feature 1..1287: note = Description of Artificial Sequence: Synthetic coding sequence
  source 1..1287: mol_type = other DNA
atgttcagcctgatggccagctgctgcggctggttcaagcgctggagggagcctgtgaggaaggtgaccctgctgatggtgggcctggacaatgctgggaagacagccacagccaagggcatccagggcgagtacccagaagatgtggcccccaccgtgggcttcagcaagatcaacctgcggcagggcaagtttgaggtgaccatctttgacctgggcggcggcatccgcatccggggcatctggaagaactactatgcagagagctatggagtcatctttgtggtggacagcagtgatgaggagaggatggaggagaccaaggaggccatgtctgagatgctgcggcacccccgcatcagcggcaagcccatcctggtgctggccaacaagcaggacaaggagggcgccctgggggaggctgatgtgattgaatgtctgagcctggagaagctggtgaatgagcacaagtgcctgtgccagatcgagccctgcagcgccatcagcggctacggcaagaagattgacaagagcatcaagaagggcctgtactggctgctgcacgtgattgcccgggactttgatgccctgaatgaaagaatccagaaggagaccacagagcagagggccctggaggagcaggagaagcaggagcgggcagagcgggtgaggaagctgcgggaggagaggaagcagaatgagcaggagcaggccgagctggatggcaccagcggcctggccgagctggaccctgagcccaccaaccccttccagcccatcgccagcgtcatcattgaaaatgaaggcaagctggagcgggagaagaagaaccagaagatggagaaggacagtgatggctgccacctgaagcacaagatggagcacgagcagatcgagacccagggccaggtgaaccacaacggccagaagaacaatgaatttggcctggtggagaactacaaggaggccctgacccagcagctgaagaatgaagatgaaacagaccggcccagcctggagagcgccaacgggaagaagaagaccaagaagctgaggatgaagaggaaccaccgggtggagcccctgaacattgatgactgtgcccctgagagccccaccccacctcctcctcctcctcctgtgggctggggcacccccaaggtgacccggctgcccaagctggagcccctgggggagacccaccacaatgacttctacaggaagcccctgccccccctggccgtgccccagaggcccaacagtgatgcccatgatgtgatctcctag

SEQ ID NO: 142988 - DNA, 1287 bp, synthetic construct; identical to SEQ ID NO: 142987
  misc_feature 1..1287: note = Description of Artificial Sequence: Synthetic coding sequence
  source 1..1287: mol_type = other DNA

SEQ ID NO: 142989 - DNA, 978 bp, synthetic construct
  misc_feature 1..978: note = Description of Artificial Sequence: Synthetic coding sequence
  source 1..978: mol_type = other DNA
atggaggagaccaaggaggccatgtctgagatgctgcggcacccccgcatcagcggcaagcccatcctggtgctggccaacaagcaggacaaggagggcgccctgggggaggctgatgtgattgagtgcctgagcctggagaagctggtgaatgagcacaagtgcctgtgccagatcgagccctgcagcgccatcagcggctacggcaagaagattgacaagagcatcaagaagggcctgtactggctgctgcacgtgattgcccgggactttgatgccctgaatgaaagaatccagaaggagaccacagagcagagggccctggaggagcaggagaagcaggagagagctgagcgggtgaggaagctgcgggaggagaggaagcagaatgagcaggagcaggccgagctggatggcaccagcggcctggccgagctggaccctgagcccaccaaccccttccagcccatcgccagcgtcatcattgaaaatgaaggcaagctggagcgggagaagaagaaccagaagatggagaaggacagtgatggctgccacctgaagcacaagatggagcacgagcagatcgagacccagggccaggtgaaccacaacggccagaagaacaatgaatttggcctggtggagaactacaaggaggccctgacccagcagctgaagaatgaagatgaaacagaccggcccagcctggagagcgccaacgggaagaagaagaccaagaagctgaggatgaagaggaaccaccgggtggagcccctgaacattgatgactgtgcccctgagagccccaccccacctcctcctcctcctcctgtgggctggggcacccccaaggtgacccggctgcccaagctggagcccctgggggagacccaccacaatgacttctacaggaagcccctgccccccctggccgtgccccagaggcccaacagtgatgcccatgatgtgatctcctag

SEQ ID NO: 142990 - DNA, 450 bp, synthetic construct
  misc_feature 1..450: note = Description of Artificial Sequence: Synthetic coding sequence
  source 1..450: mol_type = other DNA
atggagaaggacagtgatggctgccacctgaagcacaagatggagcacgagcagatcgagacccagggccaggtgaaccacaacggccagaagaacaatgaatttggcctggtggagaactacaaggaggccctgacccagcagctgaagaatgaagatgaaacagaccggcccagcctggagagcgccaacgggaagaagaagaccaagaagctgaggatgaagaggaaccaccgggtggagcccctgaacattgatgactgtgcccctgagagccccaccccacctcctcctcctcctcctgtgggctggggcacccccaaggtgacccggctgcccaagctggagcccctgggggagacccaccacaatgacttctacaggaagcccctgccccccctggccgtgccccagaggcccaacagtgatgcccatgatgtgatctcctag

SEQ ID NO: 142991 - DNA, 579 bp, synthetic construct
  misc_feature 1..579: note = Description of Artificial Sequence: Synthetic coding sequence
  source 1..579: mol_type = other DNA
atgggcagcctgggcagcaagaacccccagaccaagcaggcccaggtgctgctgctgggcctggacagcgctgggaagagcaccctgctgtacaagctgaagctggccaaggacatcaccaccatccccaccatcggcttcaacgtggagatgattgagctggagaggaacctgagcctgactgtgtgggatgtgggcggccaggagaagatgaggacagtgtggggctgctactgtgagaacacagatggcctggtgtatgtggtggacagcacagacaagcagaggctggaggagagccagaggcagtttgagcacatcctgaagaatgagcacatcaagaatgtgcctgtggtgctgctggccaacaagcaggacatgcctggggccctgacagctgaggacatcaccaggatgttcaaggtgaagaagctgtgcagcgacaggaactggtacgtgcagccctgctgtgccctgaccggggagggcctggcccagggcttcaggaagctgaccggctttgtgaagagccacatgaagagcagaggagacaccctggccttcttcaagcagaactag

SEQ ID NO: 142992 - DNA, 555 bp, synthetic construct
  misc_feature 1..555: note = Description of Artificial Sequence: Synthetic coding sequence
  source 1..555: mol_type = other DNA
atgggcctgctgaccatcctgaagaagatgaagcagaaggagcgggagctgcggctgctgatgctgggcctggacaatgccggcaagaccaccatcctgaagaagttcaatggagaagatattgacaccatcagccccaccctgggcttcaacatcaagaccctggagcaccggggcttcaagctgaacatctgggatgtgggcggccagaagagcctgcggagctactggaggaactactttgagagcacagatggcctcatctgggtggtggacagcgctgaccggcagaggatgcaggactgccagcgggagctgcagagcctgctggtggaggagcggctggccggggccaccctgctgatctttgccaacaagcaggacctgcccggggccctgagcagcaatgccatccgggaggtgctggagctggacagcatccgcagccaccactggtgcatccagggctgcagcgctgtgactggagagaacctgctgcccggcatcgactggctgctggatgacatcagcagccgcatcttcaccgctgactag

SEQ ID NO: 142993 - DNA, 555 bp, synthetic construct; identical to SEQ ID NO: 142992
  misc_feature 1..555: note = Description of Artificial Sequence: Synthetic coding sequence
  source 1..555: mol_type = other DNA

SEQ ID NO: 142994 - DNA, 474 bp, synthetic construct
  misc_feature 1..474: note = Description of Artificial Sequence: Synthetic coding sequence
  source 1..474: mol_type = other DNA
atgggcctgctgaccatcctgaagaagatgaagcagaaggagcgggagctgcggctgctgatgctgggcctggacaatgccggcaagaccaccatcctgaagaagttcaatggagaagatattgacaccatcagccccaccctgggcttcaacatcaagaccctggagcaccggggcttcaagctgaacatctgggatgtgggcggccagaagagcctgcggagctactggaggaactactttgagagcacagatggcctcatctgggtggtggacagcgctgaccggcagaggatgcaggactgccagcgggagctgcagagcctgctggtggaggaggtgctggagctggacagcatccgcagccaccactggtgcatccagggctgcagcgctgtgactggagagaacctgctgcccggcatcgactggctgctggatgacatcagcagccgcatcttcaccgctgactag

SEQ ID NO: 142995 - DNA, 549 bp, synthetic construct
  misc_feature 1..549: note = Description of Artificial Sequence: Synthetic coding sequence
  source 1..549: mol_type = other DNA
atgggcctgctgagcatcctgaggaagctgaagagcgccccagaccaggaggtgcgcatcctgctgctgggcctggacaatgctgggaagaccaccctgctgaagcagctggccagcgaggacatcagccacatcacccccacccagggcttcaacatcaagtctgtgcagagccagggcttcaagctgaatgtgtgggacatcggcggccagaggaagatccggccctactggaagaactactttgaaaatacagacatcctgatctacgtgattgacagcgctgacaggaagagatttgaggagaccggccaggagctggccgagctgctggaggaggagaagctgagctgtgtgcctgtgctgatctttgccaacaagcaggacctgctgacagctgccccagccagcgagattgctgagggcctgaacctgcacaccatccgggacagagtgtggcagatccagagctgcagcgccctgaccggggagggcgtgcaggacggcatgaactgggtgtgcaagaatgtgaatgccaagaagaagtag

SEQ ID NO: 142996 - DNA, 606 bp, synthetic construct
  misc_feature 1..606: note = Description of Artificial Sequence: Synthetic coding sequence
  source 1..606: mol_type = other DNA
atgggcaaccacctgacagagatggcccccacagccagcagcttcctgccccacttccaggccctgcacgtggtggtgattggcctggacagcgctgggaagaccagcctgctgtaccgcctgaagttcaaggagtttgtgcagagcgtgcccaccaagggcttcaacacagagaagatccgggtgcccctgggcggcagccggggcatcaccttccaggtgtgggatgtgggcggccaggagaagctgcggcccctgtggaggagctacaccaggagaacagatggcctggtgtttgtggtggatgctgctgaggccgagcggctggaggaggccaaggtggagctgcaccgcatcagccgggccagtgacaaccagggcgtgcctgtgctggtgctggccaacaagcaggaccagcccggggccctgtctgctgctgaggtggagaagaggctggccgtgcgggagctggccgccgccaccctgacccacgtgcagggctgcagcgctgtggatggcctgggcctgcagcagggcctggagcggctgtatgagatgatcctgaagaggaagaaggccgcccggggcggcaagaagagaagatag

SEQ ID NO: 142997 - DNA, 561 bp, synthetic construct
  misc_feature 1..561: note = Description of Artificial Sequence: Synthetic coding sequence
  source 1..561: mol_type = other DNA
atgggcctgctggaccggctgtctgtgctgctgggcctgaagaagaaggaggtgcacgtgctgtgcctgggcctggacaacagcggcaagaccaccatcatcaacaagctgaagcccagcaatgcccagagccagaacatcctgcccaccatcggcttcagcattgagaagttcaagagcagcagcctgtccttcaccgtgtttgacatgagcggccagggccgctacagaaacctgtgggagcactactacaaggagggccaggccatcatcttcgtcatcgacagcagtgaccggctgaggatggtggtggccaaggaggagctggacaccctgctgaaccacccagacatcaagcaccggcgcatccccatcctcttctttgccaacaagatggacctgagagatgctgtgacctctgtgaaggtgtcccagctgctgtgcctggagaacatcaaggacaagccctggcacatctgtgccagtgatgccatcaagggggagggcctgcaggagggcgtggactggctgcaggaccagatccagacagtgaagacctag

SEQ ID NO: 142998 - DNA, 561 bp, synthetic construct; identical to SEQ ID NO: 142997
  misc_feature 1..561: note = Description of Artificial Sequence: Synthetic coding sequence
  source 1..561: mol_type = other DNA

SEQ ID NO: 142999 - DNA, 366 bp, synthetic construct
  misc_feature 1..366: note = Description of Artificial Sequence: Synthetic coding sequence
  source 1..366: mol_type = other DNA
atgggcctgctggaccggctgtctgtgctgctgggcctgaagaagaaggaggtgcacgtgctgtgcctgggcctggacaacagcggcaagaccaccatcatcaacaagctgaagcccagcaatgcccagagccagaacatcctgcccaccatcggcttcagcattgagaagttcaagagcagcagcctgtccttcaccgtgtttgacatgagcggccagggccgctacagaaacctgtgggagcactactacaaggagggccaggccatcatcttcgtcatcgacagcagtgaccggctgaggatggtggtggccaaggaggagctggacaccctgctgaaccacccagacatcaagcacaggtag

SEQ ID NO: 143000 - DNA, 561 bp, synthetic construct; identical to SEQ ID NO: 142997
  misc_feature 1..561: note = Description of Artificial Sequence: Synthetic coding sequence
  source 1..561: mol_type = other DNA

SEQ ID NO: 143001 - DNA, 561 bp, synthetic construct; identical to SEQ ID NO: 142997
  misc_feature 1..561: note = Description of Artificial Sequence: Synthetic coding sequence
  source 1..561: mol_type = other DNA

SEQ ID NO: 143002 - DNA, 564 bp, synthetic construct
  misc_feature 1..564: note = Description of Artificial Sequence: Synthetic coding sequence
  source 1..564: mol_type = other DNA
ctgcggcccacctggaaggccctgagccacccagcctggccagaggagaagaacaagcagatcctggtgctgggcctggatggagctgggaagacctctgtgctgcacagcctggccagcaacagagtgcagcacagcgtggcccccacccagggcttccacgctgtgtgcatcaacacagaggacagccagatggagttcctggagatcggcggcagcaagcccttccgcagctactgggagatgtacctgagcaagggcctgctgctgatctttgtggtggacagcgctgaccacagccggctgcctgaggccaagaagtacctgcaccagctgattgctgccaaccctgtgctgcccctggtggtgtttgccaacaagcaggacctggaggccgcctaccacatcacagacatccacgaggccctggccctgtctgaggtgggcaatgacaggaagatgttcctgtttggcacctacctgaccaagaatggcagcgagatccccagcaccatgcaggatgccaaggacctgattgcccagctggccgcagatgtgcagtag

SEQ ID NO: 143003 - DNA, 1083 bp, synthetic construct
  misc_feature 1..1083: note = Description of Artificial Sequence: Synthetic coding sequence
  source 1..1083: mol_type = other DNA
atggagcgggccggccctgctggggaggagggcggggcccgggagggccgcctgctgccccgggcccctggggcctgggtgctgcgggcctgtgccgagagagctgccctggaggtgggcgccgccagcgctgacaccggggtgcggggctgtggggcccggggccctgcccccctgctggccagcgctgggggcggccgggccagagatggcacctggggcgtgaggaccaagggcagcggggccgccctgcccagcaggcctgccagccgggccgcccccaggcctgaggccagcagcccccccctgcccctggagaaggcccggggcggcctgagcggcccccagggcggccgggcccggggggccatggcccacgtgggcagcaggaagaggagccgcagccgcagccgcagccggggccggggcagcgagaagaggaagaagaagagcaggaaggacaccagcaggaactgcagcgccagcaccagccagggcaggaaggccagcacagcccctggagctgaggccagccccagcccctgcatcacagagaggagcaagcagaaggcccggcggaggaccaggagcagcagcagcagcagcagcagcagcagcagcagcagcagcagcagcagcagcagcagcagcagcagcagcagtgatggcaggaagaagaggggcaagtacaaggacaagaggaggaagaagaagaagaagaggaagaagctgaagaagaagggcaaggagaaggccgaggcccagcaggtggaggccctgcccggccccagcctggaccagtggcacaggtctgctggggaggaggaggatggccctgtgctgacagatgagcagaagagccgcatccaggccatgaagcccatgaccaaggaggagtgggatgcccggcagagcatcatcaggaaggtggtggaccctgagactggaagaaccaggctcatcaagggagatggagaggtgctggaggagatcgtgaccaaggagcggcaccgggagatcaacaagcaggccaccaggggggactgcctggccttccagatgagagctggcctgctgccctag

SEQ ID NO: 143004 - DNA, 1017 bp, synthetic construct
  misc_feature 1..1017: note = Description of Artificial Sequence: Synthetic coding sequence
  source 1..1017: mol_type = other DNA
atggagcgggccggccctgctggggaggagggcggggcccgggagggccgcctgctgccccgggcccctggggcctgggtgctgcgggcctgtgccgagagagctgccctggaggtgggcgccgccagcgctgacaccggggtgcggggctgtggggcccggggccctgcccccctgctggccagcgctgggggcggccgggccagagatggcacctggggcgtgaggaccaagggcagcggggccgccctgcccagcaggcctgccagccgggccgcccccaggcctgaggccagcagcccccccctgcccctggagaaggcccggggcggcctgagcggcccccagggcggccgggcccggggggccatggcccacgtgggcagcaggaagaggagccgcagccgcagccgcagccggggccggggcagcgagaagaggaagaagaagagcaggaaggacaccagcaggaactgcagcgccagcaccagccaggagaggagcaagcagaaggcccggcggaggaccaggagcagcagcagcagcagcagcagcagcagcagcagcagcagcagcagcagcagcagcagcagcagcagcagcagtgatggcaggaagaagaggggcaagtacaaggacaagaggaggaagaagaagaagaagaggaagaagctgaagaagaagggcaaggagaaggccgaggcccagcaggtggaggccctgcccggccccagcctggaccagtggcacaggtctgctggggaggaggaggatggccctgtgctgacagatgagcagaagagccgcatccaggccatgaagcccatgaccaaggaggagtgggatgcccggcagagcatcatcaggaaggtggtggaccctgagaccggccgcaccaggctcatcaagggagatggagaggtgctggaggagatcgtgaccaaggagcggcaccgggagatcaacaaggtgggcgtggcccccctgcctgccatccggccccagctgtgcctgtag

SEQ ID NO: 143005 - DNA, 1059 bp, synthetic construct
  misc_feature 1..1059: note = Description of Artificial Sequence: Synthetic coding sequence
  source 1..1059: mol_type = other DNA
atggagcgggccggccctgctggggaggagggcggggcccgggagggccgcctgctgccccgggcccctggggcctgggtgctgcgggcctgtgccgagagagctgccctggaggtgggcgccgccagcgctgacaccggggtgcggggctgtggggcccggggccctgcccccctgctggccagcgctgggggcggccgggccagagatggcacctggggcgtgaggaccaagggcagcggggccgccctgcccagcaggcctgccagccgggccgcccccaggcctgaggccagcagcccccccctgcccctggagaaggcccggggcggcctgagcggcccccagggcggccgggcccggggggccatggcccacgtgggcagcaggaagaggagccgcagccgcagccgcagccggggccggggcagcgagaagaggaagaagaagagcaggaaggacaccagcaggaactgcagcgccagcaccagccagggcaggaaggccagcacagcccctggagctgaggagaggagcaagcagaaggcccggcggaggaccaggagcagcagcagcagcagcagcagcagcagcagcagcagcagcagcagcagcagcagcagcagcagcagcagcagtgatggcaggaagaagaggggcaagtacaaggacaagaggaggaagaagaagaagaagaggaagaagctgaagaagaagggcaaggagaaggccgaggcccagcaggtggaggccctgcccggccccagcctggaccagtggcacaggtctgctggggaggaggaggatggccctgtgctgacagatgagcagaagagccgcatccaggccatgaagcccatgaccaaggaggagtgggatgcccggcagagcatcatcaggaaggtggtggaccctgagactggaagaaccaggctcatcaagggagatggagaggtgctggaggagatcgtgaccaaggagcggcaccgggagatcaacaagcaggccaccaggggggactgcctggccttccagatgagagctggcctgctgccctag

SEQ ID NO: 143006 - DNA, 1026 bp, synthetic construct
  misc_feature 1..1026: note = Description of Artificial Sequence: Synthetic coding sequence
  source 1..1026: mol_type = other DNA
atggagcgggccggccctgctggggaggagggcggggcccgggagggccgcctgctgccccgggcccctggggcctgggtgctgcgggcctgtgccgagagagctgccctggaggtgggcgccgccagcgctgacaccggggtgcggggctgtggggcccggggccctgcccccctgctggccagcgctgggggcggccgggccagagatggcacctggggcgtgaggaccaagggcagcggggccgccctgcccagcaggcctgccagccgggccgcccccaggcctgaggccagcagcccccccctgcccctggagaaggcccggggcggcctgagcggcccccagggcggccgggcccggggggccatggcccacgtgggcagcaggaagaggagccgcagccgcagccgcagccggggccggggcagcgagaagaggaagaagaagagcaggaaggacaccagcaggaactgcagcgccagcaccagccaggagaggagcaagcagaaggcccggcggaggaccaggagcagcagcagcagcagcagcagcagcagcagcagcagcagcagcagcagcagcagcagcagcagcagcagcagtgatggcaggaagaagaggggcaagtacaaggacaagaggaggaagaagaagaagaagaggaagaagctgaagaagaagggcaaggagaaggccgaggcccagcaggtggaggccctgcccggccccagcctggaccagtggcacaggtctgctggggaggaggaggatggccctgtgctgacagatgagcagaagagccgcatccaggccatgaagcccatgaccaaggaggagtgggatgcccggcagagcatcatcaggaaggtggtggaccctgagaccggccgcaccaggctcatcaagggagatggagaggtgctggaggagatcgtgaccaaggagcggcaccgggagatcaacaagcaggccaccaggggggactgcctggccttccagatgagagctggcctgctgccctag

SEQ ID NO: 143007 - DNA, 567 bp, synthetic construct
  misc_feature 1..567: note = Description of Artificial Sequence: Synthetic coding sequence
  source 1..567: mol_type = other DNA
atggatgtgaacatcgcccccctgcgggcctgggatgacttcttccctggcagtgacagatttgcccggccagacttccgggacatcagcaagtggaacaacagagtggtgagcaacctgctgtactaccagaccaactacctggtggtggccgccatgatgatcagcatcgtgggcttcctgagccccttcaacatgatcctgggcggcatcgtggtggtgctggtgttcaccggctttgtgtgggccgcccacaacaaggatgtgctgcggaggatgaagaagcgctaccccaccacctttgtgatggtggtgatgctggccagctacttcctgatctccatgtttggaggagtgatggtgtttgtgtttggcatcaccttccccctgctgctgatgttcatccacgccagcctgcggctgaggaacctgaagaacaagctggagaacaagatggagggcatcggcctgaagaggacccccatgggcatcgtgctggatgccctggagcagcaggaggagggcatcaaccggctgacagactacatcagcaaggtgaaggagtag

SEQ ID NO: 143008 - DNA, 411 bp, synthetic construct
  misc_feature 1..411: note = Description of Artificial Sequence: Synthetic coding sequence
  source 1..411: mol_type = other DNA
atggatgtgaacatcgcccccctgcgggcctgggatgacttcttccctggcagtgacagatttgcccggccagacttccgggacatcagcaagtggaacaacagagtggtgagcaacctgctgtactaccagaccaactacctggtggtggccgccatgatgatcagcatcgtgggcttcctgagccccttcaacatgatcctgggcggcatcgtggtggtgctggtgttcaccggctttgtgtgggccgcccatgatgtgcgctatggaggccacgtgggggagctgttcccctacctgcacgtgtggaggagccacggcctgtgtgtgtggcactacttctcctttgctgtggatgtgtacccctgcatcgtggagaccagcgagccccaggagcagacaggagagtag

SEQ ID NO: 143009 - DNA, 819 bp, synthetic construct
  misc_feature 1..819: note = Description of Artificial Sequence: Synthetic coding sequence
  source 1..819: mol_type = other DNA
atggtgcgctgctacgtggagatcgtggagaagctgcctgagaggaggccagaccctgccaccatcgagggctgtgcccagctgaagcccaacaactacctgctggcctggcacacccccttcaatgagaagggcagcggctttggagctgccaccaaggccatgtgcatcggcctgcgctactggaagccagagcggctggagaccctgattgaggtgtctgtggagtgtggccgcatgacccacaaccaccccaccggcttcctgggcagcctgtgcacagccctgtttgtgtcctttgctgcccagggcaagcccctggtgcagtggggccgggacatgctgcgggctgtgcccctggccgaggagtactgcaggaagaccatccgccacacagctgagtaccaggagcactggttctactttgaggccaagtggcagttctacctggaggagaggaagatcagcaaggacagcgagaacaaggccatcttcccagacaactatgatgctgaggagcgggagaagacctacaggaagtggagcagcgagggccggggcggcagaagaggacatgatgcccccatgattgcctatgatgccctgctggccgccggcaacagctggacagagctgtgccaccgggccatgtttcatggaggagagagcgctgccaccggcaccatcgccggctgcctgtttggcctgctgtatggcctggacctggtgcccaagggcctgtaccaggacctggaggacaaggagaagctggaggacctgggcgccgccctgtaccgcctgagcacagaggagaagtag

SEQ ID NO: 143010 - DNA, 1065 bp, synthetic construct
  misc_feature 1..1065: note = Description of Artificial Sequence: Synthetic coding sequence
  source 1..1065: mol_type = other DNA
atggagaagttcaaggccgccatgctgctgggctctgtgggagatgccctgggctacagaaatgtgtgcaaggagaacagcacagtgggcatgaagatccaggaggagctgcagaggtctgggggcctggaccacctggtgctgagccctggagagtggcctgtgtctgacaacaccatcatgcacatcgccacagctgaggccctgaccacagactactggtgcctggatgacctgtaccgggagatggtgcgctgctacgtggagatcgtggagaagctgcctgagaggaggccagaccctgccaccatcgagggctgtgcccagctgaagcccaacaactacctgctggcctggcacacccccttcaatgagaagggcagcggctttggagctgccaccaaggccatgtgcatcggcctgcgctactggaagccagagcggctggagaccctgattgaggtgtctgtggagtgtggccgcatgacccacaaccaccccaccggcttcctgggcagcctgtgcacagccctgtttgtgtcctttgctgcccagggcaagcccctggtgcagtggggccgggacatgctgcgggctgtgcccctggccgaggagtactgcaggaagaccatccgccacacagctgagtaccaggagcactggttctactttgaggccaagtggcagttctacctggaggagaggaagatcagcaaggacagcgagaacaaggccatcttcccagacaactatgatgctgaggagcgggagaagacctacaggaagtggagcagcgagggccggggcggcagaagaggacatgatgcccccatgattgcctatgatgccctgctggccgccggcaacagctggacagagctgtgccaccgggccatgtttcatggaggagagagcgctgccaccggcaccatcgccggctgcctgtttggcctgctgtatggcctggacctggtgcccaagggcctgtaccaggacctggaggacaaggagaagctggaggacctgggcgccgccctgtaccgcctgagcacagaggagaagtag

SEQ ID NO: 143011 - DNA, 531 bp, synthetic construct
  misc_feature 1..531: note = Description of Artificial Sequence: Synthetic coding sequence
  source 1..531: mol_type = other DNA
atggtgcgctgctacgtggagatcgtggagaagctgcctgagaggaggccagaccctgccaccatcgagggctgtgcccagctgaagcccaacaactacctgctggcctggcacacccccttcaatgagaagggcagcggctttggagctgccaccaaggccatgtgcatcggcctgcgctactggaagccagagcggctggagaccctgattgaggtgtctgtggagtgtggccgcatgacccacaaccaccccaccggcttcctgggcagcctgtgcacagccctgtttgtgtcctttgctgcccagggcaagcccctggtgcagtggggccgggacatgctgcgggctgtgcccctggccgaggagtactgcaggaagaccatccgccacacagctgagtaccaggagcactggttctactttgaggccaagtggcagttctacctggaggagaggaagatcagcaaggacagcgagaacaaggccatcttcccagacaactatgatgctgaggagcgggagaagtag

SEQ ID NO: 143012 - DNA, 1092 bp, synthetic construct
  misc_feature 1..1092: note = Description of Artificial Sequence: Synthetic coding sequence
  source 1..1092: mol_type = other DNA
atggctgctgctgccatggctgctgctgctgggggcggggccggggccgcccggagcctgagccgcttccggggctgcctggccggggccctgctgggggactgtgtgggcagcttctatgaggcccatgacacagtggacctgacctctgtgctgcggcacgtgcagagcctggagccagaccccggcaccccaggcagcgagaggacagaggccctgtactacacagatgacacagccatggcccgggccctggtgcagagcctgctggccaaggaggcctttgatgaggtggacatggcccacagatttgcccaggagtacaagaaggaccctgaccggggctacggggccggcgtggtgaccgtcttcaagaagctgctgaaccccaagtgcagagatgtgtttgagcccgcccgggcccagttcaacgggaagggcagctatggaaatggaggagccatgagggtggccggcatcagcctggcctacagctctgtgcaggatgtgcagaagtttgcccggctgagcgcccagctgacccacgccagcagcctgggctacaatggagccatcctgcaggccctggccgtgcacctggccctgcagggcgagagcagcagcgagcacttcctgaagcagctgctgggccacatggaggacctggagggagatgcccagagcgtgctggatgcccgggagctgggcatggaggagcggccctacagcagccggctgaagaagattggagagctgctggaccaggcctctgtgacccgggaggaggtggtgtctgagctgggcaatggaattgctgcctttgagagcgtgcccacagccatctactgcttcctgcgctgcatggagccagaccctgagatccccagcgccttcaacagcctgcagaggaccctcatctacagcatcagcctgggcggggacacagacaccatcgccaccatggccggggccatcgccggggcctactacggcatggaccaggtgcctgagagctggcagcagagctgtgagggctatgaggagacagacatcctggcccagagcctgcacagggtcttccagaagagctag

SEQ ID NO: 143013 - DNA, 852 bp, synthetic construct
  misc_feature 1..852: note = Description of Artificial Sequence: Synthetic coding sequence
  source 1..852: mol_type = other DNA
atggcccgggccctggtgcagagcctgctggccaaggaggcctttgatgaggtggacatggcccacagatttgcccaggagtacaagaaggaccctgaccggggctacggggccggcgtggtgaccgtcttcaagaagctgctgaaccccaagtgcagagatgtgtttgagcccgcccgggcccagttcaacgggaagggcagctatggaaatggaggagccatgagggtggccggcatcagcctggcctacagctctgtgcaggatgtgcagaagtttgcccggctgagcgcccagctgacccacgccagcagcctgggctacaatggagccatcctgcaggccctggccgtgcacctggccctgcagggcgagagcagcagcgagcacttcctgaagcagctgctgggccacatggaggacctggagggagatgcccagagcgtgctggatgcccgggagctgggcatggaggagcggccctacagcagccggctgaagaagattggagagctgctggaccaggcctctgtgacccgggaggaggtggtgtctgagctgggcaatggaattgctgcctttgagagcgtgcccacagccatctactgcttcctgcgctgcatggagccagaccctgagatccccagcgccttcaacagcctgcagaggaccctcatctacagcatcagcctgggcggggacacagacaccatcgccaccatggccggggccatcgccggggcctactacggcatggaccaggtgcctgagagctggcagcagagctgtgagggctatgaggagacagacatcctggcccagagcctgcacagggtcttccagaagagctag

SEQ ID NO: 143014 - DNA, 630 bp, synthetic construct
  misc_feature 1..630: note = Description of Artificial Sequence: Synthetic coding sequence
  source 1..630: mol_type = other DNA
atgagggtggccggcatcagcctggcctacagctctgtgcaggatgtgcagaagtttgcccggctgagcgcccagctgacccacgccagcagcctgggctacaatggagccatcctgcaggccctggccgtgcacctggccctgcagggcgagagcagcagcgagcacttcctgaagcagctgctgggccacatggaggacctggagggagatgcccagagcgtgctggatgcccgggagctgggcatggaggagcggccctacagcagccggctgaagaagattggagagctgctggaccaggcctctgtgacccgggaggaggtggtgtctgagctgggcaatggaattgctgcctttgagagcgtgcccacagccatctactgcttcctgcgctgcatggagccagaccctgagatccccagcgccttcaacagcctgcagaggaccctcatctacagcatcagcctgggcggggacacagacaccatcgccaccatggccggggccatcgccggggcctactacggcatggaccaggtgcctgagagctggcagcagagctgtgagggctatgaggagacagacatcctggcccagagcctgcacagggtcttccagaagagctag

SEQ ID NO: 143015 - DNA, 984 bp, synthetic construct
  misc_feature 1..984: note = Description of Artificial Sequence: Synthetic coding sequence
  source 1..984: mol_type = other DNA
atgcagatgcctgccatgatgagcctgctgctggtgtctgtgggcctgatggaggccctgcaggcccagagccaccccatcacccggcgggacctcttcagccaggagatccagctggacatggccctggccagctttgatgaccagtatgccggctgtgccgccgccatgacagctgccctgcctgacctgaaccacacagagttccaggccaaccaggtgtatgctgacagctggaccctggccagcagccagtggcaggagcggcaggcccgctggccagagtggagcctgagccccacccggcccagccccccacccctgggcttcagagatgagcacggcgtggccctgctggcctacacagccaacagccccctgcacaaggagttcaatgctgctgtgcgggaggccggccgcagccgggcccactacctgcaccacttctccttcaagaccctgcacttcctgctgacagaggccctgcagctgctgggcagcggccagaggcctccccgctgccaccaggtgttccggggcgtgcacggcctgcgcttccggcctgctggcccccgggccaccgtgcggctgggcggctttgccagcgccagcctgaagcacgtggccgcccagcagtttggagaggacaccttcttcggcatctggacctgcctgggcgcccccatcaagggctacagcttcttccctggagaggaggaggtgctgatccccccatttgagaccttccaggtgatcaatgccagccggctggcccagggccctgcccgcatctacctgcgggccctgggcaagcacagcacctacaactgtgagtacatcaaggacaagaagtgcaagagcggcccctgccacctggacaacagcgccatgggccagagccccctgtctgctgtgtggagcctgctgctgctgctgtggttcctggtggtgcgggccttcccagatggccctggcctgctgtag

SEQ ID NO: 143016 - DNA, 1104 bp, synthetic construct
  misc_feature 1..1104: note = Description of Artificial Sequence: Synthetic coding sequence
  source 1..1104: mol_type = other DNA
atgaagacaggccactttgagatcgtgaccatgctgctggccaccatgatcctggtggacatcttccaggtgaaggccgaggtgctggacatggctgacaatgcctttgatgatgagtacctgaagtgcacagacaggatggagatcaagtatgtgccccagctgctgaaggaggagaaggccagccaccagcagctggacacagtgtgggagaatgccaaggccaagtgggccgccaggaagacccagatcttcctgcccatgaacttcaaggacaaccacggcatcgccctgatggcctacatcagcgaggcccaggagcagacccccttctaccacctgttcagcgaggccgtgaagatggccggccagagccgggaggactacatctacggcttccagttcaaggccttccacttctacctgacccgggccctgcagctgctgaggaagccctgtgaggccagcagcaagacagtggtgtaccgcaccagccagggcaccagcttcaccttcggcggcctgaaccaggcccgcttcggccacttcaccctggcctacagcgccaagccccaggccgccaatgaccagctgactgtgctgagcatctacacctgcctgggcgtggacatcgagaacttcctggacaaggagagcgagcgcatcaccctcatccccctgaatgaggtgttccaggtgtcccaggagggcgccggcaacaacctgatcctgcagagcatcaacaagacctgcagccactatgaatgtgccttcctgggcggcctgaagacagagaactgcatcgagaacctggagtacttccagcccatctacgtgtacaaccctggagagaagaaccagaagctggaggaccacagcgagaagaactggaagctggaggaccacggggagaagaaccagaagctggaggaccacggcgtgaagatcctggagcccacccagatcccagcccctggccctgtgcctgtgcccggccccaagagccaccccagcgccagcagcggcaagctgctgctgccccagtttggcatggtgatcatcctgatctctgtgtctgccatcaacctgtttgtggccctgtag

SEQ ID NO: 143017 - DNA, 1137 bp, synthetic construct
  misc_feature 1..1137: note = Description of Artificial Sequence: Synthetic coding sequence
  source 1..1137: mol_type = other DNA
atgaagacaggccactttgagatcgtgaccatgctgctggccaccatgatcctggtggacatcttccaggtgaaggccgaggtgctggacatggctgacaatgcctttgatgatgagtacctgaagtgcacagacaggatggagatcaagtatgtgccccagctgctgaaggaggagaaggccagccaccagcagctggacacagtgtgggagaatgccaaggccaagtgggccgccaggaagacccagatcttcctgcccatgaacttcaaggacaaccacggcatcgccctgatggcctacatcagcgaggcccaggagcagacccccttctaccacctgttcagcgaggccgtgaagatggccggccagagccgggaggactacatctacggcttccagttcaaggccttccacttctacctgacccgggccctgcagctgctgaggaagccctgtgaggccagcagcaagacagtggtgtaccgcaccagccagggcaccagcttcaccttcggcggcctgaaccaggcccgcttcggccacttcaccctggcctacagcgccaagccccaggccgccaatgaccagctgactgtgctgagcatctacacctgcctgggcgtggacatcgagaacttcctggacaaggagagcgagcgcatcaccctcatccccctgaatgaggtgttccaggtgtcccaggagggcgccggcaacaacctgatcctgcagagcatcaacaagacctgcagccactatgaatgtgccttcctgggcggcctgaagacagagaactgcatcgagaacctggagtacttccagcccatctacgtgtacaaccctggagagaagaaccagaagctggaggaccacagcgagaagaactggaagctggaggaccacggggagaagaaccagaagctggaggaccacggcgtgaagatcctggagcccacccagatccctgaggacaagagccagggcaacatcaacaaccccaccccaggccctgtgcctgtgcccggccccaagagccaccccagcgccagcagcggcaagctgctgctgccccagtttggcatggtgatcatcctgatctctgtgtctgccatcaacctgtttgtggccctgtag

SEQ ID NO: 143018 - DNA, 1170 bp, synthetic construct
  misc_feature 1..1170: note = Description of Artificial Sequence: Synthetic coding sequence
  source 1..1170: mol_type = other DNA
atgaagacaggccactttgagatcgtgaccatgctgctggccaccatgatcctggtggacatcttccaggtgaaggccgaggtgctggacatggctgacaatgcctttgatgatgagtacctgaagtgcacagacaggatggagatcaagtatgtgccccagctgctgaaggaggagaaggccagccaccagcagctggacacagtgtgggagaatgccaaggccaagtgggccgccaggaagacccagatcttcctgcccatgaacttcaaggacaaccacggcatcgccctgatggcctacatcagcgaggcccaggagcagacccccttctaccacctgttcagcgaggccgtgaagatggccggccagagccgggaggactacatctacggcttccagttcaaggccttccacttctacctgacccgggccctgcagctgctgaggaagccctgtgaggccagcagcaagacagtggtgtaccgcaccagccagggcaccagcttcaccttcggcggcctgaaccaggcccgcttcggccacttcaccctggcctacagcgccaagccccaggccgccaatgaccagctgactgtgctgagcatctacacctgcctgggcgtggacatcgagaacttcctggacaaggagagcgagcgcatcaccctcatccccctgaatgaggtgttccaggtgtcccaggagggcgccggcaacaacctgatcctgcagagcatcaacaagacctgcagccactatgaatgtgccttcctgggcggcctgaagacagagaactgcatcgagaacctggagtacttccagcccatctacgtgtacaaccctggagagaagaaccagaagctggaggaccacagcgagaagaactggaagctggaggaccacggggagaagaaccagaagctggaggaccacggcgtgaagatcctggagcccacccagatccctggcatgaagatccctgagcccttccccctgcctgaggacaagagccagggcaacatcaacaaccccaccccaggccctgtgcctgtgcccggccccaagagccaccccagcgccagcagcggcaagctgctgctgccccagtttggcatggtgatcatcctgatctctgtgtctgccatcaacctgtttgtggccctgtag

SEQ ID NO: 143019 - DNA, 390 bp, synthetic construct
  misc_feature 1..390: note = Description of Artificial Sequence: Synthetic coding sequence
  source 1..390: mol_type = other DNA
atgaagacaggccactttgagatcgtgaccatgctgctggccaccatgatcctggtggacatcttccaggtgaaggccgaggtgctggacatggctgacaatgcctttgatgatgagtacctgaagtgcacagacaggatggagatcaagtatgtgccccagctgctgaaggaggagaaggccagccaccagcagctggacacagtgtgggagaatgccaaggccaagtgggccgccaggaagacccagatcttcctgcccatgaacttcaaggacaaccacggcatcgccctgatggcctacatcagcgaggcccaggagcagacccccttctaccacctgttcagcgaggccgtgaagatggccggccagagccgggaggactactag

SEQ ID NO: 143020 - DNA, 528 bp, synthetic construct
  misc_feature 1..528: note = Description of Artificial Sequence: Synthetic coding sequence
  source 1..528: mol_type = other DNA
atgaagacaggccactttgagatcgtgaccatgctgctggccaccatgatcctggtggacatcttccaggtgaaggccgaggtgctggacatggctgacaatgcctttgatgatgagtacctgaagtgcacagacaggatggagatcaagtatgtgccccagctgctgaaggaggagaaggccagccaccagcagctggacacagtgtgggagaatgccaaggccaagtgggccgccaggaagacccagatcttcctgcccatgaacttcaaggacaaccacggcatcgccctgatggcctacatcagcgaggcccaggagcagacccccttctaccacctgttcagcgaggccgtgaagatggccggccagagccgggaggactacatctacggcttccagttcaaggccttccacttctacctgacccgggccctgcagctgctgaggaagccctgtgaggccagcagcaagacagtggtgtaccgcaccagccagggcaccagcttcaccttcggcggcctgtag

SEQ ID NO: 143021 - DNA, 609 bp, synthetic construct
  misc_feature 1..609: note = Description of Artificial Sequence: Synthetic coding sequence
  source 1..609: mol_type = other DNA
atgaagacaggccactttgagatcgtgaccatgctgctggccaccatgatcctggtggacatcttccaggtgaaggccgaggtgctggacatggctgacaatgcctttgatgatgagtacctgaagtgcacagacaggatggagatcaagtatgtgccccagctgctgaaggaggagaaggccagccaccagcagctggacacagtgtgggagaatgccaaggccaagtgggccgccaggaagacccagatcttcctgcccatgaacttcaaggacaaccacggcatcgccctgatggcctacatcagcgaggcccaggagcagacccccttctaccacctgttcagcgaggccgtgaagatggccggccagagccgggaggactacatctacggcttccagttcaaggccttccacttctacctgacccgggccctgcagctgctgaggaagccctgtgaggccagcagcaagacagtggtgtaccgcaccagccagggcaccagcttcaccttcggcggcctgaaccaggcccgcttcggccacttcaccctggcctacagcgccaagccccaggccgccaatgaccagctgactgtgctgtcctag

SEQ ID NO: 143022 - DNA, 324 bp, synthetic construct
  misc_feature 1..324: note = Description of Artificial Sequence: Synthetic coding sequence
  source 1..324: mol_type = other DNA
atgaagacaggccactttgagatcgtgaccatgctgctggccaccatgatcctggtggacatcttccaggtgaaggccgaggtgctggacatggctgacaatgcctttgatgatgagtacctgaagtgcacagacaggatggagatcaagtatgtgccccagctgctgaaggaggagaaggccagccaccagcagctggacacagtgtgggagaatgccaaggccaagtgggccgccaggaagacccagatcttcctgcccatgaacttcaaggacaaccacggcatcgccctgatggcctacatcagcgaggcccaggagtag

SEQ ID NO: 143023 - DNA, 456 bp, synthetic construct
  misc_feature 1..456: note = Description of Artificial Sequence: Synthetic coding sequence
  source 1..456: mol_type = other DNA
atgagcggccggggcaagcagggcggcaaggtgcgggccaaggccaagagccgcagcagccgggccggcctgcagtttcctgtgggccgggtgcaccggctgctgaggaaaggaaattatgcagagcgggtgggcgctggggcccctgtgtacctggccgctgtgctggagtacctgacagctgagatcctggagctggccggaaatgctgcccgggacaacaagaagacccgcatcatccccaggcacctgcagctggccatcagaaatgatgaggagctgaacaagctgctgggcaaggtgaccatcgcccagggcggcgtgctgcccaacatccaggccgtgctgctgcccatctgtgagcacagcggccccagcagcggcaagatccccagcgacagagctgagctgggcgccggctctgtgtgtggccacatcttccagaaggtggagtag

SEQ ID NO: 143024 - DNA, 177 bp, synthetic construct
  misc_feature 1..177: note = Description of Artificial Sequence: Synthetic coding sequence
  source 1..177: mol_type = other DNA
atgggccccctcatcaaccgctgcaagaagatcctgctgcccaccaccgtgcccccagccaccatgaggatctggctgctgggcggcctgctgcccttcctgctgctgctgagcggcctgcagaggcccacagagggcagcgagctgcctgccagaaatgccagcctcatcctgtag

SEQ ID NO: 143025 - DNA, 876 bp, synthetic construct
  misc_feature 1..876: note = Description of Artificial Sequence: Synthetic coding sequence
  source 1..876: mol_type = other DNA
atggccctggccgccctgatgattgccctgggcagcctgggcctgcacacctggcaggcccaggccgtgcccatcctgcccctgggcctggccccagacacctttgatgacacctacgtgggctgtgccgaggagatggaggagaaggccgcccccctgctgaaggaggagatggcccaccacgccctgctgcgggagagctgggaggccgcccaggagacctgggaggacaagagaagaggcctgaccctgcccccaggcttcaaggcccagaatggcatcgccatcatggtgtacaccaacagcagcaacaccctgtactgggagctgaaccaggccgtgaggactggaggcggcagccgggagctgtacatgaggcacttccccttcaaggccctgcacttctacctgatccgggccctgcagctgctgcggggcagcggcggctgcagccggggccctggagaggtggtgttccggggcgtgggcagcctgcgctttgagcccaagaggctgggggacagcgtgcggctgggccagtttgccagcagcagcctggacaaggctgtggcccacagatttggaaatgccaccctcttcagcctgaccacctgcttcggggcccccatccaggccttcagcgtcttccccaaggagcgggaggtgctgatcccccctcatgaggtgttcctggtgacccgcttcagccaggatggagcccagagcctggtgaccctgtggagctacaaccagacctgcagccacttcaactgtgcctacctgggcggggagaagaggcggggctgtgtgtctgcccctggggccctgggcaccggggacctgcacatgaccaagaggcacctgcagcagccctag

SEQ ID NO: 143026 - DNA, 720 bp, synthetic construct
  misc_feature 1..720: note = Description of Artificial Sequence: Synthetic coding sequence
  source 1..720: mol_type = other DNA
atggccctggccgccctgatgattgccctgggcagcctgggcctgcacacctggcaggcccaggccgtgcccatcctgcccctgggcctggccccagacacctttgatgacacctacgtgggctgtgccgaggagatggaggagaaggccgcccccctgctgaaggaggagatggcccaccacgccctgctgcgggagagctgggaggccgcccaggagacctgggaggacaagagaagaggcctgaccctgcccccaggcttcaaggcccagaatggcatcgccatcatggtgtacaccaacagcagcaacaccctgtactgggagctgaaccaggccgtgaggactggaggcggcagccgggagctgtacatgaggcacttccccttcaaggccctgcacttctacctgatccgggccctgcagctgctgcggggcagcggcggctgcagccggggccctggagaggtggtgttccggggcgtgggcagcctgcgctttgagcccaagaggctgggggacagcgtgcggctgggccagtttgccagcagcagcctggacaaggctgtggcccacagatttggagagaagaggcggggctgtgtgtctgcccctggggtgcagctgggcagccagagcgagggcgccagcagcctgcccccctggaagaccctgctgctggcccctggagagttccagctgtctggagtgggcccctag

SEQ ID NO: 143027 - DNA, 876 bp, synthetic construct; identical to SEQ ID NO: 143025
  misc_feature 1..876: note = Description of Artificial Sequence: Synthetic coding sequence
  source 1..876: mol_type = other DNA

SEQ ID NO: 143028 - DNA, 1401 bp, synthetic construct
  misc_feature 1..1401: note = Description of Artificial Sequence: Synthetic coding sequence
  source 1..1401: mol_type = other DNA
atggtgttcctgtctggaaatgccagtgacagcagcaactgcacccagcccccagcccctgtgaacatcagcaaggccatcctgctgggcgtcatcctgggcggcctcatcctgtttggagtgctgggcaacatcctggtgatcctgtctgtggcctgccaccgccacctgcacagcgtgacccactactacatcgtgaacctggccgtggccgacctgctgctgaccagcacagtgctgcccttcagcgccatctttgaggtgctgggctactgggccttcggccgggtcttctgcaacatctgggccgctgtggatgtgctgtgctgcacagccagcatcatgggcctgtgcatcatcagcattgaccgctacatcggcgtgtcctaccccctgcgctaccccaccatcgtgacccagaggcggggcctgatggccctgctgtgtgtgtgggccctgagcctggtgatcagcatcggccccctgtttggctggaggcagcctgccccagaagatgagaccatctgccagatcaatgaggagcccggctacgtgctcttcagcgccctgggcagcttctacctgcccctggccatcatcctggtgatgtactgccgggtgtatgtggtggccaagcgggagagccggggcctgaagagcggcctgaagacagacaagagtgacagcgagcaggtgaccctgcgcatccacaggaagaatgccccagctgggggcagcggcatggccagcgccaagaccaagacccacttctctgtgcggctgctgaagttcagccgggagaagaaggccgccaagaccctgggcatcgtggtgggctgctttgtgctgtgctggctgcccttcttcctggtgatgcccatcggcagcttcttcccagacttcaagcccagcgagaccgtcttcaagatcgtgttctggctgggctacctgaacagctgcatcaaccccatcatctacccctgcagcagccaggagttcaagaaggccttccagaatgtgctgcgcatccagtgcctgtgcaggaagcagagcagcaagcacgccctgggctacaccctgcacccccccagccaggccgtggagggccagcacaaggacatggtgcgcatccctgtgggcagccgggagaccttctaccgcatcagcaagacagatggagtgtgtgagtggaagttcttcagctccatgccccggggcagcgcccgcatcaccgtgtccaaggaccagagcagctgcaccacagcccgggtgcgcagcaagagcttcctgcaggtgtgctgctgcgtgggccccagcacccccagcctggacaagaaccaccaggtgcccaccatcaaggtgcacaccatcagcctgtctgaaaatggagaggaggtgtag

SEQ ID NO: 143029 - DNA, 1368 bp, synthetic construct
  misc_feature 1..1368: note = Description of Artificial Sequence: Synthetic coding sequence
  source 1..1368: mol_type = other DNA
atggtgttcctgtctggaaatgccagtgacagcagcaactgcacccagcccccagcccctgtgaacatcagcaaggccatcctgctgggcgtcatcctgggcggcctcatcctgtttggagtgctgggcaacatcctggtgatcctgtctgtggcctgccaccgccacctgcacagcgtgacccactactacatcgtgaacctggccgtggccgacctgctgctgaccagcacagtgctgcccttcagcgccatctttgaggtgctgggctactgggccttcggccgggtcttctgcaacatctgggccgctgtggatgtgctgtgctgcacagccagcatcatgggcctgtgcatcatcagcattgaccgctacatcggcgtgtcctaccccctgcgctaccccaccatcgtgacccagaggcggggcctgatggccctgctgtgtgtgtgggccctgagcctggtgatcagcatcggccccctgtttggctggaggcagcctgccccagaagatgagaccatctgccagatcaatgaggagcccggctacgtgctcttcagcgccctgggcagcttctacctgcccctggccatcatcctggtgatgtactgccgggtgtatgtggtggccaagcgggagagccggggcctgaagagcggcctgaagacagacaagagtgacagcgagcaggtgaccctgcgcatccacaggaagaatgccccagctgggggcagcggcatggccagcgccaagaccaagacccacttctctgtgcggctgctgaagttcagccgggagaagaaggccgccaagaccctgggcatcgtggtgggctgctttgtgctgtgctggctgcccttcttcctggtgatgcccatcggcagcttcttcccagacttcaagcccagcgagaccgtcttcaagatcgtgttctggctgggctacctgaacagctgcatcaaccccatcatctacccctgcagcagccaggagttcaagaaggccttccagaatgtgctgcgcatccagtgcctgtgcaggaagcagagcagcaagcacgccctgggctacaccctgcacccccccagccaggccgtggagggccagcacaaggacatggtgcgcatccctgtgggcagccgggagaccttctaccgcatcagcaagacagatggagtgtgtgagtggaagttcttcagctccatgccccggggcagcgcccgcatcaccgtgtccaaggaccagagcagctgcaccacagcccggcggggcatggactgccgctacttcaccaagaactgccgggagcacatcaagcacgtgaacttcatgatgccaccctggaggaaaggaagtgagtgctag

SEQ ID NO: 143030 - DNA, 975 bp, synthetic construct
  misc_feature 1..975: note = Description of Artificial Sequence: Synthetic coding sequence
  source 1..975: mol_type = other DNA
atggtgttcctgtctggaaatgccagtgacagcagcaactgcacccagcccccagcccctgtgaacatcagcaaggccatcctgctgggcgtcatcctgggcggcctcatcctgtttggagtgctgggcaacatcctggtgatcctgtctgtggcctgccaccgccacctgcacagcgtgacccactactacatcgtgaacctggccgtggccgacctgctgctgaccagcacagtgctgcccttcagcgccatctttgaggtgctgggctactgggccttcggccgggtcttctgcaacatctgggccgctgtggatgtgctgtgctgcacagccagcatcatgggcctgtgcatcatcagcattgaccgctacatcggcgtgtcctaccccctgcgctaccccaccatcgtgacccagaggcggggcctgatggccctgctgtgtgtgtgggccctgagcctggtgatcagcatcggccccctgtttggctggaggcagcctgccccagaagatgagaccatctgccagatcaatgaggagcccggctacgtgctcttcagcgccctgggcagcttctacctgcccctggccatcatcctggtgatgtactgccgggtgtatgtggtggccaagcgggagagccggggcctgaagagcggcctgaagacagacaagagtgacagcgagcaggtgaccctgcgcatccacaggaagaatgccccagctgggggcagcggcatggccagcgccaagaccaagacccacttctctgtgcggctgctgaagttcagccgggagaagaaggccgccaagaccctgggcatcgtggtgggctgctttgtgctgtgctggctgcccttcttcctggtgatgcccatcggcacctacatcctgaagtatgatgtgctcttctggaggaagggcctgtctgtgtgcacccggctgcgggagaggaaggagatcaagaactag

SEQ ID NO: 143031 - DNA, 1029 bp, synthetic construct
  misc_feature 1..1029: note = Description of Artificial Sequence: Synthetic coding sequence
  source 1..1029: mol_type = other DNA
atggtgttcctgtctggaaatgccagtgacagcagcaactgcacccagcccccagcccctgtgaacatcagcaaggccatcctgctgggcgtcatcctgggcggcctcatcctgtttggagtgctgggcaacatcctggtgatcctgtctgtggcctgccaccgccacctgcacagcgtgacccactactacatcgtgaacctggccgtggccgacctgctgctgaccagcacagtgctgcccttcagcgccatctttgaggtgctgggctactgggccttcggccgggtcttctgcaacatctgggccgctgtggatgtgctgtgctgcacagccagcatcatgggcctgtgcatcatcagcattgaccgctacatcggcgtgtcctaccccctgcgctaccccaccatcgtgacccagaggcggggcctgatggccctgctgtgtgtgtgggccctgagcctggtgatcagcatcggccccctgtttggctggaggcagcctgccccagaagatgagaccatctgccagatcaatgaggagcccggctacgtgctcttcagcgccctgggcagcttctacctgcccctggccatcatcctggtgatgtactgccgggtgtatgtggtggccaagcgggagagccggggcctgaagagcggcctgaagacagacaagagtgacagcgagcaggtgaccctgcgcatccacaggaagaatgccccagctgggggcagcggcatggccagcgccaagaccaagacccacttctctgtgcggctgctgaagttcagccgggagaagaaggccgccaagaccctgggcatcgtggtgggctgctttgtgctgtgctggctgcccttcttcctggtgatgcccattgatgaggagacagaggcccaggagggcaagaatgacagccccagcttcaagcagcctgtgcaccacgccgctgtgctgggcctggaggtgatggagaaggagaacctggagggcgtgtccaggaaggacacctgtggggtgtggtag

SEQ ID NO: 143032 - DNA, 1401 bp, synthetic construct; identical to SEQ ID NO: 143028
  misc_feature 1..1401: note = Description of Artificial Sequence: Synthetic coding sequence
  source 1..1401: mol_type = other DNA

SEQ ID NO: 143033 - DNA, 1119 bp, synthetic construct
  misc_feature 1..1119: note = Description of Artificial Sequence: Synthetic coding sequence
  source 1..1119: mol_type = other DNA
atggtgttcctgtctggaaatgccagtgacagcagcaactgcacccagcccccagcccctgtgaacatcagcaaggccatcctgctgggcgtcatcctgggcggcctcatcctgtttggagtgctgggcaacatcctggtgatcctgtctgtggcctgccaccgccacctgcacagcgtgacccactactacatcgtgaacctggccgtggccgacctgctgctgaccagcacagtgctgcccttcagcgccatctttgaggtgctgggctactgggccttcggccgggtcttctgcaacatctgggccgctgtggatgtgctgtgctgcacagccagcatcatgggcctgtgcatcatcagcattgaccgctacatcggcgtgtcctaccccctgcgctaccccaccatcgtgacccagaggcggggcctgatggccctgctgtgtgtgtgggccctgagcctggtgatcagcatcggccccctgtttggctggaggcagcctgccccagaagatgagaccatctgccagatcaatgaggagcccggctacgtgctcttcagcgccctgggcagcttctacctgcccctggccatcatcctggtgatgtactgccgggtgtatgtggtggccaagcgggagagccggggcctgaagagcggcctgaagacagacaagagtgacagcgagcaggtgaccctgcgcatccacaggaagaatgccccagctgggggcagcggcatggccagcgccaagaccaagacccacttctctgtgcggctgctgaagttcagccgggagaagaaggccgccaagaccctgggcatcgtggtgggctgctttgtgctgtgctggctgcccttcttcctggtgatgcccatcggcacccacacccatgacatgaagccagccagccggccccggctgctgagcctgctgcccaaggagggggagcacgagacccaccactggagctgtgaccccctgagcctggagagcacccctggggcccaggagccctgcctgaccctgggcttcaccagcctgagcagcatccacctgaccaaggcccagatccagcacgtgacagtgacagacaccgggaagacagtgacctag

SEQ ID NO: 143034 - DNA, 1290 bp, synthetic construct
  misc_feature 1..1290: note = Description of Artificial Sequence: Synthetic coding sequence
  source 1..1290: mol_type = other DNA
atggtgttcctgtctggaaatgccagtgacagcagcaactgcacccagcccccagcccctgtgaacatcagcaaggccatcctgctgggcgtcatcctgggcggcctcatcctgtttggagtgctgggcaacatcctggtgatcctgtctgtggcctgccaccgccacctgcacagcgtgacccactactacatcgtgaacctggccgtggccgacctgctgctgaccagcacagtgctgcccttcagcgccatctttgaggtgctgggctactgggccttcggccgggtcttctgcaacatctgggccgctgtggatgtgctgtgctgcacagccagcatcatgggcctgtgcatcatcagcattgaccgctacatcggcgtgtcctaccccctgcgctaccccaccatcgtgacccagaggcggggcctgatggccctgctgtgtgtgtgggccctgagcctggtgatcagcatcggccccctgtttggctggaggcagcctgccccagaagatgagaccatctgccagatcaatgaggagcccggctacgtgctcttcagcgccctgggcagcttctacctgcccctggccatcatcctggtgatgtactgccgggtgtatgtggtggccaagcgggagagccggggcctgaagagcggcctgaagacagacaagagtgacagcgagcaggtgaccctgcgcatccacaggaagaatgccccagctgggggcagcggcatggccagcgccaagaccaagacccacttctctgtgcggctgctgaagttcagccgggagaagaaggccgccaagaccctgggcatcgtggtgggctgctttgtgctgtgctggctgcccttcttcctggtgatgcccatcggcagcttcttcccagacttcaagcccagcgagaccgtcttcaagatcgtgttctggctgggctacctgaacagctgcatcaaccccatcatctacccctgcagcagccaggagttcaagaaggccttccagaatgtgctgcgcatccagtgcctgtgcaggaagcagagcagcaagcacgccctgggctacaccctgcacccccccagccaggccgtggagggccagcacaaggacatggtgcgcatccctgtgggcagccgggagaccttctaccgcatcagcaagacagatggagtgtgtgagtggaagttcttcagctccatgccccggggcagcgcccgcatcaccgtgtccaaggaccagagcagctgcaccacagcccggggccacacccccatgacctag

SEQ ID NO: 143035 - DNA, 1428 bp, synthetic construct
  misc_feature 1..1428: note = Description of Artificial Sequence: Synthetic coding sequence
  source 1..1428: mol_type = other DNA
atggtgttcctgtctggaaatgccagtgacagcagcaactgcacccagcccccagcccctgtgaacatcagcaaggccatcctgctgggcgtcatcctgggcggcctcatcctgtttggagtgctgggcaacatcctggtgatcctgtctgtggcctgccaccgccacctgcacagcgtgacccactactacatcgtgaacctggccgtggccgacctgctgctgaccagcacagtgctgcccttcagcgccatctttgaggtgctgggctactgggccttcggccgggtcttctgcaacatctgggccgctgtggatgtgctgtgctgcacagccagcatcatgggcctgtgcatcatcagcattgaccgctacatcggcgtgtcctaccccctgcgctaccccaccatcgtgacccagaggcggggcctgatggccctgctgtgtgtgtgggccctgagcctggtgatcagcatcggccccctgtttggctggaggcagcctgccccagaagatgagaccatctgccagatcaatgaggagcccggctacgtgctcttcagcgccctgggcagcttctacctgcccctggccatcatcctggtgatgtactgccgggtgtatgtggtggccaagcgggagagccggggcctgaagagcggcctgaagacagacaagagtgacagcgagcaggtgaccctgcgcatccacaggaagaatgccccagctgggggcagcggcatggccagcgccaagaccaagacccacttctctgtgcggctgctgaagttcagccgggagaagaaggccgccaagaccctgggcatcgtggtgggctgctttgtgctgtgctggctgcccttcttcctggtgatgcccatcggcagcttcttcccagacttcaagcccagcgagaccgtcttcaagatcgtgttctggctgggctacctgaacagctgcatcaaccccatcatctacccctgcagcagccaggagttcaagaaggccttccagaatgtgctgcgcatccagtgcctgtgcaggaagcagagcagcaagcacgccctgggctacaccctgcacccccccagccaggccgtggagggccagcacaaggacatggtgcgcatccctgtgggcagccgggagaccttctaccgcatcagcaagacagatggagtgtgtgagtggaagttcttcagctccatgccccggggcagcgcccgcatcaccgtgtccaaggaccagagcagctgcaccacagcccggaccaagagccgctctgtgacccggctggagtgcagcggcatgatcctggcccactgcaacctgcggctgcccggcagccgggacagccctgccagcgccagccaggccgccggcaccaccggcatgtgccaccaggctgatgccacccggcccagctag

SEQ ID NO: 143036 - DNA, 1113 bp, synthetic construct
  misc_feature 1..1113: note = Description of Artificial Sequence: Synthetic coding sequence
  source 1..1113: mol_type = other DNA
atggtgttcctgtctggaaatgccagtgacagcagcaactgcacccagcccccagcccctgtgaacatcagcaaggccatcctgctgggcgtcatcctgggcggcctcatcctgtttggagtgctgggcaacatcctggtgatcctgtctgtggcctgccaccgccacctgcacagcgtgacccactactacatcgtgaacctggccgtggccgacctgctgctgaccagcacagtgctgcccttcagcgccatctttgaggtgctgggctactgggccttcggccgggtcttctgcaacatctgggccgctgtggatgtgctgtgctgcacagccagcatcatgggcctgtgcatcatcagcattgaccgctacatcggcgtgtcctaccccctgcgctaccccaccatcgtgacccagaggcggggcctgatggccctgctgtgtgtgtgggccctgagcctggtgatcagcatcggccccctgtttggctggaggcagcctgccccagaagatgagaccatctgccagatcaatgaggagcccggctacgtgctcttcagcgccctgggcagcttctacctgcccctggccatcatcctggtgatgtactgccgggtgtatgtggtggccaagcgggagagccggggcctgaagagcggcctgaagacagacaagagtgacagcgagcaggtgaccctgcgcatccacaggaagaatgccccagctgggggcagcggcatggccagcgccaagaccaagacccacttctctgtgcggctgctgaagttcagccgggagaagaaggccgccaagaccctgggcatcgtggtgggctgctttgtgctgtgctggctgcccttcttcctggtgatgcccattgatgaggtgtccctgtgccaccaggccggcgtgcagtggcatgacctgggcagcctgcagcccccacctcctggcttcaagcgcttcagctgcctgagcctgcccagctcctgggactacagagatgtgcccccaggaagaagacaccaggcccagctgatctttgtgttcctggtggagaccggcttccaccacgtgggccaggatgacctggacctgctgaccagctag

SEQ ID NO: 143037 - DNA, 1284 bp, synthetic construct
  misc_feature 1..1284: note = Description of Artificial Sequence: Synthetic coding sequence
  source 1..1284: mol_type = other DNA
atggtgttcctgtctggaaatgccagtgacagcagcaactgcacccagcccccagcccctgtgaacatcagcaaggccatcctgctgggcgtcatcctgggcggcctcatcctgtttggagtgctgggcaacatcctggtgatcctgtctgtggcctgccaccgccacctgcacagcgtgacccactactacatcgtgaacctggccgtggccgacctgctgctgaccagcacagtgctgcccttcagcgccatctttgaggtgctgggctactgggccttcggccgggtcttctgcaacatctgggccgctgtggatgtgctgtgctgcacagccagcatcatgggcctgtgcatcatcagcattgaccgctacatcggcgtgtcctaccccctgcgctaccccaccatcgtgacccagaggcggggcctgatggccctgctgtgtgtgtgggccctgagcctggtgatcagcatcggccccctgtttggctggaggcagcctgccccagaagatgagaccatctgccagatcaatgaggagcccggctacgtgctcttcagcgccctgggcagcttctacctgcccctggccatcatcctggtgatgtactgccgggtgtatgtggtggccaagcgggagagccggggcctgaagagcggcctgaagacagacaagagtgacagcgagcaggtgaccctgcgcatccacaggaagaatgccccagctgggggcagcggcatggccagcgccaagaccaagacccacttctctgtgcggctgctgaagttcagccgggagaagaaggccgccaagaccctgggcatcgtggtgggctgctttgtgctgtgctggctgcccttcttcctggtgatgcccatcggcagcttcttcccagacttcaagcccagcgagaccgtcttcaagatcgtgttctggctgggctacctgaacagctgcatcaaccccatcatctacccctgcagcagccaggagttcaagaaggccttccagaatgtgctgcgcatccagtgcctgtgcaggaagcagagcagcaagcacgccctgggctacaccctgcacccccccagccaggccgtggagggccagcacaaggacatggtgcgcatccctgtgggcagccgggagaccttctaccgcatcagcaagacagatggagtgtgtgagtggaagttcttcagctccatgccccggggcagcgcccgcatcaccgtgtccaaggaccagagcagctgcaccacagcccggagcagcggcttctag

SEQ ID NO: 143038 - DNA, 1563 bp, synthetic construct
  misc_feature 1..1563: note = Description of Artificial Sequence: Synthetic coding sequence
  source 1..1563: mol_type = other DNA
atgaacccagacctggacaccggccacaacaccagcgccccagcccactggggcgagctgaagaatgccaacttcaccggccccaaccagaccagcagcaacagcaccctgccccagctggacatcacccgggccatctctgtgggcctggtgctgggcgccttcatcctgtttgccatcgtgggcaacatcctggtgatcctgtctgtggcctgcaacagacacctgcggacccccaccaactacttcatcgtgaacctggccatggctgacctgctgctgtccttcaccgtgctgcccttctctgctgccctggaggtgctgggctactgggtgctgggccgcatcttctgtgacatctgggccgctgtggatgtgctgtgctgcacagccagcatcctgagcctgtgtgccatcagcattgaccgctacatcggcgtgcgctacagcctgcagtaccccaccctggtgaccaggaggaaggccatcctggccctgctgtctgtgtgggtgctgagcaccgtcatcagcatcggccccctgctgggctggaaggagcccgccccaaatgatgacaaggaatgtggggtgacagaggagcccttctacgccctcttcagcagcctgggcagcttctacatccccctggccgtcatcctggtgatgtactgccgggtgtacatcgtggccaagaggaccaccaagaacctggaggccggcgtgatgaaggagatgagcaacagcaaggagctgaccctgcgcatccacagcaagaacttccacgaggacaccctgagcagcaccaaggccaagggccacaaccccaggagcagcattgctgtgaagctgttcaagttcagccgggagaagaaggccgccaagaccctgggcatcgtggtgggcatgttcatcctgtgctggctgcccttcttcatcgccctgcccctgggcagcctcttcagcaccctgaagcccccagatgctgtgttcaaggtggtgttctggctgggctacttcaacagctgcctgaaccccatcatctacccctgcagcagcaaggagttcaagagggcctttgtgcgcatcctgggctgccagtgccggggccggggcagaagaagaagaagaagaagaagaaggctgggcggctgtgcctacacctaccggccctggacccggggcggcagcctggagaggagccagagcaggaaggacagcctggatgacagcggcagctgcctgagcggcagccagaggaccctgcccagcgccagccccagccctggctacctgggccgcggggcccctcctcctgtggagctgtgtgccttccctgagtggaaggcccctggggccctgctgagcctgcctgcccctgagcccccaggccggcggggcagacatgacagcggccccctcttcaccttcaagctgctgacagagcctgagagccctggaacagatggaggagccagcaatggaggctgtgaggccgctgctgatgtggccaacggccagcccggcttcaagagcaacatgcccctggcccctggccagttctag

SEQ ID NO: 143039 - DNA, 1719 bp, synthetic construct
  misc_feature 1..1719: note = Description of Artificial Sequence: Synthetic coding sequence
  source 1..1719: mol_type = other DNA
atgaccttccgggacctgctgtctgtgtcctttgagggccccaggccagacagcagcgctgggggcagcagcgctgggggcggcggcggcagcgctgggggcgccgcccccagcgagggccctgctgtgggcggcgtgcctggaggagctgggggcggcggcggcgtggtgggcgccggcagcggggaggacaacagaagcagcgctggggagcccggcagcgctggagctggaggagatgtgaatggaacagctgctgtgggcggcctggtggtgtctgcccagggcgtgggcgtgggcgtcttcctggccgccttcatcctgatggctgtggccggcaacctgctggtgatcctgtctgtggcctgcaacagacacctgcagacagtgaccaactacttcatcgtgaacctggccgtggccgacctgctgctgagcgccaccgtgctgcccttcagcgccaccatggaggtgctgggcttctgggccttcggccgggccttctgtgatgtgtgggccgctgtggatgtgctgtgctgcacagccagcatcctgagcctgtgcaccatctctgtggacagatatgtgggcgtgcgccacagcctgaagtacccagccatcatgacagagaggaaggccgccgccatcctggccctgctgtgggtggtggccctggtggtgtctgtgggccccctgctgggctggaaggagcctgtgcccccagatgagcgcttctgtggcatcacagaggaggccggctatgctgtgttcagctctgtgtgcagcttctacctgcccatggccgtcatcgtggtgatgtactgccgggtgtatgtggtggcccggagcaccaccaggagcctggaggccggcgtgaagcgggagcggggcaaggccagcgaggtggtgctgcgcatccactgcagaggagctgccactggagcagatggagcccacggcatgaggtctgccaagggccacaccttccgcagcagcctgtctgtgcggctgctgaagttcagccgggagaagaaggccgccaagaccctggccatcgtggtgggcgtgtttgtgctgtgctggttccccttcttctttgtgctgcccctgggcagcctcttcccccagctgaagcccagcgagggcgtcttcaaggtgatcttctggctgggctacttcaacagctgtgtgaaccccctcatctacccctgcagcagccgggagttcaagagggccttcctgcggctgctgcgctgccagtgcagaagaagaagaagaagaagacccctgtggagggtgtatggccaccactggagggccagcaccagcggcctgcggcaggactgtgcccccagcagtggagatgcccctcctggggcccccctggccctgacagccctgcctgaccctgaccctgagcccccaggcaccccagagatgcaggcccctgtggccagcaggaggaagccacccagcgccttccgggagtggaggctgctgggccccttccggcggcccaccacccagctgcgggccaaggtgagcagcctgagccacaagatccgggccggcggggcccagagagctgaggccgcctgtgcccagaggtctgaggtggaggccgtgtccctgggcgtgccccatgaggtggccgagggcgccacctgccaggcctatgagctggccgactacagcaacctgcgggagacagacatctag

SEQ ID NO: 143040 - DNA, 1344 bp, synthetic construct
  misc_feature 1..1344: note = Description of Artificial Sequence: Synthetic coding sequence
  source 1..1344: mol_type = other DNA
atggaccaccaggacccctacagcgtgcaggccacagctgccatcgctgctgccatcaccttcctgatcctcttcaccatctttggaaatgccctggtgatcctggccgtgctgaccagccgcagcctgcgggccccccagaacctcttcctggtgtccctggccgctgctgacatcctggtggccaccctcatcatccccttcagcctggccaatgagctgctgggctactggtacttccggaggacctggtgtgaggtgtacctggccctggatgtgctcttctgcaccagcagcatcgtgcacctgtgtgccatcagcctggaccgctactgggccgtgtcccgggccctggagtacaacagcaagaggaccccccggcgcatcaagtgcatcatcctgactgtgtggctgattgctgctgtgatcagcctgcccccactcatctacaagggggaccagggcccccagccccggggccggccccagtgcaagctgaaccaggaggcctggtacatcctggccagcagcatcggcagcttctttgccccctgcctgatcatgatcctggtgtacctgcgcatctacctgattgccaagaggagcaacagaagaggcccccgggccaagggcggccctggccagggcgagagcaagcagcccaggccagaccatggaggagccctggccagcgccaagctgcctgccctggcctctgtggccagcgcccgggaggtgaatggccacagcaagagcactggagagaaggaggagggggagaccccagaggacaccggcacccgggccctgcccccatcctgggccgccctgcccaacagcggccagggccagaaggagggcgtgtgtggggccagcccagaagatgaagctgaggaggaggaggaggaggaggaggagtgtgagccccaggccgtgcctgtgtccccagccagcgcctgcagcccccccctgcagcagccccagggcagccgggtgctggccaccctgcggggccaggtgctgctgggccggggcgtgggcgccatcggcggccagtggtggaggcggcgggcccagctgacccgggagaagcgcttcacctttgtgctggccgtggtgattggagtgtttgtgctgtgctggttccccttcttcttctcctacagcctgggcgccatctgccccaagcactgcaaggtgccccacggcctcttccagttcttcttctggattggctactgcaacagcagcctgaaccctgtgatctacaccatcttcaaccaggacttcagaagagccttccgccgcatcctgtgccggccctggacccagacagcctggtag

SEQ ID NO: 143041 - DNA, 1389 bp, synthetic construct
  misc_feature 1..1389: note = Description of Artificial Sequence: Synthetic coding sequence
  source 1..1389: mol_type = other DNA
atggccagccctgccctggccgccgccctggccgtggccgctgctgctggccccaatgccagcggggccggggagcggggcagcggcggcgtggccaatgccagcggggcctcctggggccccccccggggccagtacagcgctggagctgtggccggcctggccgctgtggtgggcttcctgattgtgttcaccgtggtgggcaatgtgctggtggtgattgctgtgctgaccagccgggccctgcgggccccccagaacctcttcctggtgtccctggccagcgctgacatcctggtggccaccctggtgatgcccttcagcctggccaatgagctgatggcctactggtacttcggccaggtgtggtgtggggtgtacctggccctggatgtgctcttctgcaccagcagcatcgtgcacctgtgtgccatcagcctggaccgctactggagcgtgacccaggccgtggagtacaacctgaagaggaccccccggcgggtgaaggccaccatcgtggccgtgtggctgatctctgctgtgatctccttcccccccctggtgtccctgtaccggcagccagatggagctgcctacccccagtgtggcctgaatgatgagacctggtacatcctgagcagctgcatcggcagcttctttgccccctgcctgatcatgggcctggtgtatgcccgcatctacagagtggccaagctgcggaccaggaccctgtctgagaagagggcccctgtgggcccagatggagccagccccaccacagaaaatggcctgggcgctgctgctggggccggggagaatggccactgtgcccctcctccagcagatgtggagccagatgagagcagcgctgctgctgagaggagaagaagaagaggagccctgcggcggggcggcagaagaagagctggagctgagggcggggccggcggcgcagatggccagggcgccggccctggagctgctgagagcggggccctgacagccagccgcagccctggccctgggggccgcctgagccgggccagcagccgctctgtggagttcttcctgagcagaagaagaagagcccggagctctgtgtgcaggaggaaggtggcccaggcccgggagaagcgcttcacctttgtgctggccgtggtgatgggcgtgtttgtgctgtgctggttccccttcttcttctcctacagcctgtatggcatctgccgggaggcctgccaggtgcccggccccctcttcaagttcttcttctggattggctactgcaacagcagcctgaaccctgtgatctacaccgtcttcaaccaggacttcagaagaagcttcaagcacatcctcttcagaagaagaagaagaggcttccggcagtag

SEQ ID NO: 143042 - DNA, 2070 bp, synthetic construct
  misc_feature 1..2070: note = Description of Artificial Sequence: Synthetic coding sequence
  source 1..2070: mol_type = other DNA
atggctgacctggaggccgtgctggctgatgtgtcctacctgatggccatggagaagagcaaggccaccccagctgcccgggccagcaagaagatcctgctgcctgagcccagcatccgctctgtgatgcagaagtacctggaggacagaggagaggtgacctttgagaagatcttcagccagaagctgggctacctgctcttccgggacttctgcctgaaccacctggaggaggcccggcccctggtggagttctatgaggagatcaagaagtatgagaagctggagacagaggaggagcgggtggcccggagccgggagatctttgacagctacatcatgaaggagctgctggcctgcagccaccccttcagcaagagcgccacagaacatgtgcagggccacctgggcaagaagcaggtgcccccagacctcttccagccctacatcgaggagatctgccagaacctgcggggagatgtgttccagaagttcatcgagagtgacaagttcacccgcttctgccagtggaagaatgtggagctgaacatccacctgaccatgaatgacttctctgtgcaccgcatcatcggccggggcggctttggagaggtgtatggctgcaggaaggctgacaccgggaagatgtatgccatgaagtgcctggacaagaagaggatcaagatgaagcagggcgagaccctggccctgaatgaaagaatcatgctgagcctggtgtccactggagactgccccttcatcgtgtgcatgtcctatgccttccacaccccagacaagctgtccttcatcctggacctgatgaatggaggagacctgcactaccacctgagccagcacggcgtcttcagcgaggccgacatgaggttctacgccgctgagatcatcctgggcctggagcacatgcacaacagatttgtggtgtacagagacctgaagccagccaacatcctgctggatgagcacggccacgtgcgcatcagtgacctgggcctggcctgtgacttcagcaagaagaagccccacgcctctgtgggcacccacggctacatggcccctgaggtgctgcagaagggcgtggcctatgacagcagcgctgactggttcagcctgggctgcatgctgttcaagctgctgcggggccacagccccttccggcagcacaagaccaaggacaagcatgaaattgacaggatgaccctgaccatggctgtggagctgcctgacagcttcagccctgagctgcggagcctgctggagggcctgctgcagagagatgtgaacagaaggctgggctgcctgggccgcggggcccaggaggtgaaggagagccccttcttccgcagcctggactggcagatggtgttcctgcagaagtaccccccacccctcatccccccaagaggagaggtgaatgctgctgatgcctttgatattggcagctttgatgaggaggacaccaagggcatcaagctgctggacagcgaccaggagctgtacagaaacttccccctgaccatcagcgagcgctggcagcaggaggtggccgagaccgtgtttgacaccatcaatgctgagacagaccggctggaggccaggaagaaggccaagaacaagcagctgggccatgaagaagattatgccctgggcaaggactgcatcatgcacggctacatgagcaagatgggcaaccccttcctgacccagtggcagaggcgctacttctacctgttccccaaccggctggagtggagaggagagggggaggccccccagagcctgctgaccatggaggagatccagagcgtggaggagacccagatcaaggagaggaagtgcctgctgctgaagatccggggcggcaagcagttcatcctgcagtgtgacagcgaccctgagctggtgcagtggaagaaggagctgagagatgcctaccgggaggcccagcagctggtgcagagggtgcccaagatgaagaacaagcccaggagccctgtggtggagctgagcaaggtgcccctggtgcagaggggcagcgccaacggcctgtag

SEQ ID NO: 143043 - DNA, 2067 bp, synthetic construct
  misc_feature 1..2067: note = Description of Artificial Sequence: Synthetic coding sequence
  source 1..2067: mol_type = other DNA
atggctgacctggaggccgtgctggctgatgtgtcctacctgatggccatggagaagagcaaggccaccccagctgcccgggccagcaagagaattgtgctgcctgagcccagcatccgctctgtgatgcagaagtacctggccgagagaaatgagatcacctttgacaagatcttcaaccagaagattggcttcctgctcttcaaggacttctgcctgaatgagatcaatgaagctgtgccccaggtgaagttctatgaggagatcaaggagtatgagaagctggacaatgaagaagatcggctgtgccgcagccggcagatctatgatgcctacatcatgaaggagctgctgagctgcagccaccccttcagcaagcaggccgtggagcacgtgcagagccacctgagcaagaagcaggtgaccagcaccctcttccagccctacatcgaggagatctgtgagagcctgcggggggacatcttccagaagttcatggagagtgacaagttcacccgcttctgccagtggaagaatgtggagctgaacatccacctgaccatgaatgagttctctgtgcaccgcatcatcggccggggcggctttggagaggtgtatggctgcaggaaggctgacaccgggaagatgtatgccatgaagtgcctggacaagaagaggatcaagatgaagcagggcgagaccctggccctgaatgaaagaatcatgctgagcctggtgtccactggagactgccccttcatcgtgtgcatgacctacgccttccacaccccagacaagctgtgcttcatcctggacctgatgaatggaggagacctgcactaccacctgagccagcacggcgtcttcagcgagaaggagatgaggttctacgccacagagatcatcctgggcctggagcacatgcacaacagatttgtggtgtacagagacctgaagccagccaacatcctgctggatgagcacggccacgcccgcatcagtgacctgggcctggcctgtgacttcagcaagaagaagccccacgcctctgtgggcacccacggctacatggcccctgaggtgctgcagaagggcacagcctatgacagcagcgctgactggttcagcctgggctgcatgctgttcaagctgctgcggggccacagccccttccggcagcacaagaccaaggacaagcatgaaattgacaggatgaccctgactgtgaatgtggagctgcctgacaccttcagccctgagctgaagagcctgctggagggcctgctgcagagagatgtgtccaagaggctgggctgccacggcggcggcagccaggaggtgaaggagcacagcttcttcaagggcgtggactggcagcacgtgtacctgcagaagtaccccccacccctcatccccccaagaggagaggtgaatgctgctgatgcctttgatattggcagctttgatgaggaggacaccaagggcatcaagctgctggactgtgaccaggagctgtacaagaacttccccctggtgatcagcgagcgctggcagcaggaggtgacagagaccgtgtatgaggccgtgaatgctgacacagacaagattgaggccaggaagagggccaagaacaagcagctgggccatgaagaagattatgccctgggcaaggactgcatcatgcacggctacatgctgaagctgggcaaccccttcctgacccagtggcagaggcgctacttctacctgttccccaaccggctggagtggagaggagagggggagagccggcagaacctgctgaccatggagcagatcctgtctgtggaggagacccagatcaaggacaagaagtgcatcctcttccgcatcaagggcggcaagcagtttgtgctgcagtgtgagagtgaccctgagtttgtgcagtggaagaaggagctgaatgagaccttcaaggaggcccagaggctgctgcggcgggcccccaagttcctgaacaagcccaggagcggcaccgtggagctgcccaagcccagcctgtgccacaggaacagcaatggcctgtag

SEQ ID NO: 143044 - DNA, 1164 bp, synthetic construct
  misc_feature 1..1164: note = Description of Artificial Sequence: Synthetic coding sequence
  source 1..1164: mol_type = other DNA
atggctgacctggaggccgtgctggctgatgtgtcctacctgatggccatggagaagagcaaggccaccccagctgcccgggccagcaagagaattgtgctgcctgagcccagcatccgctctgtgatgcagaagtacctggccgagagaaatgagatcacctttgacaagatcttcaaccagaagattggcttcctgctcttcaaggacttctgcctgaatgagatcaatgaagctgtgccccaggtgaagttctatgaggagatcaaggagtatgagaagctggacaatgaagaagatcggctgtgccgcagccggcagatctatgatgcctacatcatgaaggagctgctgagctgcagccaccccttcagcaagcaggccgtggagcacgtgcagagccacctgagcaagaagcaggtgaccagcaccctcttccagccctacatcgaggagatctgtgagagcctgcggggggacatcttccagaagttcatggagagtgacaagttcacccgcttctgccagtggaagaatgtggagctgaacatccacctgaccatgaatgagttctctgtgcaccgcatcatcggccggggcggctttggagaggtgtatggctgcaggaaggctgacaccgggaagatgtatgccatgaagtgcctggacaagaagaggatcaagatgaagcagggcgagaccctggccctgaatgaaagaatcatgctgagcctggtgtccactggagactgccccttcatcgtgtgcatgacctacgccttccacaccccagacaagctgtgcttcatcctggacctgatgaatggaggagacctgcactaccacctgagccagcacggcgtcttcagcgagaaggagatgaggttctacgccacagagatcatcctgggcctggagcacatgcacaacagatttgtggtgtacagagacctgaagccagccaacatcctgctggatgagcacggccacgcccgcatcagtgacctgggcctggcctgtgacttcagcaagaagaagccccacgcctctgtgggcacccacggctacatggcccctgaggtgctgcagaagggcacagcctatgacagcagcgctgactggttcagcctgggctgcatgctgttcaagctgctgcggggctag

SEQ ID NO: 143045 - DNA, 1434 bp, synthetic construct
  misc_feature 1..1434: note = Description of Artificial Sequence: Synthetic coding sequence
  source 1..1434: mol_type = other DNA
atgggcgccggcgtgctggtgctgggcgccagcgagcccggcaacctgagcagcgctgcccccctgcctgatggagctgccacagctgcccggctgctggtgcctgccagccccccagccagcctgctgcccccagccagcgagagccctgagcccctgagccagcagtggacagctggcatgggcctgctgatggccctgattgtgctgctgattgtggccggaaatgtgctggtgattgtggccatcgccaagaccccccggctgcagaccctgaccaacctcttcatcatgagcctggccagcgctgacctggtgatgggcctgctggtggtgccctttggagccaccatcgtggtgtggggccgctgggagtatggcagcttcttctgtgagctgtggacctctgtggatgtgctgtgtgtgacagccagcattgagaccctgtgtgtgattgccctggaccgctacctggccatcaccagccccttccgctaccagagcctgctgacccgggcccgggcccggggcctggtgtgcaccgtgtgggccatcagcgccctggtgtccttcctgcccatcctgatgcactggtggagggctgagagtgatgaggcccggcgctgctacaatgaccccaagtgctgtgactttgtgaccaacagagcctatgccatcgccagctctgtggtgtccttctacgtgcccctgtgcatcatggcctttgtgtacctgcgggtcttccgggaggcccagaagcaggtgaagaagattgacagctgtgaaagacgcttcctgggcggccctgcccggccccccagccccagccccagccctgtgcctgccccagcccctcctcctggcccccccaggcctgctgctgctgctgccacagcccccctggccaacggccgggccggcaagagaagacccagccggctggtggccctgcgggagcagaaggccctgaagaccctgggcatcatcatgggcgtcttcaccctgtgctggctgcccttcttcctggccaacgtggtgaaggccttccaccgggagctggtgcctgaccggctgtttgtgttcttcaactggctgggctacgccaacagcgccttcaaccccatcatctactgccgcagcccagacttcaggaaggccttccagggcctgctgtgctgtgccaggagagctgcccggaggagacatgccacccatggagaccggccccgggccagcggctgcctggcccggcccggccccccacccagccctggggccgccagtgatgatgatgatgatgatgtggtgggcgccaccccaccagcccggctgctggagccctgggccggctgcaatggaggagctgctgctgacagcgacagcagcctggatgagccctgcaggcctggctttgccagcgagagcaaggtgtag

SEQ ID NO: 143046 - DNA, 1242 bp, synthetic construct
  misc_feature 1..1242: note = Description of Artificial Sequence: Synthetic coding sequence
  source 1..1242: mol_type = other DNA
atgggccagcctggaaatggcagcgccttcctgctggccccaaatggcagccacgccccagaccatgatgtgacccaggagagagatgaggtgtgggtggtgggcatgggcatcgtgatgagcctgattgtgctggccatcgtgtttggaaatgtgctggtgatcacagccatcgccaagtttgagcggctgcagacagtgaccaactacttcatcaccagcctggcctgtgccgacctggtgatgggcctggccgtggtgccctttggagctgcccacatcctgatgaagatgtggacctttggaaacttctggtgtgagttctggaccagcattgatgtgctgtgtgtgacagccagcattgagaccctgtgtgtgattgctgtggaccgctactttgccatcaccagccccttcaagtaccagagcctgctgaccaagaacaaggcccgggtcatcatcctgatggtgtggatcgtgtctggcctgaccagcttcctgcccatccagatgcactggtaccgggccacccaccaggaggccatcaactgctacgccaatgagacctgctgtgacttcttcaccaaccaggcctatgccatcgccagcagcatcgtgtccttctacgtgcccctggtgatcatggtgtttgtgtacagcagggtcttccaggaggccaagaggcagctgcagaagattgacaagtctgagggccgcttccacgtgcagaacctgagccaggtggagcaggacggccgcacaggccacggcctgcggcgcagcagcaagttctgcctgaaggagcacaaggccctgaagaccctgggcatcatcatgggcaccttcaccctgtgctggctgcccttcttcatcgtgaacatcgtgcacgtgatccaggacaacctgatcaggaaggaggtgtacatcctgctgaactggattggctacgtgaacagcggcttcaaccccctcatctactgccgcagcccagacttccgcatcgccttccaggagctgctgtgcctgcggcgcagcagcctgaaggcctatggaaatggctacagcagcaatggaaacacaggagagcagagcggctaccacgtggagcaggagaaggagaacaagctgctgtgtgaggacctgcccggcacagaagattttgtgggccaccagggcaccgtgcccagcgacaacatcgacagccagggcaggaactgcagcaccaatgacagcctgctgtag

SEQ ID NO: 143047 - DNA, 1227 bp, synthetic construct
  misc_feature 1..1227: note = Description of Artificial Sequence: Synthetic coding sequence
  source 1..1227: mol_type = other DNA
atggccccctggccccatgagaacagcagcctggccccctggccagacctgcccaccctggcccccaacacagccaacaccagcggcctgcccggggtgccctgggaggccgccctggccggggccctgctggccctggccgtgctggccaccgtgggcggcaacctgctggtgattgtggccatcgcctggaccccccggctgcagaccatgaccaacgtgtttgtgaccagcctggccgctgctgacctggtgatgggcctgctggtggtgcccccagctgccaccctggccctgaccggccactggcccctgggcgccaccggctgtgagctgtggacctctgtggatgtgctgtgtgtgacagccagcattgagaccctgtgtgccctggccgtggaccgctacctggccgtgaccaaccccctgcgctatggagccctggtgaccaagagatgtgccaggacagctgtggtgctggtgtgggtggtgtctgctgctgtgtcctttgcccccatcatgagccagtggtggagggtgggcgcagatgctgaggcccagcgctgccacagcaacccccgctgctgtgcctttgccagcaacatgccctacgtgctgctgagcagctctgtgtccttctacctgcccctgctggtgatgctgtttgtgtatgcccgggtgtttgtggtggccacccggcagctgcggctgctgcggggggagctgggccgcttccccccagaggagagccccccagcccccagccgcagcctggccccagcccctgtgggcacctgtgcccctcctgagggcgtgcctgcctgtggcagaagacctgcccggctgctgcccctgcgggagcaccgggccctgtgcaccctgggcctcatcatgggcaccttcaccctgtgctggctgcccttcttcctggccaacgtgctgcgggccctgggcggccccagcctggtgcccggccctgccttcctggccctgaactggctgggctacgccaacagcgccttcaaccccctcatctactgccgcagcccagacttccgcagcgccttccggcggctgctgtgccgctgtggccgccgcctgcccccagagccctgtgccgccgcccggcctgccctcttccccagcggcgtgcctgctgcccggagcagccctgcccagccccggctgtgccagaggctggatggagcctcctggggcgtgtcctag

SEQ ID NO: 143048 - DNA, 1044 bp, synthetic construct
  misc_feature 1..1044: note = Description of Artificial Sequence: Synthetic coding sequence
  source 1..1044: mol_type = other DNA
atggctgctggaacagctgtgggcgcctgggtgctggtgctgagcctgtggggcgctgtggtgggcgcccagaacatcacagcccgcatcggggagcccctggtgctgaagtgcaagggggcccccaagaagccaccccagaggctggagtggaagctgaacacaggccgcacagaggcctggaaggtgctgagcccccagggcggcggcccctgggacagcgtggcccgggtgctgcccaacggcagcctcttcctgcctgctgtgggcatccaggatgagggcatcttccgctgccaggccatgaacagaaatggcaaggagaccaagagcaactacagagtgcgggtgtaccagatccctgggaagccagagatcgtggacagcgccagcgagctgacagctggggtgcccaacaaggtgggcacctgtgtgtctgagggcagctacccagctggcaccctgtcctggcacctggatggcaagcccctggtgcccaatgaaaaaggagtgtctgtgaaggagcagacccggcggcaccctgagaccggcctcttcaccctgcagagcgagctgatggtgaccccagcccggggcggggacccccggcccaccttcagctgcagcttcagccctggcctgcccaggcaccgggccctgaggacagcccccatccagccccgggtgtgggagcctgtgcccctggaggaggtgcagctggtggtggagcctgagggcggcgctgtggcccctgggggcaccgtgaccctgacctgtgaggtgcctgcccagcccagcccccagatccactggatgaaggatggagtgcccctgcccctgccccccagccctgtgctgatcctgcctgagatcggcccccaggaccagggcacctacagctgtgtggccacccacagcagccacggcccccaggagagcagagctgtgtccatcagcatcatcgagcctggagaggagggccccacagctggggagggctttgacaaggtgcgggaggccgaggacagcccccagcacatgtag

SEQ ID NO: 143049 - DNA, 702 bp, synthetic construct
  misc_feature 1..702: note = Description of Artificial Sequence: Synthetic coding sequence
  source 1..702: mol_type = other DNA
atggctgctggaacagctgtgggcgcctgggtgctggtgctgagcctgtggggcgctgtggtgggcgcccagaacatcacagcccgcatcggggagcccctggtgctgaagtgcaagggggcccccaagaagccaccccagaggctggagtggaagctgaacacaggccgcacagaggcctggaaggtgctgagcccccagggcggcggcccctgggacagcgtggcccgggtgctgcccaacggcagcctcttcctgcctgctgtgggcatccaggatgagggcatcttccgctgccaggccatgaacagaaatggcaaggagaccaagagcaactacagagtgcgggtgtaccagatccctgggaagccagagatcgtggacagcgccagcgagctgacagctggggtgcccaacaaggtggtggaggagagccgccgcagcaggaagaggccctgtgagcaggaggtgggcacctgtgtgtctgagggcagctacccagctggcaccctgtcctggcacctggatggcaagcccctggtgcccaatgaaaaaggagtgtctgtgaaggagcagacccggcggcaccctgagaccggcctcttcaccctgcagagcgagctgatggtgaccccagcccggggcggggacccccggcccaccttcagctgcagcttcagccctggcctgcccaggcactag

SEQ ID NO: 143050 - DNA, 402 bp, synthetic construct
  misc_feature 1..402: note = Description of Artificial Sequence: Synthetic coding sequence
  source 1..402: mol_type = other DNA
atgaaggatggagtgcccctgcccctgccccccagccctgtgctgatcctgcctgagatcggcccccaggaccagggcacctacagctgtgtggccacccacagcagccacggcccccaggagagcagagctgtgtccatcagcatcatcgagcccggggaggagggccccacagctggctctgtgggcggcagcggcctgggcaccctggccctggccctgggcatcctgggcggcctgggcacagctgccctgctgattggagtcatcctgtggcagaggcggcagaggagaggagaggagaggaaggcccctgagaaccaggaggaggaggaggagagagctgagctgaaccagagcgaggagcctgaggccggggagagcagcactggaggcccctag

SEQ ID NO: 143051 - DNA, 366 bp, synthetic construct
  misc_feature 1..366: note = Description of Artificial Sequence: Synthetic coding sequence
  source 1..366: mol_type = other DNA
atggctgctggaacagctgtgggcgcctgggtgctggtgctgagcctgtggggcgctgtggtgggcgcccagaacatcacagcccgcatcggggagcccctggtgctgaagtgcaagggggcccccaagaagccaccccagaggctggagtggaagctgaacacaggccgcacagaggcctggaaggtgctgagcccccagggcggcggcccctgggacagcgtggcccgggtgctgcccaacggcagcctcttcctgcctgctgtgggcatccaggatgagggcatcttccgctgccaggccatgaacagaaatggcaaggagaccaagagcaactggtggtggagccagaaggtggagcagtag

SEQ ID NO: 143052 - DNA, 1029 bp, synthetic construct
  misc_feature 1..1029: note = Description of Artificial Sequence: Synthetic coding sequence
  source 1..1029: mol_type = other DNA
atggctgctggaacagctgtgggcgcctgggtgctggtgctgagcctgtggggcgctgtggtgggcgcccagaacatcacagcccgcatcggggagcccctggtgctgaagtgcaagggggcccccaagaagccaccccagaggctggagtggaagctgggcggcggcccctgggacagcgtggcccgggtgctgcccaacggcagcctcttcctgcctgctgtgggcatccaggatgagggcatcttccgctgccaggccatgaacagaaatggcaaggagaccaagagcaactacagagtgcgggtgtaccagatccctgggaagccagagatcgtggacagcgccagcgagctgacagctggggtgcccaacaaggtgggcacctgtgtgtctgagggcagctacccagctggcaccctgtcctggcacctggatggcaagcccctggtgcccaatgaaaaaggagtgtctgtgaaggagcagacccggcggcaccctgagaccggcctcttcaccctgcagagcgagctgatggtgaccccagcccggggcggggacccccggcccaccttcagctgcagcttcagccctggcctgcccaggcaccgggccctgaggacagcccccatccagccccgggtgtgggagcctgtgcccctggaggaggtgcagctggtggtggagcctgagggcggcgctgtggcccctgggggcaccgtgaccctgacctgtgaggtgcctgcccagcccagcccccagatccactggatgaaggatgtgtctgacctggagcggggggccggccgcacccggcggggcggggccaactgccgcctgtgtggccgcatccgggccggcaacagcagccctggccctggggaccccggccggcctggggacagcaggcctgcccactggggccacctggtggccaaggccgccaccccccggcggggggaggagggccccaggaagccaggcggccggggcggggcctgcaggacagagagcgtgggcggcacctag

SEQ ID NO: 143053 - DNA, 885 bp, synthetic construct
  misc_feature 1..885: note = Description of Artificial Sequence: Synthetic coding sequence
  source 1..885: mol_type = other DNA
atgaacagaaatggcaaggagaccaagagcaactacagagtgcgggtgtaccagatccctgggaagccagaaattgtggacagcgccagcgagctgacagctggggtgcccaacaaggtgggcacctgtgtgtctgagggcagctacccagctggcaccctgtcctggcacctggatggcaagcccctggtgcccaatgagaagggcgtgtctgtgaaggagcagaccaggaggcaccctgagaccggcctcttcaccctgcagagcgagctgatggtgaccccagcccggggcggggacccccggcccaccttcagctgcagcttcagccctggcctgcccaggcaccgggccctgaggacagcccccatccagccccgggtgtgggagcctgtgcccctggaggaggtgcagctggtggtggagcctgagggcggcgctgtggcccctgggggcaccgtgaccctgacctgtgaggtgcctgcccagcccagcccccagatccactggatgaaggatggagtgcccctgcccctgccccccagccctgtgctgatcctgcctgagatcggcccccaggaccagggcacctacagctgtgtggccacccacagcagccacggcccccaggagagcagagctgtgtccatcagcatcatcggctctgtgggcggcagcggcctgggcaccctggccctggccctgggcatcctgggcggcctgggcacagctgccctgctgattggagtcatcctgtggcagaggcggcagaggagaggagaggagaggaaggcccctgagaaccaggaggaggaggaggagcgggcagagctgaaccagagcgaggagcctgaggccggggagagcagcactggaggcccctag

SEQ ID NO: 143054 - DNA, 1308 bp, synthetic construct
  misc_feature 1..1308: note = Description of Artificial Sequence: Synthetic coding sequence
  source 1..1308: mol_type = other DNA
atgggcgctggggagcgggtgcaggccccacccagggctgaggccacagctggaagaggagctgaccgggcccggaccctggagggcagcaggatggccgccggcacagctgtgggcgcctgggtgctggtgctgagcctgtggggcgctgtggtgggcgcccagaacatcacagccagaattggagagcccctggtgctgaagtgcaagggggcccccaagaagccaccccagaggctggagtggaagctgaacacaggccgcacagaggcctggaaggtgctgagcccccagggcggcggcccctgggacagcgtggcccgggtgctgcccaacggcagcctcttcctgcctgctgtgggcatccaggatgagggcatcttccgctgccaggccatgaacagaaatggcaaggagaccaagagcaactacagagtgcgggtgtaccagatccctgggaagccagaaattgtggacagcgccagcgagctgacagctggggtgcccaacaaggtgggcacctgtgtgtctgagggcagctacccagctggcaccctgtcctggcacctggatggcaagcccctggtgcccaatgagaagggcgtgtctgtgaaggagcagaccaggaggcaccctgagaccggcctcttcaccctgcagagcgagctgatggtgaccccagcccggggcggggacccccggcccaccttcagctgcagcttcagccctggcctgcccaggcaccgggccctgaggacagcccccatccagccccgggtgtgggagcctgtgcccctggaggaggtgcagctggtggtggagcctgagggcggcgctgtggcccctgggggcaccgtgaccctgacctgtgaggtgcctgcccagcccagcccccagatccactggatgaaggatggagtgcccctgcccctgccccccagccctgtgctgatcctgcctgagatcggcccccaggaccagggcacctacagctgtgtggccacccacagcagccacggcccccaggagagcagagctgtgtccatcagcatcatcgagcccggggaggagggccccacagctggctctgtgggcggcagcggcctgggcaccctggccctggccctgggcatcctgggcggcctgggcacagctgccctgctgattggagtcatcctgtggcagaggcggcagaggagaggagaggagaggaaggcccctgagaaccaggaggaggaggaggagagagctgagctgaaccagagcgaggagcctgaggccggggagagcagcactggaggcccctag

SEQ ID NO: 143055 - DNA, 1215 bp, synthetic construct
  misc_feature 1..1215: note = Description of Artificial Sequence: Synthetic coding sequence
  source 1..1215: mol_type = other DNA
atggctgctggaacagctgtgggcgcctgggtgctggtgctgagcctgtggggcgctgtggtgggcgcccagaacatcacagcccgcatcggggagcccctggtgctgaagtgcaagggggcccccaagaagccaccccagaggctggagtggaagctgaacacaggccgcacagaggcctggaaggtgctgagcccccagggcggcggcccctgggacagcgtggcccgggtgctgcccaacggcagcctcttcctgcctgctgtgggcatccaggatgagggcatcttccgctgccaggccatgaacagaaatggcaaggagaccaagagcaactacagagtgcgggtgtaccagatccctgggaagccagagatcgtggacagcgccagcgagctgacagctggggtgcccaacaaggtgggcacctgtgtgtctgagggcagctacccagctggcaccctgtcctggcacctggatggcaagcccctggtgcccaatgaaaaaggagtgtctgtgaaggagcagacccggcggcaccctgagaccggcctcttcaccctgcagagcgagctgatggtgaccccagcccggggcggggacccccggcccaccttcagctgcagcttcagccctggcctgcccaggcaccgggccctgaggacagcccccatccagccccgggtgtgggagcctgtgcccctggaggaggtgcagctggtggtggagcctgagggcggcgctgtggcccctgggggcaccgtgaccctgacctgtgaggtgcctgcccagcccagcccccagatccactggatgaaggatggagtgcccctgcccctgccccccagccctgtgctgatcctgcctgagatcggcccccaggaccagggcacctacagctgtgtggccacccacagcagccacggcccccaggagagcagagctgtgtccatcagcatcatcgagcctggagaggagggccccacagctggctctgtgggcggcagcggcctgggcaccctggccctggccctgggcatcctgggcggcctgggcacagctgccctgctgattggagtcatcctgtggcagaggcggcagaggagaggagaggagaggaaggcccctgagaaccaggaggaggaggaggagcgggcagagctgaaccagagcgaggagcctgaggccggggagagcagcactggaggcccctag

SEQ ID NO: 143056 - DNA, 1044 bp, synthetic construct; identical to SEQ ID NO: 143048
  misc_feature 1..1044: note = Description of Artificial Sequence: Synthetic coding sequence
  source 1..1044: mol_type = other DNA

SEQ ID NO: 143057 - DNA, 1029 bp, synthetic construct; identical to SEQ ID NO: 143052
  misc_feature 1..1029: note = Description of Artificial Sequence: Synthetic coding sequence
  source 1..1029: mol_type = other DNA

SEQ ID NO: 143058 - DNA, 1029 bp, synthetic construct; identical to SEQ ID NO: 143052
  misc_feature 1..1029: note = Description of Artificial Sequence: Synthetic coding sequence
  source 1..1029: mol_type = other DNA

SEQ ID NO: 143059 - DNA, 702 bp, synthetic construct
  misc_feature 1..702: note = Description of Artificial Sequence: Synthetic coding sequence
  source 1..702: mol_type = other DNA
atggctgctggaacagctgtgggcgcctgggtgctggtgctgagcctgtggggcgctgtggtgggcgcccagaacatcacagcccgcatcggggagcccctggtgctgaagtgcaagggggcccccaagaagccaccccagaggctggagtggaagctgaacacaggccgcacagaggcctggaaggtgctgagcccccagggcggcggcccctgggacagcgtggcccgggtgctgcccaacagcagcctcttcctgcctgctgtgggcatccaggatgagggcatcttccgctgccaggccatgaacagaaatggcaaggagaccaagagcaactacagagtgcgggtgtaccagatccctgggaagccagagatcgtggacagcgccagcgagctgacagctggggtgcccaacaaggtggtggaggagagccgccgcagcaggaagaggccctgtgagcaggaggtgggcacctgtgtgtctgagggcagctacccagctggcaccctgtcctggcacctggatggcaagcccctggtgcccaatgaaaaaggagtgtctgtgaaggagcagacccggcggcaccctgagaccggcctcttcaccctgcagagcgagctgatggtgaccccagcccggggcggggacccccggcccaccttcagctgcagcttcagccctggcctgcccaggcactag

SEQ ID NO: 143060 - DNA, 705 bp, synthetic construct
  misc_feature 1..705: note = Description of Artificial Sequence: Synthetic coding sequence
  source 1..705: mol_type = other DNA
atggctgctggaacagctgtgggcgcctgggtgctggtgctgagcctgtggggcgctgtggtgggcgcccagaacatcacagcccgcatcggggagcccctggtgctgaagtgcaagggggcccccaagaagccaccccagaggctggagtggaagctgaacacaggccgcacagaggcctggaaggtgctgagcccccagggcggcggcccctgggacagcgtggcccgggtgctgcccaacggcagcctcttcctgcctgctgtgggcatccaggatgagggcatcttccgctgccaggccatgaacagaaatggcaaggagaccaagagcaactaccgcagcctgcggaccttcaccatcacagccagtgactggatcttccccccatctgagatccctgggaagccagaaattgtggacagcgccagcgagctgacagctggggtgcccaacaaggtgggcacctgtgtgtctgagggcagctacccagctggcaccctgtcctggcacctggatggcaagcccctggtgcccaatgagaagggcgtgtctgtgaaggagcagaccaggaggcaccctgagaccggcctcttcaccctgcagagcgagctgatggtgaccccagcccggggcggggacccccggcccaccttcagctgcagcttcagccctggcctgcccaggcaccgggccctgaggtag

SEQ ID NO: 143061 - DNA, 705 bp, synthetic construct; identical to SEQ ID NO: 143060
  misc_feature 1..705: note = Description of Artificial Sequence: Synthetic coding sequence
  source 1..705: mol_type = other DNA

SEQ ID NO: 143062 - DNA, 702 bp, synthetic construct; identical to SEQ ID NO: 143049
  misc_feature 1..702: note = Description of Artificial Sequence: Synthetic coding sequence
  source 1..702: mol_type = other DNA

SEQ ID NO: 143063 - DNA, 1215 bp, synthetic construct
  misc_feature 1..1215: note = Description of Artificial Sequence: Synthetic coding sequence
  source 1..1215: mol_type = other DNA
atggctgctggaacagctgtgggcgcctgggtgctggtgctgagcctgtggggcgctgtggtgggcgcccagaacatcacagcccgcatcggggagcccctggtgctgaagtgcaagggggcccccaagaagccaccccagaggctggagtggaagctgaacacaggccgcacagaggcctggaaggtgctgagcccccagggcggcggcccctgggacagcgtggcccgggtgctgcccaacagcagcctcttcctgcctgctgtgggcatccaggatgagggcatcttccgctgccaggccatgaacagaaatggcaaggagaccaagagcaactacagagtgcgggtgtaccagatccctgggaagccagagatcgtggacagcgccagcgagctgacagctggggtgcccaacaaggtgggcacctgtgtgtctgagggcagctacccagctggcaccctgtcctggcacctggatggcaagcccctggtgcccaatgaaaaaggagtgtctgtgaaggagcagacccggcggcaccctgagaccggcctcttcaccctgcagagcgagctgatggtgaccccagcccggggcggggacccccggcccaccttcagctgcagcttcagccctggcctgcccaggcaccgggccctgaggacagcccccatccagccccgggtgtgggagcctgtgcccctggaggaggtgcagctggtggtggagcctgagggcggcgctgtggcccctgggggcaccgtgaccctgacctgtgaggtgcctgcccagcccagcccccagatccactggatgaaggatggagtgcccctgcccctgccccccagccctgtgctgatcctgcctgagatcggcccccaggaccagggcacctacagctgtgtggccacccacagcagccacggcccccaggagagcagagctgtgtccatcagcatcatcgagcctggagaggagggccccacagctggctctgtgggcggcagcggcctgggcaccctggccctggccctgggcatcctgggcggcctgggcacagctgccctgctgattggagtcatcctgtggcagaggcggcagaggagaggagaggagaggaaggcccctgagaaccaggaggaggaggaggagcgggcagagctgaaccagagcgaggagcctgaggccggggagagcagcactggaggcccctag

SEQ ID NO: 143064 - DNA, 1044 bp, synthetic construct; identical to SEQ ID NO: 143048
  misc_feature 1..1044: note = Description of Artificial Sequence: Synthetic coding sequence
  source 1..1044: mol_type = other DNA

SEQ ID NO: 143065 - DNA, 702 bp, synthetic construct; identical to SEQ ID NO: 143049
  misc_feature 1..702: note = Description of Artificial Sequence: Synthetic coding sequence
  source 1..702: mol_type = other DNA

SEQ ID NO: 143066 - DNA, 1215 bp, synthetic construct; identical to SEQ ID NO: 143055
  misc_feature 1..1215: note = Description of Artificial Sequence: Synthetic coding sequence
  source 1..1215: mol_type = other DNA

SEQ ID NO: 143067 - DNA, 705 bp, synthetic construct
  misc_feature 1..705: note = Description of Artificial Sequence: Synthetic coding sequence
  source 1..705: mol_type = other DNA
atggctgctggaacagctgtgggcgcctgggtgctggtgctgagcctgtggggcgctgtggtgggcgcccagaacatcacagcccgcatcggggagcccctggtgctgaagtgcaagggggcccccaagaagccaccccagaggctggagtggaagctgaacacaggccgcacagaggcctggaaggtgctgagcccccagggcggcggcccctgggacagcgtggcccgggtgctgcccaacagcagcctcttcctgcctgctgtgggcatccaggatgagggcatcttccgctgccaggccatgaacagaaatggcaaggagaccaagagcaactaccgcagcctgcggaccttcaccatcacagccagtgactggatcttccccccatctgagatccctgggaagccagaaattgtggacagcgccagcgagctgacagctggggtgcccaacaaggtgggcacctgtgtgtctgagggcagctacccagctggcaccctgtcctggcacctggatggcaagcccctggtgcccaatgagaagggcgtgtctgtgaaggagcagaccaggaggcaccctgagaccggcctcttcaccctgcagagcgagctgatggtgaccccagcccggggcggggacccccggcccaccttcagctgcagcttcagccctggcctgcccaggcaccgggccctgaggtag

SEQ ID NO: 143068 - DNA, 1092 bp, synthetic construct
  misc_feature 1..1092: note = Description of Artificial Sequence: Synthetic coding sequence
  source 1..1092: mol_type = other DNA
atggctgctggaacagctgtgggcgcctgggtgctggtgctgagcctgtggggcgctgtggtgggcgcccagaacatcacagcccgcatcggggagcccctggtgctgaagtgcaagggggcccccaagaagccaccccagaggctggagtggaagctgaacacaggccgcacagaggcctggaaggtgctgagcccccagggcggcggcccctgggacagcgtggcccgggtgctgcccaacggcagcctcttcctgcctgctgtgggcatccaggatgagggcatcttccgctgccaggccatgaacagaaatggcaaggagaccaagagcaactacagagtgcgggtgtaccagatccctgggaagccagagatcgtggacagcgccagcgagctgacagctggggtgcccaacaaggtggtggaggagagccgccgcagcaggaagaggccctgtgagcaggaggtgggcacctgtgtgtctgagggcagctacccagctggcaccctgtcctggcacctggatggcaagcccctggtgcccaatgaaaaaggagtgtctgtgaaggagcagacccggcggcaccctgagaccggcctcttcaccctgcagagcgagctgatggtgaccccagcccggggcggggacccccggcccaccttcagctgcagcttcagccctggcctgcccaggcaccgggccctgaggacagcccccatccagccccgggtgtgggagcctgtgcccctggaggaggtgcagctggtggtggagcctgagggcggcgctgtggcccctgggggcaccgtgaccctgacctgtgaggtgcctgcccagcccagcccccagatccactggatgaaggatggagtgcccctgcccctgccccccagccctgtgctgatcctgcctgagatcggcccccaggaccagggcacctacagctgtgtggccacccacagcagccacggcccccaggagagcagagctgtgtccatcagcatcatcgagcctggagaggagggccccacagctggggagggctttgacaaggtgcgggaggccgaggacagcccccagcacatgtag

SEQ ID NO: 143069 - DNA, 1029 bp, synthetic construct; identical to SEQ ID NO: 143052
  misc_feature 1..1029: note = Description of Artificial Sequence: Synthetic coding sequence
  source 1..1029: mol_type = other DNA

SEQ ID NO: 143070 - DNA, 702 bp, synthetic construct; identical to SEQ ID NO: 143049
  misc_feature 1..702: note = Description of Artificial Sequence: Synthetic coding sequence
  source 1..702: mol_type = other DNA

SEQ ID NO: 143071 - DNA, 1029 bp, synthetic construct; identical to SEQ ID NO: 143052
  misc_feature 1..1029: note = Description of Artificial Sequence: Synthetic coding sequence
  source 1..1029: mol_type = other DNA

SEQ ID NO: 143072 - DNA, 705 bp, synthetic construct; identical to SEQ ID NO: 143060
  misc_feature 1..705: note = Description of Artificial Sequence: Synthetic coding sequence
  source 1..705: mol_type = other DNA

SEQ ID NO: 143073 - DNA, 1215 bp, synthetic construct; identical to SEQ ID NO: 143055
  misc_feature 1..1215: note = Description of Artificial Sequence: Synthetic coding sequence
  source 1..1215: mol_type = other DNA

SEQ ID NO: 143074 - DNA, 1029 bp, synthetic construct
  misc_feature 1..1029: note = Description of Artificial Sequence: Synthetic coding sequence
  source 1..1029: mol_type = other DNA
atggctgctggaacagctgtgggcgcctgggtgctggtgctgagcctgtggggcgctgtggtgggcgcccagaacatcacagcccgcatcggggagcccctggtgctgaagtgcaagggggcccccaagaagccaccccagaggctggagtggaagctgggcggcggcccctgggacagcgtggcccgggtgctgcccaacagcagcctcttcctgcctgctgtgggcatccaggatgagggcatcttccgctgccaggccatgaacagaaatggcaaggagaccaagagcaactacagagtgcgggtgtaccagatccctgggaagccagagatcgtggacagcgccagcgagctgacagctggggtgcccaacaaggtgggcacctgtgtgtctgagggcagctacccagctggcaccctgtcctggcacctggatggcaagcccctggtgcccaatgaaaaaggagtgtctgtgaaggagcagacccggcggcaccctgagaccggcctcttcaccctgcagagcgagctgatggtgaccccagcccggggcggggacccccggcccaccttcagctgcagcttcagccctggcctgcccaggcaccgggccctgaggacagcccccatccagccccgggtgtgggagcctgtgcccctggaggaggtgcagctggtggtggagcctgagggcggcgctgtggcccctgggggcaccgtgaccctgacctgtgaggtgcctgcccagcccagcccccagatccactggatgaaggatgtgtctgacctggagcggggggccggccgcacccggcggggcggggccaactgccgcctgtgtggccgcatccgggccggcaacagcagccctggccctggggaccccggccggcctggggacagcaggcctgcccactggggccacctggtggccaaggccgccaccccccggcggggggaggagggccccaggaagccaggcggccggggcggggcctgcaggacagagagcgtgggcggcacctag

SEQ ID NO: 143075 - DNA, 1044 bp, synthetic construct; identical to SEQ ID NO: 143048
  misc_feature 1..1044: note = Description of Artificial Sequence: Synthetic coding sequence
  source 1..1044: mol_type = other DNA

SEQ ID NO: 143076 - DNA, 705 bp, synthetic construct; identical to SEQ ID NO: 143060
  misc_feature 1..705: note = Description of Artificial Sequence: Synthetic coding sequence
  source 1..705: mol_type = other DNA

SEQ ID NO: 143077 - DNA, 1215 bp, synthetic construct; identical to SEQ ID NO: 143055
  misc_feature 1..1215: note = Description of Artificial Sequence: Synthetic coding sequence
  source 1..1215: mol_type = other DNA

SEQ ID NO: 143078 - DNA, 1044 bp, synthetic construct
  misc_feature 1..1044: note = Description of Artificial Sequence: Synthetic coding sequence
  source 1..1044: mol_type = other DNA
atggctgctggaacagctgtgggcgcctgggtgctggtgctgagcctgtggggcgctgtggtgggcgcccagaacatcacagcccgcatcggggagcccctggtgctgaagtgcaagggggcccccaagaagccaccccagaggctggagtggaagctgaacacaggccgcacagaggcctggaaggtgctgagcccccagggcggcggcccctgggacagcgtggcccgggtgctgcccaacagcagcctcttcctgcctgctgtgggcatccaggatgagggcatcttccgctgccaggccatgaacagaaatggcaaggagaccaagagcaactacagagtgcgggtgtaccagatccctgggaagccagagatcgtggacagcgccagcgagctgacagctggggtgcccaacaaggtgggcacctgtgtgtctgagggcagctacccagctggcaccctgtcctggcacctggatggcaagcccctggtgcccaatgaaaaaggagtgtctgtgaaggagcagacccggcggcaccctgagaccggcctcttcaccctgcagagcgagctgatggtgaccccagcccggggcggggacccccggcccaccttcagctgcagcttcagccctggcctgcccaggcaccgggccctgaggacagcccccatccagccccgggtgtgggagcctgtgcccctggaggaggtgcagctggtggtggagcctgagggcggcgctgtggcccctgggggcaccgtgaccctgacctgtgaggtgcctgcccagcccagcccccagatccactggatgaaggatggagtgcccctgcccctgccccccagccctgtgctgatcctgcctgagatcggcccccaggaccagggcacctacagctgtgtggccacccacagcagccacggcccccaggagagcagagctgtgtccatcagcatcatcgagcctggagaggagggccccacagctggggagggctttgacaaggtgcgggaggccgaggacagcccccagcacatgtag

SEQ ID NO: 143079 - DNA, 702 bp, synthetic construct; identical to SEQ ID NO: 143049
  misc_feature 1..702: note = Description of Artificial Sequence: Synthetic coding sequence
  source 1..702: mol_type = other DNA

SEQ ID NO: 143080 - DNA, 1044 bp, synthetic construct; identical to SEQ ID NO: 143048
  misc_feature 1..1044: note = Description of Artificial Sequence: Synthetic coding sequence
  source 1..1044: mol_type = other DNA

SEQ ID NO: 143081 - DNA, 705 bp, synthetic construct; identical to SEQ ID NO: 143060
  misc_feature 1..705: note = Description of Artificial Sequence: Synthetic coding sequence
  source 1..705: mol_type = other DNA

SEQ ID NO: 143082 - DNA, 1215 bp, synthetic construct; identical to SEQ ID NO: 143055
  misc_feature 1..1215: note = Description of Artificial Sequence: Synthetic coding sequence
  source 1..1215: mol_type = other DNA

SEQ ID NO: 143083 - DNA, 387 bp, synthetic construct
  misc_feature 1..387: note = Description of Artificial Sequence: Synthetic coding sequence
  source 1..387: mol_type = other DNA
atggctgctggaacagctgtgggcgcctgggtgctggtgctgagcctgtggggcgctgtggtgggcgcccagaacatcacagcccgcatcggggagcccctggtgctgaagtgcaagggggcccccaagaagccaccccagaggctggagtggaagctgaacacaggccgcacagaggcctggaaggtgctgagcccccagggcggcggcccctgggacagcgtggcccgggtgctgcccaacggcagcctcttcctgcctgctgtgggcatccaggatgagggcatcttccgctgccaggccatgaacagaaatggcaaggagaccaagagcaactacagagtgcgggtgtaccagtttgagaacctgcacaactacagcctgtag

SEQ ID NO: 143084 - DNA, 462 bp, synthetic construct
  misc_feature 1..462: note = Description of Artificial Sequence: Synthetic coding sequence
  source 1..462: mol_type = other DNA
atggctgctggaacagctgtgggcgcctgggtgctggtgctgagcctgtggggcgctgtggtgggcgcccagaacatcacagcccgcatcggggagcccctggtgctgaagtgcaagggggcccccaagaagccaccccagaggctggagtggaagctgaacacaggccgcacagaggcctggaaggtgctgagcccccagggcggcggcccctgggacagcgtggcccgggtgctgcccaacggcagcctcttcctgcctgctgtgggcatccaggatgagggcatcctgggcggcctgggcacagctgccctgctgattggagtcatcctgtggcagaggcggcagaggagaggagaggagaggaaggcccctgagaaccaggaggaggaggaggagagagctgagctgaaccagagcgaggagcctgaggccggggagagcagcactggaggcccctag

SEQ ID NO: 143085 - DNA, 885 bp, synthetic construct; identical to SEQ ID NO: 143053
  misc_feature 1..885: note = Description of Artificial Sequence: Synthetic coding sequence
  source 1..885: mol_type = other DNA

SEQ ID NO: 143086 - DNA, 885 bp, synthetic construct; identical to SEQ ID NO: 143053
  misc_feature 1..885: note = Description of Artificial Sequence: Synthetic coding sequence
  source 1..885: mol_type = other DNA

SEQ ID NO: 143087 - DNA, 366 bp, synthetic construct; identical to SEQ ID NO: 143051
  misc_feature 1..366: note = Description of Artificial Sequence: Synthetic coding sequence
  source 1..366: mol_type = other DNA

SEQ ID NO: 143088 - DNA, 1308 bp, synthetic construct; identical to SEQ ID NO: 143054
  misc_feature 1..1308: note = Description of Artificial Sequence: Synthetic coding sequence
  source 1..1308: mol_type = other DNA

SEQ ID NO: 143089 - DNA, 1092 bp, synthetic construct; identical to SEQ ID NO: 143068
  misc_feature 1..1092: note = Description of Artificial Sequence: Synthetic coding sequence
  source 1..1092: mol_type = other DNA

SEQ ID NO: 143090 - DNA, 402 bp, synthetic construct; identical to SEQ ID NO: 143050
  misc_feature 1..402: note = Description of Artificial Sequence: Synthetic coding sequence
  source 1..402: mol_type = other DNA

SEQ ID NO: 143091 - DNA, 387 bp, synthetic construct
  misc_feature 1..387: note = Description of Artificial Sequence: Synthetic coding sequence
  source 1..387: mol_type = other DNA
atggctgctggaacagctgtgggcgcctgggtgctggtgctgagcctgtggggcgctgtggtgggcgcccagaacatcacagcccgcatcggggagcccctggtgctgaagtgcaagggggcccccaagaagccaccccagaggctggagtggaagctgaacacaggccgcacagaggcctggaaggtgctgagcccccagggcggcggcccctgggacagcgtggcccgggtgctgcccaacagcagcctcttcctgcctgctgtgggcatccaggatgagggcatcttccgctgccaggccatgaacagaaatggcaaggagaccaagagcaactacagagtgcgggtgtaccagtttgagaacctgcacaactacagcctgtag

SEQ ID NO: 143092 - DNA, 462 bp, synthetic construct; identical to SEQ ID NO: 143084
  misc_feature 1..462: note = Description of Artificial Sequence: Synthetic coding sequence
  source 1..462: mol_type = other DNA

SEQ ID NO: 143093 - DNA, 1308 bp, synthetic construct; identical to SEQ ID NO: 143054
  misc_feature 1..1308: note = Description of Artificial Sequence: Synthetic coding sequence
  source 1..1308: mol_type = other DNA

SEQ ID NO: 143094 - DNA, 366 bp, synthetic construct; identical to SEQ ID NO: 143051
  misc_feature 1..366: note = Description of Artificial Sequence: Synthetic coding sequence
  source 1..366: mol_type = other DNA

SEQ ID NO: 143095 - DNA, 387 bp, synthetic construct; identical to SEQ ID NO: 143083
  misc_feature 1..387: note = Description of Artificial Sequence: Synthetic coding sequence
  source 1..387: mol_type = other DNA

SEQ ID NO: 143096 - DNA, 885 bp, synthetic construct; identical to SEQ ID NO: 143053
  misc_feature 1..885: note = Description of Artificial Sequence: Synthetic coding sequence
  source 1..885: mol_type = other DNA

SEQ ID NO: 143097 - DNA, 366 bp, synthetic construct
  misc_feature 1..366: note = Description of Artificial Sequence: Synthetic coding sequence
  source 1..366: mol_type = other DNA
atggctgctggaacagctgtgggcgcctgggtgctggtgctgagcctgtggggcgctgtggtgggcgcccagaacatcacagcccgcatcggggagcccctggtgctgaagtgcaagggggcccccaagaagccaccccagaggctggagtggaagctgaacacaggccgcacagaggcctggaaggtgctgagcccccagggcggcggcccctgggacagcgtggcccgggtgctgcccaacagcagcctcttcctgcctgctgtgggcatccaggatgagggcatcttccgctgccaggccatgaacagaaatggcaaggagaccaagagcaactggtggtggagccagaaggtggagcagtag

SEQ ID NO: 143098 - DNA, 462 bp, synthetic construct; identical to SEQ ID NO: 143084
  misc_feature 1..462: note = Description of Artificial Sequence: Synthetic coding sequence
  source 1..462: mol_type = other DNA

SEQ ID NO: 143099 - DNA, 1308 bp, synthetic construct; identical to SEQ ID NO: 143054
  misc_feature 1..1308: note = Description of Artificial Sequence: Synthetic coding sequence
  source 1..1308: mol_type = other DNA

SEQ ID NO: 143100 - DNA, 366 bp, synthetic construct; identical to SEQ ID NO: 143051
  misc_feature 1..366: note = Description of Artificial Sequence: Synthetic coding sequence
  source 1..366: mol_type = other DNA

SEQ ID NO: 143101 - DNA, 402 bp, synthetic construct; identical to SEQ ID NO: 143050
  misc_feature 1..402: note = Description of Artificial Sequence: Synthetic coding sequence
  source 1..402: mol_type = other DNA

SEQ ID NO: 143102 - DNA, 885 bp, synthetic construct; identical to SEQ ID NO: 143053
  misc_feature 1..885: note = Description of Artificial Sequence: Synthetic coding sequence
  source 1..885: mol_type = other DNA

SEQ ID NO: 143103 - DNA, 402 bp, synthetic construct; identical to SEQ ID NO: 143050
  misc_feature 1..402: note = Description of Artificial Sequence: Synthetic coding sequence
  source 1..402: mol_type = other DNA

SEQ ID NO: 143104 - DNA, 1092 bp, synthetic construct; identical to SEQ ID NO: 143068
  misc_feature 1..1092: note = Description of Artificial Sequence: Synthetic coding sequence
  source 1..1092: mol_type = other DNA

SEQ ID NO: 143105 - DNA, 1308 bp, synthetic construct
  misc_feature 1..1308: note = Description of Artificial Sequence: Synthetic coding sequence
  source 1..1308: mol_type = other DNA
atgggcgctggggagcgggtgcaggccccacccagggctgaggccacagctggaagaggagctgaccgggcccggaccctggagggcagcaggatggccgccggcacagctgtgggcgcctgggtgctggtgctgagcctgtggggcgctgtggtgggcgcccagaacatcacagccagaattggagagcccctggtgctgaagtgcaagggggcccccaagaagccaccccagaggctggagtggaagctgaacacaggccgcacagaggcctggaaggtgctgagcccccagggcggcggcccctgggacagcgtggcccgggtgctgcccaacagcagcctcttcctgcctgctgtgggcatccaggatgagggcatcttccgctgccaggccatgaacagaaatggcaaggagaccaagagcaactacagagtgcgggtgtaccagatccctgggaagccagaaattgtggacagcgccagcgagctgacagctggggtgcccaacaaggtgggcacctgtgtgtctgagggcagctacccagctggcaccctgtcctggcacctggatggcaagcccctggtgcccaatgagaagggcgtgtctgtgaaggagcagaccaggaggcaccctgagaccggcctcttcaccctgcagagcgagctgatggtgaccccagcccggggcggggacccccggcccaccttcagctgcagcttcagccctggcctgcccaggcaccgggccctgaggacagcccccatccagccccgggtgtgggagcctgtgcccctggaggaggtgcagctggtggtggagcctgagggcggcgctgtggcccctgggggcaccgtgaccctgacctgtgaggtgcctgcccagcccagcccccagatccactggatgaaggatggagtgcccctgcccctgccccccagccctgtgctgatcctgcctgagatcggcccccaggaccagggcacctacagctgtgtggccacccacagcagccacggcccccaggagagcagagctgtgtccatcagcatcatcgagcccggggaggagggccccacagctggctctgtgggcggcagcggcctgggcaccctggccctggccctgggcatcctgggcggcctgggcacagctgccctgctgattggagtcatcctgtggcagaggcggcagaggagaggagaggagaggaaggcccctgagaaccaggaggaggaggaggagagagctgagctgaaccagagcgaggagcctgaggccggggagagcagcactggaggcccctag

SEQ ID NO: 143106 - DNA, 387 bp, synthetic construct; identical to SEQ ID NO: 143083
  misc_feature 1..387: note = Description of Artificial Sequence: Synthetic coding sequence
  source 1..387: mol_type = other DNA

SEQ ID NO: 143107 - DNA, 462 bp, synthetic construct; identical to SEQ ID NO: 143084
  misc_feature 1..462: note = Description of Artificial Sequence: Synthetic coding sequence
  source 1..462: mol_type = other DNA

SEQ ID NO: 143108 - DNA, 1092 bp, synthetic construct; identical to SEQ ID NO: 143068
  misc_feature 1..1092: note = Description of Artificial Sequence: Synthetic coding sequence
  source 1..1092: mol_type = other DNA

SEQ ID NO: 143109 - DNA, 366 bp, synthetic construct; identical to SEQ ID NO: 143051
  misc_feature 1..366: note = Description of Artificial Sequence: Synthetic coding sequence
  source 1..366: mol_type = other DNA

SEQ ID NO: 143110 - DNA, 402 bp, synthetic construct; identical to SEQ ID NO: 143050
  misc_feature 1..402: note = Description of Artificial Sequence: Synthetic coding sequence
  source 1..402: mol_type = other DNA

SEQ ID NO: 143111 - DNA, 387 bp, synthetic construct; identical to SEQ ID NO: 143083
  misc_feature 1..387: note = Description of Artificial Sequence: Synthetic coding sequence
  source 1..387: mol_type = other DNA

SEQ ID NO: 143112 - DNA, 1092 bp, synthetic construct; identical to SEQ ID NO: 143068
  misc_feature 1..1092: note = Description of Artificial Sequence: Synthetic coding sequence
  source 1..1092: mol_type = other DNA

SEQ ID NO: 143113 - DNA, 1308 bp, synthetic construct; identical to SEQ ID NO: 143054
  misc_feature 1..1308: note = Description of Artificial Sequence: Synthetic coding sequence
  source 1..1308: mol_type = other DNA

SEQ ID NO: 143114 - DNA, 462 bp, synthetic construct
  misc_feature 1..462: note = Description of Artificial Sequence: Synthetic coding sequence
  source 1..462: mol_type = other DNA
atggctgctggaacagctgtgggcgcctgggtgctggtgctgagcctgtggggcgctgtggtgggcgcccagaacatcacagcccgcatcggggagcccctggtgctgaagtgcaagggggcccccaagaagccaccccagaggctggagtggaagctgaacacaggccgcacagaggcctggaaggtgctgagcccccagggcggcggcccctgggacagcgtggcccgggtgctgcccaacagcagcctcttcctgcctgctgtgggcatccaggatgagggcatcctgggcggcctgggcacagctgccctgctgattggagtcatcctgtggcagaggcggcagaggagaggagaggagaggaaggcccctgagaaccaggaggaggaggaggagagagctgagctgaaccagagcgaggagcctgaggccggggagagcagcactggaggcccctag

SEQ ID NO: 143115 - DNA, 402 bp, synthetic construct; identical to SEQ ID NO: 143050
  misc_feature 1..402: note = Description of Artificial Sequence: Synthetic coding sequence
  source 1..402: mol_type = other DNA

SEQ ID NO: 143116 - DNA, 885 bp, synthetic construct; identical to SEQ ID NO: 143053
  misc_feature 1..885: note = Description of Artificial Sequence: Synthetic coding sequence
  source 1..885: mol_type = other DNA

SEQ ID NO: 143117 - DNA, 1092 bp, synthetic construct
  misc_feature 1..1092: note = Description of Artificial Sequence: Synthetic coding sequence
  source 1..1092: mol_type = other DNA
atggctgctggaacagctgtgggcgcctgggtgctggtgctgagcctgtggggcgctgtggtgggcgcccagaacatcacagcccgcatcggggagcccctggtgctgaagtgcaagggggcccccaagaagccaccccagaggctggagtggaagctgaacacaggccgcacagaggcctggaaggtgctgagcccccagggcggcggcccctgggacagcgtggcccgggtgctgcccaacagcagcctcttcctgcctgctgtgggcatccaggatgagggcatcttccgctgccaggccatgaacagaaatggcaaggagaccaagagcaactacagagtgcgggtgtaccagatccctgggaagccagagatcgtggacagcgccagcgagctgacagctggggtgcccaacaaggtggtggaggagagccgccgcagcaggaagaggccctgtgagcaggaggtgggcacctgtgtgtctgagggcagctacccagctggcaccctgtcctggcacctggatggcaagcccctggtgcccaatgaaaaaggagtgtctgtgaaggagcagacccggcggcaccctgagaccggcctcttcaccctgcagagcgagctgatggtgaccccagcccggggcggggacccccggcccaccttcagctgcagcttcagccctggcctgcccaggcaccgggccctgaggacagcccccatccagccccgggtgtgggagcctgtgcccctggaggaggtgcagctggtggtggagcctgagggcggcgctgtggcccctgggggcaccgtgaccctgacctgtgaggtgcctgcccagcccagcccccagatccactggatgaaggatggagtgcccctgcccctgccccccagccctgtgctgatcctgcctgagatcggcccccaggaccagggcacctacagctgtgtggccacccacagcagccacggcccccaggagagcagagctgtgtccatcagcatcatcgagcctggagaggagggccccacagctggggagggctttgacaaggtgcgggaggccgaggacagcccccagcacatgtag

SEQ ID NO: 143118 - DNA, 462 bp, synthetic construct; identical to SEQ ID NO: 143084
  misc_feature 1..462: note = Description of Artificial Sequence: Synthetic coding sequence
  source 1..462: mol_type = other DNA

SEQ ID NO: 143119 - DNA, 387 bp, synthetic construct; identical to SEQ ID NO: 143083
  misc_feature 1..387: note = Description of Artificial Sequence: Synthetic coding sequence
  source 1..387: mol_type = other DNA

SEQ ID NO: 143120 - DNA, 2460 bp, synthetic construct
  misc_feature 1..2460: note = Description of Artificial Sequence: Synthetic coding sequence
  source 1..2460: mol_type = other DNA
atgcccctgaccagcgccttccgggctgtggacaatgaccccggcatcatcgtgtggagaattgagaagatggagctggccctggtgcctgtgtctgcccacggcaacttctatgaaggagactgctacgtgatcctgagcaccaggagagtggccagcctgctgagccaggacatccacttctggattggcaaggacagcagccaggatgagcagagctgtgccgccatctacaccacccagctggatgactacctgggcggcagccctgtgcagcaccgggaggtgcagtaccatgaaagtgacaccttccggggctacttcaagcagggcatcatctacaagcagggcggcgtggccagcggcatgaagcacgtggagaccaacacctatgatgtgaagaggctgctgcacgtgaagggcaagaggaacatccgggccacagaggtggagatgtcctgggacagcttcaacagaggagatgtgttcctgctggacctgggcaaggtgatcatccagtggaatggacctgagagcaacagcggggagcggctgaaggccatgctgctggccaaggacatccgggaccgggagcggggcggccgggccaagattggagtcatcgagggggacaaggaggccgccagccctgagctgatgaaggtgctgcaggacaccctgggcagaagaagcatcatcaagcccaccgtgcctgatgagatcatcgaccagaagcagaagagcaccatcatgctgtaccacatcagtgacagcgctggccagctggccgtgacagaggtggccacccggcccctggtgcaggacctgctgaaccatgatgactgctacatcctggaccagagcggcaccaagatctacgtgtggaagggcaagggggccaccaaggccgagaagcaggccgccatgagcaaggccctgggcttcatcaagatgaagagctaccccagcagcaccaacgtggagaccgtgaatgatggagctgagagcgccatgttcaagcagctgttccagaagtggagcgtgaaggaccagaccatgggcctgggcaagaccttcagcatcggcaagatcgccaaggtgttccaggacaagtttgatgtgaccctgctgcacaccaagccagaggtggccgcccaggagaggatggtggatgatggaaatggcaaggtggaggtgtggagaattgagaacctggagctggtgcctgtggagtaccagtggtacggcttcttctatggaggagactgctacctggtgctgtacacctatgaggtgaatggcaagccccaccacatcctgtacatctggcagggcagacatgccagccaggatgagctggccgccagcgcctaccaggccgtggaggtggaccggcagtttgatggagctgctgtgcaggtgcgggtgaggatgggcacagagcccaggcacttcatggccatcttcaagggcaagctggtgatctttgagggcggcaccagcaggaaaggaaatgctgagccagacccccctgtgcggctcttccagatccacggcaatgacaagagcaacaccaaggctgtggaggtgcctgcctttgccagcagcctgaacagcaatgatgtgttcctgctgcggacccaggccgagcactacctgtggtacggcaagggcagcagtggagatgagcgggccatggccaaggagctggccagcctgctgtgtgatggctctgaaaatacagtggccgagggccaggagcctgctgagttctgggacctgctgggcggcaagaccccctatgccaatgacaagaggctgcagcaggagatcctggatgtgcagagccggctgtttgagtgcagcaacaagacaggccagtttgtggtgacagagatcacagacttcacccaggatgacctgaaccccacagatgtgatgctgctggacacctgggaccaggtgttcctgtggattggagctgaggccaatgccacagagaaggagagcgccctggccacagcccagcagtacctgcacacccaccccagcggccgggaccctgacacccccatcctgatcatcaagcagggctttgagccccccatcttcaccggctggttcctggcctgggaccccaacatctggagcgctgggaagacctatgagcagctgaaggaggagctgggagatgctgctgccatcatgaggatcacagctgacatgaagaatgccaccctgagcctgaacagcaatgacagcgagcccaagtactaccccatcgctgtgctgctgaagaaccagaaccaggagctgcctgaagatgtgaacccagccaagaaggagaactacctgtctgagcaggactttgtgtctgtgtttggcatcacccggggccagtttgctgccctgcccggctggaagcagctgcagatgaagaaggagaagggcctcttctag

SEQ ID NO: 143121 - DNA, 2439 bp, synthetic construct
  misc_feature 1..2439: note = Description of Artificial Sequence: Synthetic coding sequence
  source 1..2439: mol_type = other DNA
atgagcagcacaggccaccctggcagctacaagatctggggcgagaagatggagctggccctggtgcctgtgtctgcccacggcaacttctatgaaggagactgctacgtgatcctgagcacccggcgggtggccagcctgctgagccaggacatccacttctggattggcaaggacagcagccaggatgagcagagctgtgccgccatctacaccacccagctggatgactacctgggcggcagccctgtgcagcaccgggaggtgcagtaccacgagagtgacaccttccggggctacttcaagcagggcatcatctacaagcagggcggcgtggccagcggcatgaagcacgtggagaccaacacctatgatgtgaagaggctgctgcacgtgaagggcaagaggaacatccgggccacagaggtggagatgtcctgggacagcttcaacagaggagatgtgttcctgctggacctgggcaaggtgatcatccagtggaatggacctgagagcaacagcggggagcggctgaaggccatgctgctggccaaggacatccgggaccgggagcggggcggccgggccaagattggagtgattgaaggagacaaggaggccgccagccctgagctgatgaaggtgctgcaggacaccctgggccgccgcagcatcatcaagcccaccgtgcctgatgagatcatcgaccagaagcagaagagcaccatcatgctgtaccacatcagtgacagcgctggccagctggccgtgacagaggtggccacccggcccctggtgcaggacctgctgaaccatgatgactgctacatcctggaccagagcggcaccaagatctacgtgtggaagggcaaaggagccaccaaggccgagaagcaggccgccatgagcaaggccctgggcttcatcaagatgaagagctaccccagcagcaccaacgtggagaccgtgaatgatggagctgagagcgccatgttcaagcagctgttccagaagtggagcgtgaaggaccagaccatgggcctgggcaagaccttcagcatcggcaagatcgccaaggtgttccaggacaagtttgatgtgaccctgctgcacaccaagccagaggtggccgcccaggagaggatggtggatgatggaaatggcaaggtggaggtgtggagaattgagaacctggagctggtgcctgtggagtaccagtggtacggcttcttctacggcggggactgctacctggtgctgtacacctatgaggtgaatggcaagccccaccacatcctgtacatctggcagggcagacatgccagccaggatgagctggccgccagcgcctaccaggccgtggaggtggaccggcagtttgatggagctgctgtgcaggtgcgggtgaggatgggcacagagcccaggcacttcatggccatcttcaagggcaagctggtgatctttgaaggaggcaccagcaggaaaggaaatgctgagccagacccccctgtgcggctcttccagatccatggaaatgacaagagcaacaccaaggctgtggaggtgcctgcctttgccagcagcctgaacagcaatgatgtgttcctgctgcggacccaggccgagcactacctgtggtacggcaagggcagcagtggagatgagcgggccatggccaaggagctggccagcctgctgtgtgatggcagcgagaacacagtggccgagggccaggagcctgctgagttctgggacctgctgggcggcaagaccccctatgccaatgacaagaggctgcagcaggagatcctggatgtgcagagccggctgtttgaatgtagcaacaagacaggccagtttgtggtgacagagatcacagacttcacccaggatgacctgaaccccacagatgtgatgctgctggacacctgggaccaggtgttcctgtggattggagctgaggccaatgccacagagaaggagagcgccctggccacagcccagcagtacctgcacacccaccccagcggccgggaccctgacacccccatcctgatcatcaagcagggctttgagccccccatcttcaccggctggttcctggcctgggaccccaacatctggagcgctgggaagacctatgagcagctgaaggaggagctgggagatgctgctgccatcatgaggatcacagctgacatgaagaatgccaccctgagcctgaacagcaatgattctgagcccaagtactaccccatcgctgtgctgctgaagaaccagaaccaggagctgcctgaagatgtgaacccagccaagaaggagaactacctgtctgagcaggactttgtgtctgtgtttggcatcacccggggccagtttgctgccctgcccggctggaagcagctgcagatgaagaaggagaagggcctcttctag

SEQ ID NO: 143122 - DNA, 474 bp, synthetic construct
  misc_feature 1..474: note = Description of Artificial Sequence: Synthetic coding sequence
  source 1..474: mol_type = other DNA
atgcccctgaccagcgccttccgggctgtggacaatgaccccggcatcatcgtgtggagaattgagaagatggagctggccctggtgcctgtgtctgcccacggcaacttctatgaaggagactgctacgtgatcctgagcaccaggagagtggccagcctgctgagccaggacatccacttctggattggcaaggacagcagccaggatgagcagagctgtgccgccatctacaccacccagctggatgactacctgggcggcagccctgtgcagcaccgggaggtgcagtaccatgaaagtgacaccttccggggctacttcaagcagggcatcatctacaagcagggcggcgtggccagcggcatgaagcacgtggagaccaacacctatgatgtgaagaggctgctgcacgtgaagggcaagaggaacatccgggccacagaggtggagatgtcctgggacagcttctag

SEQ ID NO: 143123 - DNA, 2859 bp, synthetic construct
  misc_feature 1..2859: note = Description of Artificial Sequence: Synthetic coding sequence
  source 1..2859: mol_type = other DNA
atgaagttcaagagaagacaccaggccttccccagcttcttcaagatgaaggtgtccctgcccagcgaccccagctgtgtggaggagatcctgcgggagagccagcacctgaccccaggcttcaccctgcagaagtggaatgaccccaccacccgggccagcaccaagtctgtgtccttcaagtccatgctggaggatgacctgaagctgagcagtgatgaagatgacctggagcctgtgaagaccctgaccacccagtgcacagccacagagctgtaccaggccgtggagaaggccaagcccaggaacaaccctgtgaacccccccctggccaccccccagcccccacctgctgtgcaggccagcggcggcagcggcagcagcagcgagagcgagagcagcagcgagagtgacagcgacacagagagcagcaccacagacagcgagagcaatgaggccccccgggtggccaccccagagcctgagccccccagcaccaacaagtggcagctggacaagtggctgaacaaggtgaccagccagaacaagagcttcatctgtggccagaatgagacccccatggagaccatcagcctgcccccacccatcatccagcccatggaggtgcagatgaaggtgaagaccaatgccagccaggtgcctgctgagcccaaggagcggcccctgctgagcctcatccgggagaaggcccggccccggcccacccagaagatccctgagaccaaggccctgaagcacaagctgagcaccaccagcgagaccgtgtcccagaggaccatcggcaagaagcagcccaagaaggtggagaagaacaccagcacagatgagttcacctggcccaagcccaacatcaccagcagcacccccaaggagaaggagagcgtggagctgcatgaccccccccggggcaggaacaaggccacagcccacaagccagcccccaggaaggagccccggcccaacatccccctggcccctgagaagaagaagtaccggggccctgggaagatcgtgcccaagagccgggagttcatcgagacagacagcagcaccagtgacagcaacacagaccaggaggagaccctgcagatcaaggtgctgcccccctgcatcatcagcggcggcaacacagccaagagcaaggagatctgtggggccagcctgaccctgagcaccctgatgagcagcagcggcagcaacaacaacctgagcatcagcaatgaggagcccaccttcagccccatccctgtgatgcagacagagatcctgagccccctgcgggaccacgagaacctgaagaacctgtgggtgaagattgacctggacctgctgagccgggtgcccggccacagcagcctgcacgccgccccagccaagccagaccacaaggagacagccaccaagcccaagaggcagacagctgtgacagctgtggagaagccagcccccaagggcaagaggaagcacaagcccatcgaggtggccgagaagatccctgagaagaagcagaggctggaggaggccaccaccatctgcctgctgcccccctgcatcagccctgccccaccccacaagccacccaacacccgggagaacaacagcagcagaagagccaacagaaggaaggaggagaagctgtttcctccacccctgagccccctgcctgaagatcctccaagaagaagaaatgtgtctggcaacaacggccccttcggccaggacaagaacatcgccatgacaggccagatcaccagcaccaagcccaagaggacagagggcaagttctgtgccaccttcaagggcatctctgtgaatgaaggagacacccccaagaaggccagcagcgccaccatcaccgtgaccaacacagccatcgccacagccaccgtgacagccacagccatcgtgaccaccaccgtgacagccacagccacagccacagccaccaccaccaccaccaccaccaccatcagcaccatcaccagcaccatcaccaccggcctgatggacagcagccacctggagatgacctcctgggccgccctgcccctgctgagcagcagcagcaccaacgtgcggcggcccaagctgacctttgatgattctgtgcacaatgctgactactacatgcaggaggccaagaagctgaagcacaaggcagatgccctgtttgagaagtttgggaaggctgtgaactatgcagatgctgccctgtccttcacagaatgtggaaatgccatggagcgggaccccctggaggccaagagcccctacaccatgtacagcgagaccgtggagctgctgcgctatgccatgaggctgaagaactttgccagccccctggccagtgatggagacaagaagctggccgtgctgtgctaccgctgcctgagcctgctgtacctgaggatgttcaagctgaagaaggaccacgccatgaagtacagccgcagcctgatggagtacttcaagcagaatgccagcaaggtggcccagatccccagcccctgggtgtccaatggcaagaacacccccagccctgtgtccctgaacaacgtgagccccatcaatgccatgggcaactgcaacaatggacctgtgaccatcccccagaggatccaccacatggccgccagccacgtgaacatcaccagcaatgtgctgcggggctatgagcactgggacatggctgacaagctgacccgggagaacaaggagttctttggagacctggacaccctgatgggccccctgacccagcacagctccatgaccaacctggtgcgctacgtgcggcagggcctgtgctggctgagaattgatgcccacctgctgtag

SEQ ID NO: 143124 - DNA, 3837 bp, synthetic construct
  misc_feature 1..3837: note = Description of Artificial Sequence: Synthetic coding sequence
  source 1..3837: mol_type = other DNA
atggacctgtttgacttcttccgggactgggacctggagcagcagtgccactatgagcaggacagaagtgccctgaagaagcgggagtgggagaggaggaaccaggaggtgcagcaggaggatgacctcttcagcagcggctttgacctgtttggagagccctacaagaccaacaagggagatgccctggccaacagagtgcagaacaccctgggcaactatgatgagatgaagaacctgctgaccaaccacagcaaccagaaccacctggtgggcatccccaagaacagcgtgccccagaaccccaacaacaagaatgagcccagcttcttccctgagcagaagaaccgcatcatccccccccaccaggacaacacccaccccagcgcccccatgcccccacccagcgtggtgatcctgaacagcaccctcatccacagcaacaggaagagcaagccagagtggagccgggacagccacaaccccagcacagtgctggccagccaggccagcggccagcccaacaagatgcagaccctgacccaggaccagagccaggccaagctggaggacttctttgtgtacccagctgagcagccccagatcggggaggtggaggagagcaaccccagcgccaaggaggacagcaaccccaacagcagtggagaagatgccttcaaggagatcttccagagcaacagccctgaggagagcgagtttgctgtgcaggcccctggcagccccctggtggccagcagcctgctggcccccagcagcggcctgtctgtgcagaacttccccccaggcctgtactgcaagacctccatgggccagcagaagcccacagcctacgtgcggcccatggatggccaggaccaggccccagacatcagccccaccctgaagcccagcattgaatttgagaacagctttggaaacctgagctttggcaccctgctggatggcaagcccagcgctgccagcagcaagaccaagctgcccaagttcaccatcctgcagaccagcgaggtgtccctgcccagcgaccccagctgtgtggaggagatcctgcgggagagccagcacctgaccccaggcttcaccctgcagaagtggaatgaccccaccacccgggccagcaccaagtctgtgtccttcaagtccatgctggaggatgacctgaagctgagcagtgatgaagatgacctggagcctgtgaagaccctgaccacccagtgcacagccacagagctgtaccaggccgtggagaaggccaagcccaggaacaaccctgtgaacccccccctggccaccccccagcccccacctgctgtgcaggccagcggcggcagcggcagcagcagcgagagcgagagcagcagcgagagtgacagcgacacagagagcagcaccacagacagcgagagcaatgaggccccccgggtggccaccccagagcctgagccccccagcaccaacaagtggcagctggacaagtggctgaacaaggtgaccagccagaacaagagcttcatctgtggccagaatgagacccccatggagaccatcagcctgcccccacccatcatccagcccatggaggtgcagatgaaggtgaagaccaatgccagccaggtgcctgctgagcccaaggagcggcccctgctgagcctcatccgggagaaggcccggccccggcccacccagaagatccctgagaccaaggccctgaagcacaagctgagcaccaccagcgagaccgtgtcccagaggaccatcggcaagaagcagcccaagaaggtggagaagaacaccagcacagatgagttcacctggcccaagcccaacatcaccagcagcacccccaaggagaaggagagcgtggagctgcatgaccccccccggggcaggaacaaggccacagcccacaagccagcccccaggaaggagccccggcccaacatccccctggcccctgagaagaagaagtaccggggccctgggaagatcgtgcccaagagccgggagttcatcgagacagacagcagcaccagtgacagcaacacagaccaggaggagaccctgcagatcaaggtgctgcccccctgcatcatcagcggcggcaacacagccaagagcaaggagatctgtggggccagcctgaccctgagcaccctgatgagcagcagcggcagcaacaacaacctgagcatcagcaatgaggagcccaccttcagccccatccctgtgatgcagacagagatcctgagccccctgcgggaccacgagaacctgaagaacctgtgggtgaagattgacctggacctgctgagccgggtgcccggccacagcagcctgcacgccgccccagccaagccagaccacaaggagacagccaccaagcccaagaggcagacagctgtgacagctgtggagaagccagcccccaagggcaagaggaagcacaagcccatcgaggtggccgagaagatccctgagaagaagcagaggctggaggaggccaccaccatctgcctgctgcccccctgcatcagccctgccccaccccacaagccacccaacacccgggagaacaacagcagcagaagagccaacagaaggaaggaggagaagctgtttcctccacccctgagccccctgcctgaagatcctccaagaagaagaaatgtgtctggcaacaacggccccttcggccaggacaagaacatcgccatgacaggccagatcaccagcaccaagcccaagaggacagagggcaagttctgtgccaccttcaagggcatctctgtgaatgaaggagacacccccaagaaggccagcagcgccaccatcaccgtgaccaacacagccatcgccacagccaccgtgacagccacagccatcgtgaccaccaccgtgacagccacagccacagccacagccaccaccaccaccaccaccaccaccatcagcaccatcaccagcaccatcaccaccggcctgatggacagcagccacctggagatgacctcctgggccgccctgcccctgctgagcagcagcagcaccaacgtgcggcggcccaagctgacctttgatgattctgtgcacaatgctgactactacatgcaggaggccaagaagctgaagcacaaggcagatgccctgtttgagaagtttgggaaggctgtgaactatgcagatgctgccctgtccttcacagaatgtggaaatgccatggagcgggaccccctggaggccaagagcccctacaccatgtacagcgagaccgtggagctgctgcgctatgccatgaggctgaagaactttgccagccccctggccagtgatggagacaagaagctggccgtgctgtgctaccgctgcctgagcctgctgtacctgaggatgttcaagctgaagaaggaccacgccatgaagtacagccgcagcctgatggagtacttcaagcagaatgccagcaaggtggcccagatccccagcccctgggtgtccaatggcaagaacacccccagccctgtgtccctgaacaacgtgagccccatcaatgccatgggcaactgcaacaatggacctgtgaccatcccccagaggatccaccacatggccgccagccacgtgaacatcaccagcaatgtgctgcggggctatgagcactgggacatggctgacaagctgacccgggagaacaaggagttctttggagacctggacaccctgatgggccccctgacccagcacagctccatgaccaacctggtgcgctacgtgcggcagggcctgtgctggctgagaattgatgcccacctgctgtag

SEQ ID NO: 143125 - DNA, 3831 bp, synthetic construct
  misc_feature 1..3831: note = Description of Artificial Sequence: Synthetic coding sequence
  source 1..3831: mol_type = other DNA
atggacctgtttgacttcttccgggactgggacctggagcagcagtgccactatgagcaggacagaagtgccctgaagaagcgggagtgggagaggaggaaccaggaggtgcagcaggaggatgacctcttcagcagcggctttgacctgtttggagagccctacaagaccaacaagggagatgccctggccaacagagtgcagaacaccctgggcaactatgatgagatgaagaacctgctgaccaaccacagcaaccagaaccacctggtgggcatccccaagaacagcgtgccccagaaccccaacaacaagaatgagcccagcttcttccctgagcagaagaaccgcatcatccccccccaccaggacaacacccaccccagcgcccccatgcccccacccagcgtggtgatcctgaacagcaccctcatccacagcaacaggaagagcaagccagagtggagccgggacagccacaaccccagcacagtgctggccagccaggccagcggccagcccaacaagatgcagaccctgacccaggaccagagccaggccaagctggaggacttctttgtgtacccagctgagcagccccagatcggggaggtggaggagagcaaccccagcgccaaggaggacagcaaccccaacagcagtggagaagatgccttcaaggagatcttccagagcaacagccctgaggagagcgagtttgctgtgcaggcccctggcagccccctggtggccagcagcctgctggcccccagcagcggcctgtctgtgcagaacttccccccaggcctgtactgcaagacctccatgggccagcagaagcccacagcctacgtgcggcccatggatggccaggaccaggccccagacatcagccccaccctgaagcccagcattgaatttgagaacagctttggaaacctgagctttggcaccctgctggatggcaagcccagcgctgccagcagcaagaccaagctgcccaagttcaccatcctgcagaccagcgaggtgtccctgcccagcgaccccagctgtgtggaggagatcctgcgggagagccagcacctgaccccaggcttcaccctgcagaagtggaatgaccccaccacccgggccagcaccaagtctgtgtccttcaagtccatgctggaggatgacctgaagctgagcagtgatgaagatgacctggagcctgtgaagaccctgaccacccagtgcacagccacagagctgtaccaggccgtggagaaggccaagcccaggaacaaccctgtgaacccccccctggccaccccccagcccccacctgctgtgcaggccagcggcggcagcggcagcagcagcgagagcgagagcagcagcgagagtgacagcgacacagagagcagcaccacagacagcgagagcaatgaggccccccgggtggccaccccagagcctgagccccccagcaccaacaagtggcagctggacaagtggctgaacaaggtgaccagccagaacaagagcttcatctgtggccagaatgagacccccatggagaccatcagcctgcccccacccatcatccagcccatggaggtgcagatgaaggtgaagaccaatgccagccaggtgcctgctgagcccaaggagcggcccctgctgagcctcatccgggagaaggcccggccccggcccacccagaagatccctgagaccaaggccctgaagcacaagctgagcaccaccagcgagaccgtgtcccagaggaccatcggcaagaagcagcccaagaaggtggagaagaacaccagcacagatgagttcacctggcccaagcccaacatcaccagcagcacccccaaggagaaggagagcgtggagctgcatgaccccccccggggcaggaacaaggccacagcccacaagccagcccccaggaaggagccccggcccaacatccccctggcccctgagaagaagaagtaccggggccctgggaagatcgtgcccaagagccgggagttcatcgagacagacagcagcaccagtgacagcaacacagaccaggaggagaccctgcagatcaaggtgctgcccccctgcatcatcagcggcggcaacacagccaagagcaaggagatctgtggggccagcctgaccctgagcaccctgatgagcagcagcggcagcaacaacaacctgagcatcagcaatgaggagcccaccttcagccccatccctgtgatgcagacagagatcctgagccccctgcgggaccacgagaacctgaagaacctgtgggtgaagattgacctggacctgctgagccgggtgcccggccacagcagcctgcacgccgccccagccaagccagaccacaaggagacagccaccaagcccaagaggcagacagctgtgacagctgtggagaagccagcccccaagggcaagaggaagcacaagcccatcgaggtggccgagaagatccctgagaagaagcagaggctggaggaggccaccaccatctgcctgctgcccccctgcatcagccctgccccaccccacaagccacccaacacccgggagaacaacagcagcagaagagccaacagaaggaaggaggagaagctgtttcctccacccctgagccccctgcctgaagatcctccaagaagaagaaatgtgtctggcaacaacggccccttcggccaggacaagaacatcgccatgacaggccagatcaccagcaccaagcccaagaggacagagggcaagttctgtgccaccttcaagggcatcagcgagggggacacccccaagaaggccagcagcgccaccatcaccgtgaccaacacagccatcgccacagccaccgtgacagccacagccatcgtgaccaccaccgtgacagccacagccacagccacagccaccaccaccaccaccaccaccaccatcagcaccatcaccagcaccatcaccaccggcctgatggacagcagccacctggagatgacctcctgggccgccctgcccctgctgagcagcagcagcaccaacgtgcggcggcccaagctgacctttgatgattctgtgcacaatgctgactactacatgcaggaggccaagaagctgaagcacaaggcagatgccctgtttgagaagtttgggaaggctgtgaactatgcagatgctgccctgtccttcacagaatgtggaaatgccatggagcgggaccccctggaggccaagagcccctacaccatgtacagcgagaccgtggagctgctgcgctatgccatgaggctgaagaactttgccagccccctggccagtgatggagacaagaagctggccgtgctgtgctaccgctgcctgagcctgctgtacctgaggatgttcaagctgaagaaggaccacgccatgaagtacagccgcagcctgatggagtacttcaagcagaatgccagcaaggtggcccagatccccagcccctgggtgtccaatggcaagaacacccccagccctgtgtccctgaacaacgtgagccccatcaatgccatgggcaactgcaacaatggacctgtgaccatcccccagaggatccaccacatggccgccagccacgtgaacatcaccagcaatgtgctgcggggctatgagcactgggacatggctgacaagctgacccgggagaacaaggagttctttggagacctggacaccctgatgggccccctgacccagcacagctccatgaccaacctggtgcgctacgtgcggcagggcctgtgctggctgagaattgatgcccacctgctgtag

SEQ ID NO: 143126 - DNA, 1284 bp, synthetic construct
  misc_feature 1..1284: note = Description of Artificial Sequence: Synthetic coding sequence
  source 1..1284: mol_type = other DNA
atggacctgtttgacttcttccgggactgggacctggagcagcagtgccactatgagcaggacagaagtgccctgaagaagcgggagtgggagaggaggaaccaggaggtgcagcaggaggatgacctcttcagcagcggctttgacctgtttggagagccctacaagaccaacaagggagatgccctggccaacagagtgcagaacaccctgggcaactatgatgagatgaagaacctgctgaccaaccacagcaaccagaaccacctggtgggcatccccaagaacagcgtgccccagaaccccaacaacaagaatgagcccagcttcttccctgagcagaagaaccgcatcatccccccccaccaggacaacacccaccccagcgcccccatgcccccacccagcgtggtgatcctgaacagcaccctcatccacagcaacaggaagagcaagccagagtggagccgggacagccacaaccccagcacagtgctggccagccaggccagcggccagcccaacaagatgcagaccctgacccaggaccagagccaggccaagctggaggacttctttgtgtacccagctgagcagccccagatcggggaggtggaggagagcaaccccagcgccaaggaggacagcaaccccaacagcagtggagaagatgccttcaaggagatcttccagagcaacagccctgaggagagcgagtttgctgtgcaggcccctggcagccccctggtggccagcagcctgctggcccccagcagcggcctgtctgtgcagaacttccccccaggcctgtactgcaagacctccatgggccagcagaagcccacagcctacgtgcggcccatggatggccaggaccaggccccagacatcagccccaccctgaagcccagcattgaatttgagaacagctttggaaacctgagctttggcaccctgctggatggcaagcccagcgctgccagcagcaagaccaagctgcccaagttcaccatcctgcagaccagcgaggtgtccctgcccagcgaccccagctgtgtggaggagatcctgcgggagagccagcacctgaccccaggcttcaccctgcagaagtggaatgaccccaccacccgggccagcaccaagatgctggaggatgacctgaagctgagcagtgatgaagatgacctggagcctgtgaagaccctgaccacccagtgcacagccacagagctgtaccaggccgtggagaaggccaagcccaggaacaaccctgtgaagtag

SEQ ID NO: 143127 - DNA, 3936 bp, synthetic construct
  misc_feature 1..3936: note = Description of Artificial Sequence: Synthetic coding sequence
  source 1..3936: mol_type = other DNA
atggacctgtttgacttcttccgggactgggacctggagcagcagtgccactatgagcaggacagaagtgccctgaagaagcgggagtgggagaggaggaaccaggaggtgcagcaggaggatgacctcttcagcagcggctttgacctgtttggagagccctacaaggtggccgagtacaccaacaagggagatgccctggccaacagagtgcagaacaccctgggcaactatgatgagatgaagaacctgctgaccaaccacagcaaccagaaccacctggtgggcatccccaagaacagcgtgccccagaaccccaacaacaagaatgagcccagcttcttccctgagcagaagaaccgcatcatccccccccaccaggacaacacccaccccagcgcccccatgcccccacccagcgtggtgatcctgaacagcaccctcatccacagcaacaggaagagcaagccagagtggagccgggacagccacaaccccagcacagtgctggccagccaggccagcggccagcccaacaagatgcagaccctgacccaggaccagagccaggccaagctggaggacttctttgtgtacccagctgagcagccccagatcggggaggtggaggagagcaaccccagcgccaaggaggacagcaaccccaacagcagtggagaagatgccttcaaggagatcttccagagcaacagccctgaggagagcgagtttgctgtgcaggcccctggcagccccctggtggccagcagcctgctggcccccagcagcggcctgtctgtgcagaacttccccccaggcctgtactgcaagacctccatgggccagcagaagcccacagcctacgtgcggcccatggatggccaggaccaggccccagacatcagccccaccctgaagcccagcattgaatttgagaacagctttggaaacctgagctttggcaccctgctggatggcaagcccagcgctgccagcagcaagaccaagctgcccaagttcaccatcctgcagaccagcgaggtgtccctgcccagcgaccccagctgtgtggaggagatcctgcgggagatgacccacagctggcccacccccctgacctccatgcacacagctggccacagcgagcagagcaccttcagcatccctggccaggagagccagcacctgaccccaggcttcaccctgcagaagtggaatgaccccaccacccgggccagcaccaagtctgtgtccttcaagtccatgctggaggatgacctgaagctgagcagtgatgaagatgacctggagcctgtgaagaccctgaccacccagtgcacagccacagagctgtaccaggccgtggagaaggccaagcccaggaacaaccctgtgaacccccccctggccaccccccagcccccacctgctgtgcaggccagcggcggcagcggcagcagcagcgagagcgagagcagcagcgagagtgacagcgacacagagagcagcaccacagattctgagagcaatgaggccccccgggtggccaccccagagcctgagccccccagcaccaacaagtggcagctggacaagtggctgaacaaggtgaccagccagaacaagagcttcatctgtggccagaatgagacccccatggagaccatcagcctgcccccacccatcatccagcccatggaggtgcagatgaaggtgaagaccaatgccagccaggtgcctgctgagcccaaggagcggcccctgctgagcctcatccgggagaaggcccggccccggcccacccagaagatccctgagaccaaggccctgaagcacaagctgagcaccaccagcgagaccgtgtcccagaggaccatcggcaagaagcagcccaagaaggtggagaagaacaccagcacagatgagttcacctggcccaagcccaacatcaccagcagcacccccaaggagaaggagagcgtggagctgcatgaccccccccggggcaggaacaaggccacagcccacaagccagcccccaggaaggagccccggcccaacatccccctggcccctgagaagaagaagtaccggggccctgggaagatcgtgcccaagagccgggagttcattgaaacagacagcagcaccagtgacagcaacacagaccaggaggagaccctgcagatcaaggtgctgcccccctgcatcatcagcggcggcaacacagccaagagcaaggagatctgtggggccagcctgaccctgagcaccctgatgagcagcagcggcagcaacaacaacctgagcatcagcaatgaggagcccaccttcagccccatccctgtgatgcagacagagatcctgagccccctgcgggaccacgagaacctgaagaacctgtgggtgaagattgacctggacctgctgagccgggtgcccggccacagcagcctgcatgctgccccagccaagccagaccacaaggagacagccaccaagcccaagaggcagacagctgtgacagctgtggagaagccagcccccaagggcaagaggaagcacaagcccatcgaggtggccgagaagatccctgagaagaagcagaggctggaggaggccaccaccatctgcctgctgcccccctgcatcagccctgccccaccccacaagccacccaacacccgggagaacaacagcagccggcgggccaacagaaggaaggaggagaagctgttccccccacccctgagccccctgcctgaggacccccccaggagaagaaatgtgtctggcaacaacggccccttcggccaggacaagaacatcgccatgacaggccagatcaccagcaccaagcccaagaggacagagggcaagttctgtgccaccttcaagggcatctctgtgaatgaaggagacacccccaagaaggccagcagcgccaccatcaccgtgaccaacacagccatcgccacagccaccgtgacagccacagccatcgtgaccaccaccgtgacagccacagccacagccacagccaccaccaccaccaccaccaccaccatcagcaccatcaccagcaccatcaccaccggcctgatggacagcagccacctggagatgacctcctgggccgccctgcccctgctgagcagcagcagcaccaacgtgagaagacccaagctgacctttgatgacagcgtgcacaatgctgactactacatgcaggaggccaagaagctgaagcacaaggcagatgccctgtttgagaagtttgggaaggctgtgaactatgcagatgctgccctgtccttcacagaatgtggaaatgccatggagcgggaccccctggaggccaagagcccctacaccatgtacagcgagaccgtggagctgctgcgctatgccatgaggctgaagaactttgccagccccctggccagtgatggagacaagaagctggccgtgctgtgctaccgctgcctgagcctgctgtacctgaggatgttcaagctgaagaaggaccacgccatgaagtacagccgcagcctgatggagtacttcaagcagaatgccagcaaggtggcccagatccccagcccctgggtgtccaatggcaagaacacccccagccctgtgtccctgaacaacgtgagccccatcaatgccatgggcaactgcaacaacggccctgtgaccatcccccagaggatccaccacatggccgccagccacgtgaacatcaccagcaatgtgctgcggggctatgagcactgggacatggctgacaagctgacccgggagaacaaggagttcttcggggacctggacaccctgatgggccccctgacccagcacagctccatgaccaacctggtgcgctacgtgcggcagggcctgtgctggctgagaattgatgcccacctgctgtag

SEQ ID NO: 143128 - DNA, 1410 bp, synthetic construct
  misc_feature 1..1410: note = Description of Artificial Sequence: Synthetic coding sequence
  source 1..1410: mol_type = other DNA
atgtctgccctgaccccacccacagacatgcccacccccaccacagacaagatcacccaggccgccatggagaccatctacctgtgcaagttccgggtgtccatggatggagagtggctgtgcctgcgggagctggatgacatcagcctgaccccagaccctgagcccacccatgaggaccccaactacctgatggccaatgaaagaatgaacctgatgaacatggccaagctgagcatcaagggcctcatcgagagcgccctgaacctgggccgcaccctggacagcgactatgcccccctgcagcagttctttgtggtgatggagcactgcctgaagcacggcctgaaggccaagaagaccttcctgggccagaacaagagcttctggggccccctggagctggtggagaagctggtgcctgaggccgctgagatcacagcctctgtgaaggacctgcccggcctgaagacccctgtgggccggggccgggcctggctgcggctggccctgatgcagaagaagctgtctgagtacatgaaggccctgatcaacaagaaggagctgctgtctgagttctatgagcccaatgccctgatgatggaggaggagggcgccatcatcgccggcctgctggtgggcctgaatgtgattgatgccaacttctgcatgaagggggaggacctggacagccaggtgggcgtcatcgacttctccatgtacctgaaggatggcaacagcagcaaaggaacagaaggagatggccagatcacagccatcctggaccagaagaactacgtggaggagctgaacagacacctgaatgccaccgtgaacaacctgcaggccaaggtggatgccctggagaagagcaacaccaagctgacagaggagctggccgtggccaacaaccgcatcatcaccctgcaggaggagatggagcgggtgaaggaggagagcagctacatcctggagagcaacaggaagggccccaagcaggacagaacagctgagggccaggccctgtctgaggccaggaagcacctgaaggaggagacccagctgcggctggatgtggagaaggagctggagatgcagatctccatgaggcaggagatggagctggccatgaagatgctggagaaggatgtgtgtgagaagcaggatgccctggtgtccctgcggcagcagctggatgacctgcgggccctgaagcatgagctggccttcaagctgcagagcagtgacctgggcgtgaagcagaagtctgagctgaacagccggctggaggagaagaccaaccagatggccgccaccatcaagcagctggagcagagcgagaaggacctggtgaagcaggccaagaccctgaacagcgctgccaacaagctgatccccaagcaccactag

SEQ ID NO: 143129 - DNA, 2394 bp, synthetic construct
  misc_feature 1..2394: note = Description of Artificial Sequence: Synthetic coding sequence
  source 1..2394: mol_type = other DNA
atggcccaccgctgcctgcggctgtggggccggggcggctgctggccccggggcctgcagcagctgctggtgcctggaggagtgggccctggagagcagccctgcctgcggaccctgtacagatttgtgaccacccaggcccgggccagcaggaacagcctgctgacagacatcatcgccgcctaccagcgcttctgcagcaggcctcccaagggctttgagaagtacttccccaacgggaagaatggcaagaaggccagcgagcccaaggaggtgatgggagagaagaaggagagcaagccagctgccaccaccaggagcagcggcggcggcggcggcggcggcggcaagagaggaggcaagaaggatgacagccactggtggagccgcttccagaagggggacatcccctgggatgacaaggacttcaggatgttcttcctgtggacagccctcttctggggcggcgtgatgttctacctgctgctgaagaggagcggccgggagatcacctggaaggactttgtgaacaactacctgagcaagggcgtggtggaccggctggaggtggtgaacaagagatttgtgcgggtgaccttcacccctgggaagacccctgtggatggccagtatgtgtggttcaacatcggctctgtggacacctttgagaggaacctggagaccctgcagcaggagctgggcattgaaggagagaacagagtgcctgtggtgtacatcgccgagagtgatggcagcttcctgctgtccatgctgcccaccgtgctgatcatcgccttcctgctgtacaccatccggcggggccctgctggcatcggccgcacaggccggggcatgggcggcctcttctctgtgggggagaccacagccaaggtgctgaaggatgaaattgatgtgaagttcaaggatgtggccggctgtgaggaggccaagctggagatcatggagtttgtgaacttcctgaagaaccccaagcagtaccaggacctgggcgccaagatccccaagggggccatcctgactggacctcctggcaccgggaagaccctgctggccaaggccacagctggggaggccaacgtgcccttcatcaccgtgtctggcagcgagttcctggagatgtttgtgggcgtgggccctgcccgggtgcgggacctgtttgccctggccaggaagaatgccccctgcatcctcttcattgatgaaattgatgctgtgggcaggaagaggggccggggcaactttggaggccagagcgagcaggagaacaccctgaaccagctgctggtggagatggatggcttcaacaccaccaccaacgtggtgatcctggccggcaccaacagaccagacatcctggaccctgccctgctgcggcccggccgctttgaccggcagatcttcatcggccccccagacatcaagggccgggccagcatcttcaaggtgcacctgcggcccctgaagctggacagcaccctggagaaggacaagctggccaggaagctggccagcctgaccccaggcttctctggagcagatgtggccaacgtgtgcaatgaggccgccctgattgctgcccggcacctgagtgacagcatcaaccagaagcactttgagcaggccatcgagcgggtgattggaggcctggagaagaagacccaggtgctgcagcctgaggagaagaagacagtggcctaccacgaggccggccatgctgtggccggctggtacctggagcacgccgaccccctgctgaaggtgtccatcatcccccggggcaagggcctgggctacgcccagtacctgcccaaggagcagtacctgtacaccaaggagcagctgctggacaggatgtgcatgaccctgggcggccgggtgtctgaggagatcttcttcggccgcatcaccaccggggcccaggatgacctgaggaaggtgacccagagcgcctatgcccagatcgtgcagtttggcatgaatgagaaggtgggccagatcagctttgacctgccccggcagggcgacatggtgctggagaagccctacagcgaggccacagcccggctgattgatgatgaggtgcgcatcctgatcaatgatgcctacaagaggacagtggccctgctgacagagaagaaggcagatgtggagaaggtggccctgctgctgctggagaaggaggtgctggacaagaatgacatggtggagctgctgggcccccggccctttgctgagaagagcacctatgaggagtttgtggagggcaccggcagcctggatgaggacaccagcctgcctgagggcctgaaggactggaacaaggagcgggagaaggagaaggaggagcccccaggagagaaggtggccaactag

SEQ ID NO: 143130 - DNA, 2439 bp, synthetic construct
  misc_feature 1..2439: note = Description of Artificial Sequence: Synthetic coding sequence
  source 1..2439: mol_type = other DNA
ggggccggcggcagaagaagaagagtggagagcctgggcagctctgtgtccagaagaagagccagcctgcccggcggcctgagccccagccgggcccgcttccccaggcctcctgtggtggcctgcccccggctgcgggagcagccctgcctgcggaccctgtacagatttgtgaccacccaggcccgggccagcaggaacagcctgctgacagacatcatcgccgcctaccagcgcttctgcagccggccccccaagggctttgagaagtacttccccaacgggaagaatggcaagaaggccagcgagcccaaggaggtgatgggagagaagaaggagagcaagccagctgccaccaccaggagcagcggcggcggcggcggcggcggcggcaagaggggcggcaagaaggatgacagccactggtggagccgcttccagaagggggacatcccctgggatgacaaggacttcaggatgttcttcctgtggacagccctcttctggggcggcgtgatgttctacctgctgctgaagaggagcggccgggagatcacctggaaggactttgtgaacaactacctgagcaaaggagtggtggaccggctggaggtggtgaacaagagatttgtgcgggtgaccttcaccccaggcaagacccctgtggatggccagtatgtgtggttcaacatcggctctgtggacacctttgaaagaaacctggagaccctgcagcaggagctgggcatcgagggagaaaatagagtgcctgtggtgtacatcgccgagagtgatggcagcttcctgctgtccatgctgcccaccgtgctgatcatcgccttcctgctgtacaccatcagaagaggccctgctggcattggaagaacaggccggggcatgggcggcctcttctctgtgggggagaccacagccaaggtgctgaaggatgaaattgatgtgaagttcaaggatgtggccggctgtgaggaggccaagctggagatcatggagtttgtgaacttcctgaagaaccccaagcagtaccaggacctgggcgccaagatccccaagggggccatcctgaccggccccccaggcaccgggaagaccctgctggccaaggccacagctggggaggccaacgtgcccttcatcaccgtgtctggcagcgagttcctggagatgtttgtgggcgtgggccctgcccgggtgcgggacctgtttgccctggccaggaagaatgccccctgcatcctcttcattgatgaaattgatgctgtgggcaggaagaggggccggggcaactttggaggccagagcgagcaggagaacaccctgaaccagctgctggtggagatggatggcttcaacaccaccaccaacgtggtgatcctggccggcaccaacagaccagacatcctggaccctgccctgctgcggcccggccgctttgaccggcagatcttcatcggccccccagacatcaagggccgggccagcatcttcaaggtgcacctgcggcccctgaagctggacagcaccctggagaaggacaagctggccaggaagctggccagcctgaccccaggcttcagcggggctgatgtggccaacgtgtgcaatgaagctgccctgattgctgcccggcacctgagtgacagcatcaaccagaagcactttgagcaggccatcgagagggtcatcggcggcctggagaagaagacccaggtgctgcagcctgaggagaagaagacagtggcctaccatgaagctggccatgctgtggccggctggtacctggagcacgccgaccccctgctgaaggtgtccatcatcccccggggcaagggcctgggctacgcccagtacctgcccaaggagcagtacctgtacaccaaggagcagctgctggacaggatgtgcatgaccctgggcggccgggtgtctgaggagatcttcttcggccgcatcaccactggagcccaggatgacctgaggaaggtgacccagagcgcctatgcccagatcgtgcagtttggcatgaatgagaaggtgggccagatcagctttgacctgccccggcagggcgacatggtgctggagaagccctacagcgaggccacagcccggctgattgatgatgaggtgcgcatcctgatcaatgatgcctacaagaggacagtggccctgctgacagagaagaaggcagatgtggagaaggtggccctgctgctgctggagaaggaggtgctggacaagaatgacatggtggagctgctgggcccccggccctttgctgagaagagcacctatgaggagtttgtggagggcaccggcagcctggatgaggacaccagcctgcctgagggcctgaaggactggaacaaggagcgggagaaggagaaggaggagcccccaggagagaaggtggccaactag

SEQ ID NO: 143131 - DNA, 7251 bp, synthetic construct
  misc_feature 1..7251: note = Description of Artificial Sequence: Synthetic coding sequence
  source 1..7251: mol_type = other DNA
atgaccaccctgctgtgggtgtttgtgaccctgcgggtcatcacagctgctgtgacagtggagaccagtgaccatgacaacagcctgtctgtgtccatcccccagcccagccccctgcgggtgctgctgggcaccagcctgaccatcccctgctacttcatcgaccccatgcaccctgtgaccacagcccccagcacagcccccctggccccccgcatcaagtggagccgggtgtccaaggagaaggaggtggtgctgctggtggccacagagggccgggtgcgggtgaacagcgcctaccaggacaaggtgtccctgcccaactacccagccatccccagtgatgccaccctggaggtgcagagcctgcggagcaatgacagcggcgtgtaccgctgtgaggtgatgcatggaattgaggacagcgaggccaccctggaggtggtggtgaagggcatcgtgttccactaccgggccatcagcacccgctacaccctggactttgaccgggcccagagggcctgcctgcagaacagcgccatcatcgccaccccagagcagctgcaggccgcctatgaagatggcttccaccagtgtgatgctggctggctggccgaccagacagtgcgctaccccatccacaccccccgggagggctgctatggagacaaggatgagttccctggggtgaggacctacggcatccgggacaccaatgagacctatgatgtgtactgctttgctgaggagatggagggggaggtgttctacgccaccagccctgagaagttcaccttccaggaggccgccaatgaatgtcggcggctgggcgcccggctggccaccaccggccagctgtacctggcctggcaggccggcatggacatgtgcagcgctggctggctggccgacagatctgtgcgctaccccatcagcaaggcccggcccaactgtggcggcaacctgctgggcgtgaggacagtgtatgtgcacgccaaccagacaggctacccagaccccagcagccgctatgatgccatctgctacaccggggaggactttgtggacatccctgagaacttcttcggcgtgggcggggaggaggacatcaccgtgcagacagtgacctggccagacatggagctgcccctgcccaggaacatcacagaaggagaggcccggggcagcgtcatcctgactgtgaagcccatctttgaggtgagccccagccccctggagcctgaggagcccttcacctttgcccctgagatcggggccacagcctttgctgaggtggagaatgagaccggggaggccacccggccctggggcttccccaccccaggcctgggccctgccacagccttcaccagcgaggacctggtggtgcaggtgacagctgtgcccggccagccccacctgcctggaggagtggtgttccactaccggcccggccccacccgctacagcctgacctttgaggaggcccagcaggcctgcctgaggactggagctgtgattgccagccctgagcagctgcaggccgcctatgaagctggctatgagcagtgtgatgctggctggctgcgggaccagacagtgcgctaccccatcgtgagccccaggaccccctgtgtgggggacaaggacagcagccctggggtgaggacctacggcgtgcggcccagcacagagacctatgatgtgtactgctttgtggaccggctggagggggaggtgttctttgccacccggctggagcagttcaccttccaggaggccctggagttctgtgagagccacaatgccaccctggccaccaccggccagctgtatgctgcctggagccggggcctggacaagtgctacgccggctggctggctgatggcagcctgcgctaccccatcgtgacccccaggcctgcctgtggcggggacaagccaggagtgaggacagtgtacctgtaccccaaccagacaggcctgcctgaccccctgagccgccaccacgccttctgcttccggggcatctctgctgtgcccagccctggagaggaggagggcggcacccccaccagccccagcggcgtggaggagtggatcgtgacccaggtggtgcctggggtggccgctgtgcctgtggaggaggagaccacagctgtgcccagcggggagaccacagccatcctggagttcaccacagagcctgagaaccagacagagtgggagcccgcctacacccctgtgggcaccagccccctgcccggcatcctgcccacctggccacccaccggggccgccacagaggagagcacagagggccccagcgccacagaggtgcccagcgccagcgaggagcccagccccagcgaggtgcccttccccagcgaggagcccagccccagcgaggagcccttccccagcgtgcggcccttccccagcgtggagctgttccccagcgaggagcccttccccagcaaggagcccagccccagcgaggagcccagcgccagcgaggagccctacacccccagcccccctgtgcccagctggacagagctgcccagcagtggagaggagagcggggccccagatgtgtctggggacttcaccggcagcggagatgtgtctggccacctggacttcagcggccagctgagcggggaccgggccagcggcctgcccagcggggacctggacagcagcggcctgaccagcacagtgggcagcggcctgcctgtggagagcggcctgcccagcggagatgaggagcgcatcgagtggcccagcacccccaccgtgggggagctgcccagcggggctgagatcctggagggcagcgccagcggcgtgggggacctgagcggcctgcccagcggggaggtgctggagaccagcgccagcggcgtgggggacctgagcggcctgcccagcggggaggtgctggagaccacagcccctggggtggaggacatcagcggcctgcccagcggggaggtgctggagaccacagcccctggggtggaggacatcagcggcctgcccagcggggaggtgctggagaccacagcccctggggtggaggacatcagcggcctgcccagcggggaggtgctggagaccacagcccctggggtggaggacatcagcggcctgcccagcggggaggtgctggagaccacagcccctggggtggaggacatcagcggcctgcccagcggggaggtgctggagacagctgcccctggggtggaggacatcagcggcctgcccagcggggaggtgctggagacagctgcccctggggtggaggacatcagcggcctgcccagcggggaggtgctggagacagctgcccctggggtggaggacatcagcggcctgcccagcggggaggtgctggagacagctgcccctggggtggaggacatcagcggcctgcccagcggggaggtgctggagacagctgcccctggggtggaggacatcagcggcctgcccagcggggaggtgctggagacagctgcccctggggtggaggacatcagcggcctgcccagcggggaggtgctggagacagctgcccctggggtggaggacatcagcggcctgcccagcggggaggtgctggagacagctgcccctggggtggaggacatcagcggcctgcccagcggggaggtgctggagacagctgcccctggggtggaggacatcagcggcctgcccagcggggaggtgctggagacagctgcccctggggtggaggacatcagcggcctgcccagcggggaggtgctggagacagctgcccctggggtggaggacatcagcggcctgcccagcggggaggtgctggagaccacagcccctggggtggaggagatcagcggcctgcccagcggggaggtgctggagaccacagcccctggggtggatgagatcagcggcctgcccagcggggaggtgctggagaccacagcccctggggtggaggagatcagcggcctgcccagcggggaggtgctggagaccagcaccagcgctgtgggggacctgagcggcctgcccagcggcggggaggtgctggagatctctgtgtctggagtggaggacatcagcggcctgcccagcggggaggtggtggagaccagcgccagcggcattgaagatgtgtctgagctgcccagcggggagggcctggagaccagcgccagcggcgtggaggacctgagccggctgcccagcggggaggaggtgctggagatcagcgccagcggctttggagacctgagcggcctgcccagcggcggggagggcctggagaccagcgccagcgaggtgggcacagacctgagcggcctgcccagcggccgggagggcctggagaccagcgccagcggggctgaggacctgagcggcctgcccagcggcaaggaggacctggtgggcagcgccagcggggacctggacctgggcaagctgcccagcggcaccctgggcagcggccaggcccctgagaccagcggcctgcccagcggcttcagcggggagtacagcggcgtggacctgggcagcggcccccccagcggcctgcctgacttcagcggcctgcccagcggcttccccaccgtgtccctggtggacagcaccctggtggaggtggtgacagccagcacagccagcgagctggagggccggggcaccatcggcatctctggagctggggagatcagcggcctgcccagcagcgagctggacatcagcggccgggccagcggcctgcccagcggcacagagctgagcggccaggccagcggcagcccagatgtgtctggagagatccctggcctgtttggagtgtctggccagcccagcggcttcccagacaccagcggggagaccagcggcgtgacagagctgagcggcctgagcagcggccagcccggcatcagcggggaggccagcggcgtgctgtatggcaccagccagcccttcggcatcacagacctgagcggggagaccagcggcgtgcctgacctgagcggccagcccagcggcctgcccggcttcagcggggccaccagcggcgtgcctgacctggtgtctggcaccaccagcggcagcggggagagcagcggcatcacctttgtggacaccagcctggtggaggtggcccccaccaccttcaaggaggaggagggcctgggctctgtggagctgagcggcctgcccagcggggaggccgacctgagcggcaagagcggcatggtggatgtgtctggccagttctctggaacagtggacagcagcggcttcaccagccagaccccagagttcagcggcctgcccagcggcattgctgaggtgtctggagagagcagcagagctgagatcggcagcagcctgcccagcggggcctactacggcagcggcacccccagcagcttccccaccgtgtccctggtggacaggaccctggtggagagcgtgacccaggcccccacagcccaggaggccggggagggccccagcggcatcctggagctgagcggggcccacagcggggccccagacatgtctggagagcacagcggcttcctggacctgagcggcctgcagagcggcctcatcgagcccagcggggagcccccaggcaccccctacttcagcggggactttgccagcaccaccaacgtgtctggagagagctctgtggccatgggcaccagcggggaggccagcggcctgcctgaggtgaccctcatcaccagcgagtttgtggagggcgtgacagagcccaccatcagccaggagctgggccagaggcctcctgtgacccacaccccccagctgtttgagagcagcggcaaggtgtccacagctggggacatcagcggggccacccctgtgctgcccggcagcggcgtggaggtgtcctctgtgcctgagagcagcagcgagaccagcgcctacccagaggccggctttggagccagcgctgcccctgaggccagccgggaggacagcggcagcccagacctgtctgagaccaccagcgccttccacgaggccaacctggagaggagcagcggcctgggcgtgtctggcagcaccctgaccttccaggagggggaggccagcgctgcccctgaggtgtctggagagagcaccaccaccagtgatgtgggcacagaggcccctggcctgcccagcgccacccccacagccagcggggacagaacagagatcagcggggacctgagcggccacaccagccagctgggcgtggtgatcagcaccagcatccctgagagcgagtggacccagcagacccagaggcctgctgagacccacctggagattgagagcagcagcctgctgtacagcggggaggagacccacacagtggagacagccaccagccccacagatgccagcatcccagccagccctgagtggaagcgggagagcgagagcacagctgctgccccagcccggagctgtgccgaggagccctgtggggccggcacctgcaaggagacagagggccacgtgatctgcctgtgccccccaggctacacaggagagcactgcaacatcgaccaggaggtgtgtgaggagggctggaacaagtaccagggccactgctaccgccacttcccagaccgggagacctgggtggatgctgagcggcgctgccgggagcagcagagccacctgagcagcatcgtgaccccagaggagcaggagtttgtgaacaacaatgcccaggactaccagtggattggcctgaatgacaggaccatcgagggggacttccgctggagcgatggccaccccatgcagtttgagaactggaggcccaaccagcctgacaacttctttgctgctggggaggactgtgtggtgatgatctggcatgagaagggggagtggaatgatgtgccctgcaactaccacctgcccttcacctgcaagaagggcaccgtggcctgtggggagccccctgtggtggagcacgcccggaccttcggccagaagaaggacagatatgagatcaacagcctggtgcgctaccagtgcacagagggctttgtgcagaggcacatgcccaccatccgctgccagcccagcggccactgggaggagccccagatcacctgcacagaccccaccacctacaagaggcggctgcagaagaggagcagccgccacccccggcgcagccggcccagcacagcccactag

SEQ ID NO: 143132 - DNA, 7296 bp, synthetic construct
  misc_feature 1..7296: note = Description of Artificial Sequence: Synthetic coding sequence
  source 1..7296: mol_type = other DNA
atgaccaccctgctgtgggtgtttgtgaccctgcgggtcatcacagctgctgtgacagtggagaccagtgaccatgacaacagcctgtctgtgtccatcccccagcccagccccctgcgggtgctgctgggcaccagcctgaccatcccctgctacttcatcgaccccatgcaccctgtgaccacagcccccagcacagcccccctggccccccgcatcaagtggagccgggtgtccaaggagaaggaggtggtgctgctggtggccacagagggccgggtgcgggtgaacagcgcctaccaggacaaggtgtccctgcccaactacccagccatccccagtgatgccaccctggaggtgcagagcctgcggagcaatgacagcggcgtgtaccgctgtgaggtgatgcatggaattgaggacagcgaggccaccctggaggtggtggtgaagggcatcgtgttccactaccgggccatcagcacccgctacaccctggactttgaccgggcccagagggcctgcctgcagaacagcgccatcatcgccaccccagagcagctgcaggccgcctatgaagatggcttccaccagtgtgatgctggctggctggccgaccagacagtgcgctaccccatccacaccccccgggagggctgctatggagacaaggatgagttccctggggtgaggacctacggcatccgggacaccaatgagacctatgatgtgtactgctttgctgaggagatggagggggaggtgttctacgccaccagccctgagaagttcaccttccaggaggccgccaatgaatgtcggcggctgggcgcccggctggccaccaccggccagctgtacctggcctggcaggccggcatggacatgtgcagcgctggctggctggccgacagatctgtgcgctaccccatcagcaaggcccggcccaactgtggcggcaacctgctgggcgtgaggacagtgtatgtgcacgccaaccagacaggctacccagaccccagcagccgctatgatgccatctgctacaccggggaggactttgtggacatccctgagaacttcttcggcgtgggcggggaggaggacatcaccgtgcagacagtgacctggccagacatggagctgcccctgcccaggaacatcacagaaggagaggcccggggcagcgtcatcctgactgtgaagcccatctttgaggtgagccccagccccctggagcctgaggagcccttcacctttgcccctgagatcggggccacagcctttgctgaggtggagaatgagaccggggaggccacccggccctggggcttccccaccccaggcctgggccctgccacagccttcaccagcgaggacctggtggtgcaggtgacagctgtgcccggccagccccacctgcctggaggagtggtgttccactaccggcccggccccacccgctacagcctgacctttgaggaggcccagcaggcctgcctgaggactggagctgtgattgccagccctgagcagctgcaggccgcctatgaagctggctatgagcagtgtgatgctggctggctgcgggaccagacagtgcgctaccccatcgtgagccccaggaccccctgtgtgggggacaaggacagcagccctggggtgaggacctacggcgtgcggcccagcacagagacctatgatgtgtactgctttgtggaccggctggagggggaggtgttctttgccacccggctggagcagttcaccttccaggaggccctggagttctgtgagagccacaatgccaccctggccaccaccggccagctgtatgctgcctggagccggggcctggacaagtgctacgccggctggctggctgatggcagcctgcgctaccccatcgtgacccccaggcctgcctgtggcggggacaagccaggagtgaggacagtgtacctgtaccccaaccagacaggcctgcctgaccccctgagccgccaccacgccttctgcttccggggcatctctgctgtgcccagccctggagaggaggagggcggcacccccaccagccccagcggcgtggaggagtggatcgtgacccaggtggtgcctggggtggccgctgtgcctgtggaggaggagaccacagctgtgcccagcggggagaccacagccatcctggagttcaccacagagcctgagaaccagacagagtgggagcccgcctacacccctgtgggcaccagccccctgcccggcatcctgcccacctggccacccaccggggccgccacagaggagagcacagagggccccagcgccacagaggtgcccagcgccagcgaggagcccagccccagcgaggtgcccttccccagcgaggagcccagccccagcgaggagcccttccccagcgtgcggcccttccccagcgtggagctgttccccagcgaggagcccttccccagcaaggagcccagccccagcgaggagcccagcgccagcgaggagccctacacccccagcccccctgtgcccagctggacagagctgcccagcagtggagaggagagcggggccccagatgtgtctggggacttcaccggcagcggagatgtgtctggccacctggacttcagcggccagctgagcggggaccgggccagcggcctgcccagcggggacctggacagcagcggcctgaccagcacagtgggcagcggcctgcctgtggagagcggcctgcccagcggagatgaggagcgcatcgagtggcccagcacccccaccgtgggggagctgcccagcggggctgagatcctggagggcagcgccagcggcgtgggggacctgagcggcctgcccagcggggaggtgctggagaccagcgccagcggcgtgggggacctgagcggcctgcccagcggggaggtgctggagaccacagcccctggggtggaggacatcagcggcctgcccagcggggaggtgctggagaccacagcccctggggtggaggacatcagcggcctgcccagcggggaggtgctggagaccacagcccctggggtggaggacatcagcggcctgcccagcggggaggtgctggagaccacagcccctggggtggaggacatcagcggcctgcccagcggggaggtgctggagaccacagcccctggggtggaggacatcagcggcctgcccagcggggaggtgctggagaccacagcccctggggtggaggacatcagcggcctgcccagcggggaggtgctggagacagctgcccctggggtggaggacatcagcggcctgcccagcggggaggtgctggagacagctgcccctggggtggaggacatcagcggcctgcccagcggggaggtgctggagacagctgcccctggggtggaggacatcagcggcctgcccagcggggaggtgctggagacagctgcccctggggtggaggacatcagcggcctgcccagcggggaggtgctggagacagctgcccctggggtggaggacatcagcggcctgcccagcggggaggtgctggagacagctgcccctggggtggaggacatcagcggcctgcccagcggggaggtgctggagacagctgcccctggggtggaggacatcagcggcctgcccagcggggaggtgctggagacagctgcccctggggtggaggacatcagcggcctgcccagcggggaggtgctggagacagctgcccctggggtggaggacatcagcggcctgcccagcggggaggtgctggagacagctgcccctggggtggaggacatcagcggcctgcccagcggggaggtgctggagacagctgcccctggggtggaggacatcagcggcctgcccagcggggaggtgctggagacagctgcccctggggtggaggacatcagcggcctgcccagcggggaggtgctggagacagctgcccctggggtggaggacatcagcggcctgcccagcggggaggtgctggagacagctgcccctggggtggaggacatcagcggcctgcccagcggggaggtgctggagacagctgcccctggggtggaggacatcagcggcctgcccagcggggaggtgctggagacagctgcccctggggtggaggacatcagcggcctgcccagcggggaggtgctggagaccacagcccctggggtggaggagatcagcggcctgcccagcggggaggtgctggagaccacagcccctggggtggatgagatcagcggcctgcccagcggggaggtgctggagaccacagcccctggggtggaggagatcagcggcctgcccagcggggaggtgctggagaccagcaccagcgctgtgggggacctgagcggcctgcccagcggcggggaggtgctggagatctctgtgtctggagtggaggacatcagcggcctgcccagcggggaggtggtggagaccagcgccagcggcattgaagatgtgtctgagctgcccagcggggagggcctggagaccagcgccagcggcgtggaggacctgagccggctgcccagcggggaggaggtgctggagatcagcgccagcggctttggagacctgagcggcctgcccagcggcggggagggcctggagaccagcgccagcgaggtgggcacagacctgagcggcctgcccagcggccgggagggcctggagaccagcgccagcggggctgaggacctgagcggcctgcccagcggcaaggaggacctggtgggcagcgccagcggggacctggacctgggcaagctgcccagcggcaccctgggcagcggccaggcccctgagaccagcggcctgcccagcggcttcagcggggagtacagcggcgtggacctgggcagcggcccccccagcggcctgcctgacttcagcggcctgcccagcggcttccccaccgtgtccctggtggacagcaccctggtggaggtggtgacagccagcacagccagcgagctggagggccggggcaccatcggcatctctggagctggggagatcagcggcctgcccagcagcgagctggacatcagcggccgggccagcggcctgcccagcggcacagagctgagcggccaggccagcggcagcccagatgtgtctggagagatccctggcctgtttggagtgtctggccagcccagcggcttcccagacaccagcggggagaccagcggcgtgacagagctgagcggcctgagcagcggccagcccggcatcagcggggaggccagcggcgtgctgtatggcaccagccagcccttcggcatcacagacctgagcggggagaccagcggcgtgcctgacctgagcggccagcccagcggcctgcccggcttcagcggggccaccagcggcgtgcctgacctggtgtctggcaccaccagcggcagcggggagagcagcggcatcacctttgtggacaccagcctggtggaggtggcccccaccaccttcaaggaggaggagggcctgggctctgtggagctgagcggcctgcccagcggggaggccgacctgagcggcaagagcggcatggtggatgtgtctggccagttctctggaacagtggacagcagcggcttcaccagccagaccccagagttcagcggcctgcccagcggcattgctgaggtgtctggagagagcagcagagctgagatcggcagcagcctgcccagcggggcctactacggcagcggcacccccagcagcttccccaccgtgtccctggtggacaggaccctggtggagagcgtgacccaggcccccacagcccaggaggccggggagggccccagcggcatcctggagctgagcggggcccacagcggggccccagacatgtctggagagcacagcggcttcctggacctgagcggcctgcagagcggcctcatcgagcccagcggggagcccccaggcaccccctacttcagcggggactttgccagcaccaccaacgtgtctggagagagctctgtggccatgggcaccagcggggaggccagcggcctgcctgaggtgaccctcatcaccagcgagtttgtggagggcgtgacagagcccaccatcagccaggagctgggccagaggcctcctgtgacccacaccccccagctgtttgagagcagcggcaaggtgtccacagctggggacatcagcggggccacccctgtgctgcccggcagcggcgtggaggtgtcctctgtgcctgagagcagcagcgagaccagcgcctacccagaggccggctttggagccagcgctgcccctgaggccagccgggaggacagcggcagcccagacctgtctgagaccaccagcgccttccacgaggccaacctggagaggagcagcggcctgggcgtgtctggcagcaccctgaccttccaggagggggaggccagcgctgcccctgaggtgtctggagagagcaccaccaccagtgatgtgggcacagaggcccctggcctgcccagcgccacccccacagccagcggggacagaacagagatcagcggggacctgagcggccacaccagccagctgggcgtggtgatcagcaccagcatccctgagagcgagtggacccagcagacccagaggcctgctgagacccacctggagattgagagcagcagcctgctgtacagcggggaggagacccacacagtggagacagccaccagccccacagatgccagcatcccagccagccctgagtggaagcgggagagcgagagcacagctgctgaccaggaggtgtgtgaggagggctggaacaagtaccagggccactgctaccgccacttcccagaccgggagacctgggtggatgctgagcggcgctgccgggagcagcagagccacctgagcagcatcgtgaccccagaggagcaggagtttgtgaacaacaatgcccaggactaccagtggattggcctgaatgacaggaccatcgagggggacttccgctggagcgatggccaccccatgcagtttgagaactggaggcccaaccagcctgacaacttctttgctgctggggaggactgtgtggtgatgatctggcatgagaagggggagtggaatgatgtgccctgcaactaccacctgcccttcacctgcaagaagggcacagccaccacctacaagaggcggctgcagaagaggagcagccgccaccccaggaggagccggcccagcacagcccactag

SEQ ID NO: 143133 - DNA, 7593 bp, synthetic construct
  misc_feature 1..7593: note = Description of Artificial Sequence: Synthetic coding sequence
  source 1..7593: mol_type = other DNA
atgaccaccctgctgtgggtgtttgtgaccctgcgggtcatcacagctgctgtgacagtggagaccagtgaccatgacaacagcctgtctgtgtccatcccccagcccagccccctgcgggtgctgctgggcaccagcctgaccatcccctgctacttcatcgaccccatgcaccctgtgaccacagcccccagcacagcccccctggccccccgcatcaagtggagccgggtgtccaaggagaaggaggtggtgctgctggtggccacagagggccgggtgcgggtgaacagcgcctaccaggacaaggtgtccctgcccaactacccagccatccccagtgatgccaccctggaggtgcagagcctgcggagcaatgacagcggcgtgtaccgctgtgaggtgatgcatggaattgaggacagcgaggccaccctggaggtggtggtgaagggcatcgtgttccactaccgggccatcagcacccgctacaccctggactttgaccgggcccagagggcctgcctgcagaacagcgccatcatcgccaccccagagcagctgcaggccgcctatgaagatggcttccaccagtgtgatgctggctggctggccgaccagacagtgcgctaccccatccacaccccccgggagggctgctatggagacaaggatgagttccctggggtgaggacctacggcatccgggacaccaatgagacctatgatgtgtactgctttgctgaggagatggagggggaggtgttctacgccaccagccctgagaagttcaccttccaggaggccgccaatgaatgtcggcggctgggcgcccggctggccaccaccggccagctgtacctggcctggcaggccggcatggacatgtgcagcgctggctggctggccgacagatctgtgcgctaccccatcagcaaggcccggcccaactgtggcggcaacctgctgggcgtgaggacagtgtatgtgcacgccaaccagacaggctacccagaccccagcagccgctatgatgccatctgctacaccggggaggactttgtggacatccctgagaacttcttcggcgtgggcggggaggaggacatcaccgtgcagacagtgacctggccagacatggagctgcccctgcccaggaacatcacagaaggagaggcccggggcagcgtcatcctgactgtgaagcccatctttgaggtgagccccagccccctggagcctgaggagcccttcacctttgcccctgagatcggggccacagcctttgctgaggtggagaatgagaccggggaggccacccggccctggggcttccccaccccaggcctgggccctgccacagccttcaccagcgaggacctggtggtgcaggtgacagctgtgcccggccagccccacctgcctggaggagtggtgttccactaccggcccggccccacccgctacagcctgacctttgaggaggcccagcaggcctgcctgaggactggagctgtgattgccagccctgagcagctgcaggccgcctatgaagctggctatgagcagtgtgatgctggctggctgcgggaccagacagtgcgctaccccatcgtgagccccaggaccccctgtgtgggggacaaggacagcagccctggggtgaggacctacggcgtgcggcccagcacagagacctatgatgtgtactgctttgtggaccggctggagggggaggtgttctttgccacccggctggagcagttcaccttccaggaggccctggagttctgtgagagccacaatgccaccctggccaccaccggccagctgtatgctgcctggagccggggcctggacaagtgctacgccggctggctggctgatggcagcctgcgctaccccatcgtgacccccaggcctgcctgtggcggggacaagccaggagtgaggacagtgtacctgtaccccaaccagacaggcctgcctgaccccctgagccgccaccacgccttctgcttccggggcatctctgctgtgcccagccctggagaggaggagggcggcacccccaccagccccagcggcgtggaggagtggatcgtgacccaggtggtgcctggggtggccgctgtgcctgtggaggaggagaccacagctgtgcccagcggggagaccacagccatcctggagttcaccacagagcctgagaaccagacagagtgggagcccgcctacacccctgtgggcaccagccccctgcccggcatcctgcccacctggccacccaccggggccgccacagaggagagcacagagggccccagcgccacagaggtgcccagcgccagcgaggagcccagccccagcgaggtgcccttccccagcgaggagcccagccccagcgaggagcccttccccagcgtgcggcccttccccagcgtggagctgttccccagcgaggagcccttccccagcaaggagcccagccccagcgaggagcccagcgccagcgaggagccctacacccccagcccccctgtgcccagctggacagagctgcccagcagtggagaggagagcggggccccagatgtgtctggggacttcaccggcagcggagatgtgtctggccacctggacttcagcggccagctgagcggggaccgggccagcggcctgcccagcggggacctggacagcagcggcctgaccagcacagtgggcagcggcctgcctgtggagagcggcctgcccagcggagatgaggagcgcatcgagtggcccagcacccccaccgtgggggagctgcccagcggggctgagatcctggagggcagcgccagcggcgtgggggacctgagcggcctgcccagcggggaggtgctggagaccagcgccagcggcgtgggggacctgagcggcctgcccagcggggaggtgctggagaccacagcccctggggtggaggacatcagcggcctgcccagcggggaggtgctggagaccacagcccctggggtggaggacatcagcggcctgcccagcggggaggtgctggagaccacagcccctggggtggaggacatcagcggcctgcccagcggggaggtgctggagaccacagcccctggggtggaggacatcagcggcctgcccagcggggaggtgctggagaccacagcccctggggtggaggacatcagcggcctgcccagcggggaggtgctggagaccacagcccctggggtggaggacatcagcggcctgcccagcggggaggtgctggagacagctgcccctggggtggaggacatcagcggcctgcccagcggggaggtgctggagacagctgcccctggggtggaggacatcagcggcctgcccagcggggaggtgctggagacagctgcccctggggtggaggacatcagcggcctgcccagcggggaggtgctggagacagctgcccctggggtggaggacatcagcggcctgcccagcggggaggtgctggagacagctgcccctggggtggaggacatcagcggcctgcccagcggggaggtgctggagacagctgcccctggggtggaggacatcagcggcctgcccagcggggaggtgctggagacagctgcccctggggtggaggacatcagcggcctgcccagcggggaggtgctggagacagctgcccctggggtggaggacatcagcggcctgcccagcggggaggtgctggagacagctgcccctggggtggaggacatcagcggcctgcccagcggggaggtgctggagacagctgcccctggggtggaggacatcagcggcctgcccagcggggaggtgctggagacagctgcccctggggtggaggacatcagcggcctgcccagcggggaggtgctggagacagctgcccctggggtggaggacatcagcggcctgcccagcggggaggtgctggagacagctgcccctggggtggaggacatcagcggcctgcccagcggggaggtgctggagacagctgcccctggggtggaggacatcagcggcctgcccagcggggaggtgctggagacagctgcccctggggtggaggacatcagcggcctgcccagcggggaggtgctggagacagctgcccctggggtggaggacatcagcggcctgcccagcggggaggtgctggagaccacagcccctggggtggaggagatcagcggcctgcccagcggggaggtgctggagaccacagcccctggggtggatgagatcagcggcctgcccagcggggaggtgctggagaccacagcccctggggtggaggagatcagcggcctgcccagcggggaggtgctggagaccagcaccagcgctgtgggggacctgagcggcctgcccagcggcggggaggtgctggagatctctgtgtctggagtggaggacatcagcggcctgcccagcggggaggtggtggagaccagcgccagcggcattgaagatgtgtctgagctgcccagcggggagggcctggagaccagcgccagcggcgtggaggacctgagccggctgcccagcggggaggaggtgctggagatcagcgccagcggctttggagacctgagcggcctgcccagcggcggggagggcctggagaccagcgccagcgaggtgggcacagacctgagcggcctgcccagcggccgggagggcctggagaccagcgccagcggggctgaggacctgagcggcctgcccagcggcaaggaggacctggtgggcagcgccagcggggacctggacctgggcaagctgcccagcggcaccctgggcagcggccaggcccctgagaccagcggcctgcccagcggcttcagcggggagtacagcggcgtggacctgggcagcggcccccccagcggcctgcctgacttcagcggcctgcccagcggcttccccaccgtgtccctggtggacagcaccctggtggaggtggtgacagccagcacagccagcgagctggagggccggggcaccatcggcatctctggagctggggagatcagcggcctgcccagcagcgagctggacatcagcggccgggccagcggcctgcccagcggcacagagctgagcggccaggccagcggcagcccagatgtgtctggagagatccctggcctgtttggagtgtctggccagcccagcggcttcccagacaccagcggggagaccagcggcgtgacagagctgagcggcctgagcagcggccagcccggcatcagcggggaggccagcggcgtgctgtatggcaccagccagcccttcggcatcacagacctgagcggggagaccagcggcgtgcctgacctgagcggccagcccagcggcctgcccggcttcagcggggccaccagcggcgtgcctgacctggtgtctggcaccaccagcggcagcggggagagcagcggcatcacctttgtggacaccagcctggtggaggtggcccccaccaccttcaaggaggaggagggcctgggctctgtggagctgagcggcctgcccagcggggaggccgacctgagcggcaagagcggcatggtggatgtgtctggccagttctctggaacagtggacagcagcggcttcaccagccagaccccagagttcagcggcctgcccagcggcattgctgaggtgtctggagagagcagcagagctgagatcggcagcagcctgcccagcggggcctactacggcagcggcacccccagcagcttccccaccgtgtccctggtggacaggaccctggtggagagcgtgacccaggcccccacagcccaggaggccggggagggccccagcggcatcctggagctgagcggggcccacagcggggccccagacatgtctggagagcacagcggcttcctggacctgagcggcctgcagagcggcctcatcgagcccagcggggagcccccaggcaccccctacttcagcggggactttgccagcaccaccaacgtgtctggagagagctctgtggccatgggcaccagcggggaggccagcggcctgcctgaggtgaccctcatcaccagcgagtttgtggagggcgtgacagagcccaccatcagccaggagctgggccagaggcctcctgtgacccacaccccccagctgtttgagagcagcggcaaggtgtccacagctggggacatcagcggggccacccctgtgctgcccggcagcggcgtggaggtgtcctctgtgcctgagagcagcagcgagaccagcgcctacccagaggccggctttggagccagcgctgcccctgaggccagccgggaggacagcggcagcccagacctgtctgagaccaccagcgccttccacgaggccaacctggagaggagcagcggcctgggcgtgtctggcagcaccctgaccttccaggagggggaggccagcgctgcccctgaggtgtctggagagagcaccaccaccagtgatgtgggcacagaggcccctggcctgcccagcgccacccccacagccagcggggacagaacagagatcagcggggacctgagcggccacaccagccagctgggcgtggtgatcagcaccagcatccctgagagcgagtggacccagcagacccagaggcctgctgagacccacctggagattgagagcagcagcctgctgtacagcggggaggagacccacacagtggagacagccaccagccccacagatgccagcatcccagccagccctgagtggaagcgggagagcgagagcacagctgctgccccagcccggagctgtgccgaggagccctgtggggccggcacctgcaaggagacagagggccacgtgatctgcctgtgccccccaggctacacaggagagcactgcaacatcgaccaggaggtgtgtgaggagggctggaacaagtaccagggccactgctaccgccacttcccagaccgggagacctgggtggatgctgagcggcgctgccgggagcagcagagccacctgagcagcatcgtgaccccagaggagcaggagtttgtgaacaacaatgcccaggactaccagtggattggcctgaatgacaggaccatcgagggggacttccgctggagcgatggccaccccatgcagtttgagaactggaggcccaaccagcctgacaacttctttgctgctggggaggactgtgtggtgatgatctggcatgagaagggggagtggaatgatgtgccctgcaactaccacctgcccttcacctgcaagaagggcaccgtggcctgtggggagccccctgtggtggagcacgcccggaccttcggccagaagaaggacagatatgagatcaacagcctggtgcgctaccagtgcacagagggctttgtgcagaggcacatgcccaccatccgctgccagcccagcggccactgggaggagccccagatcacctgcacagaccccaccacctacaagaggcggctgcagaagaggagcagccgccacccccggcgcagccggcccagcacagcccactag

SEQ ID NO: 143134 - DNA, 7479 bp, synthetic construct
  misc_feature 1..7479: note = Description of Artificial Sequence: Synthetic coding sequence
  source 1..7479: mol_type = other DNA
atgaccaccctgctgtgggtgtttgtgaccctgcgggtcatcacagctgctgtgacagtggagaccagtgaccatgacaacagcctgtctgtgtccatcccccagcccagccccctgcgggtgctgctgggcaccagcctgaccatcccctgctacttcatcgaccccatgcaccctgtgaccacagcccccagcacagcccccctggccccccgcatcaagtggagccgggtgtccaaggagaaggaggtggtgctgctggtggccacagagggccgggtgcgggtgaacagcgcctaccaggacaaggtgtccctgcccaactacccagccatccccagtgatgccaccctggaggtgcagagcctgcggagcaatgacagcggcgtgtaccgctgtgaggtgatgcatggaattgaggacagcgaggccaccctggaggtggtggtgaagggcatcgtgttccactaccgggccatcagcacccgctacaccctggactttgaccgggcccagagggcctgcctgcagaacagcgccatcatcgccaccccagagcagctgcaggccgcctatgaagatggcttccaccagtgtgatgctggctggctggccgaccagacagtgcgctaccccatccacaccccccgggagggctgctatggagacaaggatgagttccctggggtgaggacctacggcatccgggacaccaatgagacctatgatgtgtactgctttgctgaggagatggagggggaggtgttctacgccaccagccctgagaagttcaccttccaggaggccgccaatgaatgtcggcggctgggcgcccggctggccaccaccggccagctgtacctggcctggcaggccggcatggacatgtgcagcgctggctggctggccgacagatctgtgcgctaccccatcagcaaggcccggcccaactgtggcggcaacctgctgggcgtgaggacagtgtatgtgcacgccaaccagacaggctacccagaccccagcagccgctatgatgccatctgctacaccggggaggactttgtggacatccctgagaacttcttcggcgtgggcggggaggaggacatcaccgtgcagacagtgacctggccagacatggagctgcccctgcccaggaacatcacagaaggagaggcccggggcagcgtcatcctgactgtgaagcccatctttgaggtgagccccagccccctggagcctgaggagcccttcacctttgcccctgagatcggggccacagcctttgctgaggtggagaatgagaccggggaggccacccggccctggggcttccccaccccaggcctgggccctgccacagccttcaccagcgaggacctggtggtgcaggtgacagctgtgcccggccagccccacctgcctggaggagtggtgttccactaccggcccggccccacccgctacagcctgacctttgaggaggcccagcaggcctgcctgaggactggagctgtgattgccagccctgagcagctgcaggccgcctatgaagctggctatgagcagtgtgatgctggctggctgcgggaccagacagtgcgctaccccatcgtgagccccaggaccccctgtgtgggggacaaggacagcagccctggggtgaggacctacggcgtgcggcccagcacagagacctatgatgtgtactgctttgtggaccggctggagggggaggtgttctttgccacccggctggagcagttcaccttccaggaggccctggagttctgtgagagccacaatgccaccctggccaccaccggccagctgtatgctgcctggagccggggcctggacaagtgctacgccggctggctggctgatggcagcctgcgctaccccatcgtgacccccaggcctgcctgtggcggggacaagccaggagtgaggacagtgtacctgtaccccaaccagacaggcctgcctgaccccctgagccgccaccacgccttctgcttccggggcatctctgctgtgcccagccctggagaggaggagggcggcacccccaccagccccagcggcgtggaggagtggatcgtgacccaggtggtgcctggggtggccgctgtgcctgtggaggaggagaccacagctgtgcccagcggggagaccacagccatcctggagttcaccacagagcctgagaaccagacagagtgggagcccgcctacacccctgtgggcaccagccccctgcccggcatcctgcccacctggccacccaccggggccgccacagaggagagcacagagggccccagcgccacagaggtgcccagcgccagcgaggagcccagccccagcgaggtgcccttccccagcgaggagcccagccccagcgaggagcccttccccagcgtgcggcccttccccagcgtggagctgttccccagcgaggagcccttccccagcaaggagcccagccccagcgaggagcccagcgccagcgaggagccctacacccccagcccccctgtgcccagctggacagagctgcccagcagtggagaggagagcggggccccagatgtgtctggggacttcaccggcagcggagatgtgtctggccacctggacttcagcggccagctgagcggggaccgggccagcggcctgcccagcggggacctggacagcagcggcctgaccagcacagtgggcagcggcctgcctgtggagagcggcctgcccagcggagatgaggagcgcatcgagtggcccagcacccccaccgtgggggagctgcccagcggggctgagatcctggagggcagcgccagcggcgtgggggacctgagcggcctgcccagcggggaggtgctggagaccagcgccagcggcgtgggggacctgagcggcctgcccagcggggaggtgctggagaccacagcccctggggtggaggacatcagcggcctgcccagcggggaggtgctggagaccacagcccctggggtggaggacatcagcggcctgcccagcggggaggtgctggagaccacagcccctggggtggaggacatcagcggcctgcccagcggggaggtgctggagaccacagcccctggggtggaggacatcagcggcctgcccagcggggaggtgctggagaccacagcccctggggtggaggacatcagcggcctgcccagcggggaggtgctggagaccacagcccctggggtggaggacatcagcggcctgcccagcggggaggtgctggagacagctgcccctggggtggaggacatcagcggcctgcccagcggggaggtgctggagacagctgcccctggggtggaggacatcagcggcctgcccagcggggaggtgctggagacagctgcccctggggtggaggacatcagcggcctgcccagcggggaggtgctggagacagctgcccctggggtggaggacatcagcggcctgcccagcggggaggtgctggagacagctgcccctggggtggaggacatcagcggcctgcccagcggggaggtgctggagacagctgcccctggggtggaggacatcagcggcctgcccagcggggaggtgctggagacagctgcccctggggtggaggacatcagcggcctgcccagcggggaggtgctggagacagctgcccctggggtggaggacatcagcggcctgcccagcggggaggtgctggagacagctgcccctggggtggaggacatcagcggcctgcccagcggggaggtgctggagacagctgcccctggggtggaggacatcagcggcctgcccagcggggaggtgctggagacagctgcccctggggtggaggacatcagcggcctgcccagcggggaggtgctggagacagctgcccctggggtggaggacatcagcggcctgcccagcggggaggtgctggagacagctgcccctggggtggaggacatcagcggcctgcccagcggggaggtgctggagacagctgcccctggggtggaggacatcagcggcctgcccagcggggaggtgctggagacagctgcccctggggtggaggacatcagcggcctgcccagcggggaggtgctggagacagctgcccctggggtggaggacatcagcggcctgcccagcggggaggtgctggagaccacagcccctggggtggaggagatcagcggcctgcccagcggggaggtgctggagaccacagcccctggggtggatgagatcagcggcctgcccagcggggaggtgctggagaccacagcccctggggtggaggagatcagcggcctgcccagcggggaggtgctggagaccagcaccagcgctgtgggggacctgagcggcctgcccagcggcggggaggtgctggagatctctgtgtctggagtggaggacatcagcggcctgcccagcggggaggtggtggagaccagcgccagcggcattgaagatgtgtctgagctgcccagcggggagggcctggagaccagcgccagcggcgtggaggacctgagccggctgcccagcggggaggaggtgctggagatcagcgccagcggctttggagacctgagcggcctgcccagcggcggggagggcctggagaccagcgccagcgaggtgggcacagacctgagcggcctgcccagcggccgggagggcctggagaccagcgccagcggggctgaggacctgagcggcctgcccagcggcaaggaggacctggtgggcagcgccagcggggacctggacctgggcaagctgcccagcggcaccctgggcagcggccaggcccctgagaccagcggcctgcccagcggcttcagcggggagtacagcggcgtggacctgggcagcggcccccccagcggcctgcctgacttcagcggcctgcccagcggcttccccaccgtgtccctggtggacagcaccctggtggaggtggtgacagccagcacagccagcgagctggagggccggggcaccatcggcatctctggagctggggagatcagcggcctgcccagcagcgagctggacatcagcggccgggccagcggcctgcccagcggcacagagctgagcggccaggccagcggcagcccagatgtgtctggagagatccctggcctgtttggagtgtctggccagcccagcggcttcccagacaccagcggggagaccagcggcgtgacagagctgagcggcctgagcagcggccagcccggcatcagcggggaggccagcggcgtgctgtatggcaccagccagcccttcggcatcacagacctgagcggggagaccagcggcgtgcctgacctgagcggccagcccagcggcctgcccggcttcagcggggccaccagcggcgtgcctgacctggtgtctggcaccaccagcggcagcggggagagcagcggcatcacctttgtggacaccagcctggtggaggtggcccccaccaccttcaaggaggaggagggcctgggctctgtggagctgagcggcctgcccagcggggaggccgacctgagcggcaagagcggcatggtggatgtgtctggccagttctctggaacagtggacagcagcggcttcaccagccagaccccagagttcagcggcctgcccagcggcattgctgaggtgtctggagagagcagcagagctgagatcggcagcagcctgcccagcggggcctactacggcagcggcacccccagcagcttccccaccgtgtccctggtggacaggaccctggtggagagcgtgacccaggcccccacagcccaggaggccggggagggccccagcggcatcctggagctgagcggggcccacagcggggccccagacatgtctggagagcacagcggcttcctggacctgagcggcctgcagagcggcctcatcgagcccagcggggagcccccaggcaccccctacttcagcggggactttgccagcaccaccaacgtgtctggagagagctctgtggccatgggcaccagcggggaggccagcggcctgcctgaggtgaccctcatcaccagcgagtttgtggagggcgtgacagagcccaccatcagccaggagctgggccagaggcctcctgtgacccacaccccccagctgtttgagagcagcggcaaggtgtccacagctggggacatcagcggggccacccctgtgctgcccggcagcggcgtggaggtgtcctctgtgcctgagagcagcagcgagaccagcgcctacccagaggccggctttggagccagcgctgcccctgaggccagccgggaggacagcggcagcccagacctgtctgagaccaccagcgccttccacgaggccaacctggagaggagcagcggcctgggcgtgtctggcagcaccctgaccttccaggagggggaggccagcgctgcccctgaggtgtctggagagagcaccaccaccagtgatgtgggcacagaggcccctggcctgcccagcgccacccccacagccagcggggacagaacagagatcagcggggacctgagcggccacaccagccagctgggcgtggtgatcagcaccagcatccctgagagcgagtggacccagcagacccagaggcctgctgagacccacctggagattgagagcagcagcctgctgtacagcggggaggagacccacacagtggagacagccaccagccccacagatgccagcatcccagccagccctgagtggaagcgggagagcgagagcacagctgctgaccaggaggtgtgtgaggagggctggaacaagtaccagggccactgctaccgccacttcccagaccgggagacctgggtggatgctgagcggcgctgccgggagcagcagagccacctgagcagcatcgtgaccccagaggagcaggagtttgtgaacaacaatgcccaggactaccagtggattggcctgaatgacaggaccatcgagggggacttccgctggagcgatggccaccccatgcagtttgagaactggaggcccaaccagcctgacaacttctttgctgctggggaggactgtgtggtgatgatctggcatgagaagggggagtggaatgatgtgccctgcaactaccacctgcccttcacctgcaagaagggcaccgtggcctgtggggagccccctgtggtggagcacgcccggaccttcggccagaagaaggacagatatgagatcaacagcctggtgcgctaccagtgcacagagggctttgtgcagaggcacatgcccaccatccgctgccagcccagcggccactgggaggagccccagatcacctgcacagaccccaccacctacaagaggcggctgcagaagaggagcagccgccacccccggcgcagccggcccagcacagcccactag

SEQ ID NO: 143135 - DNA, 7593 bp, synthetic construct; identical to SEQ ID NO: 143133
  misc_feature 1..7593: note = Description of Artificial Sequence: Synthetic coding sequence
  source 1..7593: mol_type = other DNA

SEQ ID NO: 143136 - DNA, 399 bp, synthetic construct
  misc_feature 1..399: note = Description of Artificial Sequence: Synthetic coding sequence
  source 1..399: mol_type = other DNA
atgctgacagctgctgtgctgagctgtgccctgctgctggccctgcctgccaccaggggggcccagatgggcctggcccccatggagggcatccggcggccagaccaggccctgctgcctgagctgcccggcctgggcctgcgggcccccctgaagaagaccacagctgagcaggccgaggaggacctgctgcaggaggcccaggccctggccgaggtgctggacctgcaggaccgggagcccaggagcagcagaagatgtgtgcggctgcacgagagctgcctgggccagcaggtgccctgctgtgacccctgtgccacctgctactgccgcttcttcaatgccttctgctactgcaggaagctgggcacagccatgaacccctgcagcaggacatag

SEQ ID NO: 143137 - DNA, 399 bp, synthetic construct
  misc_feature 1..399: note = Description of Artificial Sequence: Synthetic coding sequence
  source 1..399: mol_type = other DNA
atggatgtgacccggctgctgctggccaccctgctggtgttcctgtgcttcttcaccgccaacagccacctgcccccagaggagaagctgagagatgacaggagcctgcggagcaacagctctgtgaacctgctggatgtgcccagcgtgtccatcgtggccctgaacaagaagagcaagcagatcggcaggaaggctgctgagaagaagaggagcagcaagaaggaggcctccatgaagaaggtggtgcggcccaggacccccctgagcgccccctgtgtggccaccaggaacagctgcaagcccccagccccagcctgctgtgacccctgtgccagctgccagtgccgcttcttccgcagcgcctgcagctgccgggtgctgagcctgaactgctag

SEQ ID NO: 143138 - DNA, 936 bp, synthetic construct
  misc_feature 1..936: note = Description of Artificial Sequence: Synthetic coding sequence
  source 1..936: mol_type = other DNA
atggccctggaggtggtgttcctggcccggggccccagcggcctgctgctgtacaacggccagaagacagatggcaagggggactttgtgtccctggccctgcgggaccggcggctggagttccgctatgacctgggcaaaggagctgctgtgatccgcagccgggagcctgtgaccctgggcgcctggaccagggtgtccctggagagaaatggaaggaagggggccctgcgggtgggagatggcccccgggtgctgggggagagccccaagagcaggaaggtgccccacacagtgctgaacctgaaggagcccctgtatgtgggcggggccccagacttcagcaagctggcccgggctgctgctgtgagcagcggctttgatggagccatccagctggtgtccctgggcggccggcagctgctgaccccagagcacgtgctgcggcaggtggatgtgaccagctttgctggccacccctgcacccgggccagcggccacccctgcctgaatggagccagctgtgtgccccgggaggccgcctacgtgtgcctgtgccctgggggcttcagcggcccccactgtgagaagggcctggtggagaagtctgctggagatgtggacaccctggcctttgatggccgcacctttgtggagtacctgaatgctgtgacagaaagtgagctggccaatgagatccctgtgcctgagaccctggacagcggggccctgcacagcgagaaggccctgcagagcaaccactttgagctgagcctgaggacagaggccacccagggcctggtgctgtggagcggcaaggccacagaaagagctgactatgtggccctggccatcgtggatggccacctgcagctgagctacaacctgggcagccagcctgtggtgctgcggagcacagtgcctgtgaacacctag

SEQ ID NO: 143139 - DNA, 6138 bp, synthetic construct
  misc_feature 1..6138: note = Description of Artificial Sequence: Synthetic coding sequence
  source 1..6138: mol_type = other DNA
atggccggccgcagccaccctggccccctgcggcccctgctgcccctgctggtggtggccgcctgtgtgctgcctggagctgggggcacctgcccagagcgggccctggagcggcgggaggaggaggccaacgtggtgctgaccggcaccgtggaggagatcctgaatgtggaccctgtgcagcacacctacagctgcaaggtgcgggtgtggagatacctgaagggcaaggacctggtggcccgggagagcctgctggatggcggcaacaaggtggtgatcagcggctttggagaccccctcatctgtgacaaccaggtgtccactggagacacccgcatcttctttgtgaacccagccccaccctacctgtggccagcccacaagaatgagctgatgctgaacagcagcctgatgaggatcaccctgaggaacctggaggaggtggagttctgtgtggaggacaagccaggcacccacttcacccctgtgccccccaccccaccagatgcctgccggggcatgctgtgtggctttggagctgtgtgtgagcccaatgctgagggccctggccgggccagctgtgtgtgcaagaagagcccctgccccagcgtggtggcccctgtgtgtggcagtgatgccagcacctacagcaatgaatgtgagctgcagagggcccagtgcagccagcagaggcgcatccggctgctgagccggggcccctgtggcagccgggacccctgcagcaatgtgacctgcagctttggcagcacctgtgcccggtctgcagatggcctgacagccagctgcctgtgcccagccacctgccgcggggcccctgagggcaccgtgtgtggcagtgatggagctgactacccaggagagtgccagctgctgcggcgggcctgtgcccggcaggagaatgtgttcaagaagtttgatggcccctgtgacccctgccagggcgccctgcctgaccccagccgcagctgccgggtgaaccccaggacccggcggcctgagatgctgctgcggcctgagagctgcccagcccggcaggcccctgtgtgtggagatgatggagtgacctatgaaaatgactgtgtgatgggccgctctggagctgcccggggcctgctgctgcagaaggtgcgcagcggccagtgccagggccgggaccagtgcccagagccctgccgcttcaatgctgtgtgcctgagccggcggggccggccccgctgcagctgtgacagagtgacctgtgatggagcctacagacctgtgtgtgcccaggacggccgcacctatgacagcgactgctggaggcagcaggccgagtgccggcagcagagggccatccccagcaagcaccagggcccctgtgaccaggcccccagcccctgcctgggcgtgcagtgtgcctttggagccacctgtgctgtgaagaatggccaggccgcctgtgaatgtctgcaggcctgcagcagcctgtatgaccctgtgtgtggcagtgatggagtgacctacggcagcgcctgtgagctggaggccacagcctgcaccctgggccgggagatccaggtggccaggaagggcccctgtgacagatgtggccagtgccgctttggagccctgtgtgaggccgagaccggccgctgtgtgtgccccagtgaatgtgtggccctggcccagcctgtgtgtggcagtgatggccacacctaccccagcgagtgcatgctgcacgtgcacgcctgcacccaccagatcagcctgcacgtggccagcgctggcccctgtgagacctgtggagatgctgtgtgtgcctttggagctgtgtgcagcgctggccagtgtgtgtgcccccgctgtgagcaccccccacctggccctgtgtgtggcagtgatggagtgacctacggcagcgcctgtgagctgcgggaggccgcctgcctgcagcagacccagatcgaggaggcccgggccggcccctgtgagcaggccgagtgtggcagcggcggcagcggcagcggggaggatggagactgtgagcaggagctgtgccggcagagaggaggcatctgggatgaggacagtgaagatggcccctgtgtgtgtgacttcagctgccagagcgtgcccggcagccctgtgtgtggcagtgatggagtgacctacagcacagaatgtgagctgaagaaggcccgctgtgagagccagaggggcctgtatgtggccgcccagggcgcctgccggggccccacctttgcccccctgccccctgtggcccccctgcactgtgcccagaccccctacggctgctgccaggacaacatcacagctgcccggggcgtgggcctggccggctgccccagcgcctgccagtgcaacccccacggcagctatggaggcacctgtgaccctgccaccggccagtgcagctgcaggcctggggtgggcggcctgcgctgtgacagatgtgagcccggcttctggaacttccggggcatcgtgacagatggccgcagcggctgcaccccctgcagctgtgacccccagggcgctgtgagagatgactgtgagcagatgacaggcctgtgcagctgcaagccaggagtggccggccccaagtgtggccagtgcccagatggccgggccctgggccctgctggctgtgaggctgatgccagcgccccagccacctgtgccgagatgagatgtgaatttggagcccgctgtgtggaggagagcggcagcgcccactgtgtgtgccccatgctgacctgcccagaggccaatgccaccaaggtgtgtggcagtgatggagtgacctatggaaatgaatgccagctgaagaccatcgcctgccggcagggcctgcagatcagcatccagagcctgggcccctgccaggaggccgtggcccccagcacccaccccaccagcgcctctgtgacagtgaccaccccaggcctgctgctgagccaggccctgcctgcccctcctggggccctgcccctggcccccagcagcacagcccacagccagaccaccccaccacccagcagccggcccaggaccacagcctctgtgcccaggaccaccgtgtggcctgtgctgactgtgcccccaacagcccccagccctgcccccagcctggtggccagcgcctttggagagagcggcagcacagatggcagcagtgatgaggagctgagcggggaccaggaggccagcggcggcggcagcggcggcctggagcccctggagggcagctctgtggccaccccaggcccccctgtggagcgggccagctgctacaacagcgccctgggctgctgcagtgatggcaagacccccagcctggatgctgagggcagcaactgcccagccaccaaggtgttccagggcgtgctggagctggagggcgtggagggccaggagctgttctacaccccagagatggctgaccccaagtctgagctgtttggagaaacagcccggagcattgagagcaccctggatgacctcttcaggaacagtgatgtgaagaaggacttccgctctgtgcggctgcgggacctgggccctgggaagtctgtgcgggccatcgtggatgtgcactttgaccccaccacagccttccgggccccagatgtggcccgggccctgctgcggcagatccaggtgtccagaagaagaagcctgggcgtgcggcggcccctgcaggagcacgtgcgcttcatggactttgactggttccctgccttcatcaccggggccaccagcggggccatcgctgctggggccacagcccgggccaccacagccagccggctgcccagcagcgctgtgaccccccgggccccccaccccagccacaccagccagcctgtggccaagaccacagctgcccccaccacccggcggccccccaccacagcccccagccgggtgcctggaagaagacctccagccccccagcagccccccaagccctgtgacagccagccctgcttccacggcggcacctgccaggactgggccctgggcggcggcttcacctgcagctgcccagctggccggggcggcgctgtgtgtgagaaggtgctgggcgcccctgtgcctgcctttgagggccgctccttcctggccttccccaccctgcgggcctaccacaccctgcggctggccctggagttccgggccctggagccccagggcctgctgctgtacaatggaaatgcccggggcaaggacttcctggccctggccctgctggatggccgggtgcagctgcgctttgacaccggcagcggccctgctgtgctgaccagcgctgtgcctgtggagcccggccagtggcaccggctggagctgagccgccactggaggcggggcaccctgtctgtggatggagagacccctgtgctgggggagagccccagcggcacagatggcctgaacctggacacagacctgtttgtgggcggcgtgcctgaggaccaggccgctgtggccctggagaggacctttgtgggcgccggcctgcggggctgcatccggctgctggatgtgaacaaccagaggctggagctgggcatcggccctggggccgccacccggggcagcggcgtgggagaatgtggggaccacccctgcctgcccaacccctgccacggcggggccccctgccagaacctggaggccggccgcttccactgccagtgccccccaggccgggtgggccccacctgtgctgatgagaagagcccctgccagcccaacccctgccacggggccgccccctgccgggtgctgcctgagggcggggcccagtgtgagtgccccctgggccgggagggcaccttctgccagacagccagcggccaggacggcagcggccccttcctggccgacttcaacggcttcagccacctggagctgcggggcctgcacacctttgcccgggacctgggggagaagatggccctggaggtggtgttcctggcccggggccccagcggcctgctgctgtacaacggccagaagacagatggaaaaggagactttgtgtccctggccctgcgggaccggcggctggagttccgctatgacctgggcaaaggagctgctgtgatccgcagccgggagcctgtgaccctgggcgcctggaccagggtgtccctggagagaaatggaagaaaaggagccctgcgggtgggagatggcccccgggtgctgggggagagccctgtgccccacacagtgctgaacctgaaggagcccctgtatgtgggcggggccccagacttcagcaagctggcccgggctgctgctgtgagcagcggctttgatggagccatccagctggtgtccctgggcggccggcagctgctgaccccagagcacgtgctgcggcaggtggatgtgaccagctttgctggccacccctgcacccgggccagcggccacccctgcctgaatggagccagctgtgtgccccgggaggccgcctacgtgtgcctgtgccctgggggcttcagcggcccccactgtgagaagggcctggtggagaagtctgctggagatgtggacaccctggcctttgatggccgcacctttgtggagtacctgaatgctgtgacagagagcgagaaggccctgcagagcaaccactttgagctgagcctgaggacagaggccacccagggcctggtgctgtggagcggcaaggccacagaaagagctgactatgtggccctggccatcgtggatggccacctgcagctgagctacaacctgggcagccagcctgtggtgctgcggagcacagtgcctgtgaacaccaaccgctggctgcgggtggtggcccaccgggagcagcgggagggcagcctgcaggtgggcaatgaggcccctgtgacaggcagcagccccctgggcgccacccagctggacacagatggagccctgtggctgggcggcctgcctgagctgcctgtgggccctgccctgcccaaggcctatggaactggatttgtgggctgcctgagagatgtggtggtgggccgccaccccctgcacctgctggaggatgctgtgaccaagccagagctgcggccctgccccaccccctag

SEQ ID NO: 143140 - DNA, 816 bp, synthetic construct
  misc_feature 1..816: note = Description of Artificial Sequence: Synthetic coding sequence
  source 1..816: mol_type = other DNA
tgaagatatgacctgggcaaaggagctgctgtgatccgcagccgggagcctgtgaccctgggcgcctggaccagggtgtccctggagagaaatggaaggaagggggccctgcgggtgggagatggcccccgggtgctgggggagagccccaagagcaggaaggtgccccacacagtgctgaacctgaaggagcccctgtatgtgggcggggccccagacttcagcaagctggcccgggctgctgctgtgagcagcggctttgatggagccatccagctggtgtccctgggcggccggcagctgctgaccccagagcacgtgctgcggcaggtggatgtgaccagctttgctggccacccctgcacccgggccagcggccacccctgcctgaatggagccagctgtgtgccccgggaggccgcctacgtgtgcctgtgccctgggggcttcagcggcccccactgtgagaagggcctggtggagaagtctgctggagatgtggacaccctggcctttgatggccgcacctttgtggagtacctgaatgctgtgacagaaagtgagctggccaatgagatccctgtgcctgagaccctggacagcggggccctgcacagcgagaaggccctgcagagcaaccactttgagctgagcctgaggacagaggccacccagggcctggtgctgtggagcggcaaggccacagaaagagctgactatgtggccctggccatcgtggatggccacctgcagctgagctacaacctgggcagccagcctgtggtgctgcggagcacagtgcctgtgaacacctag

SEQ ID NO: 143141 - DNA, 462 bp, synthetic construct
  misc_feature 1..462: note = Description of Artificial Sequence: Synthetic coding sequence
  source 1..462: mol_type = other DNA
atggccctggtgtttgtgtatggcaccctgaagaggggccagcccaaccaccgggtgctgagagatggagcccacggcagcgctgccttccgggcccggggccgcaccctggagccctaccccctggtgattgctggggagcacaacatcccctggctgctgcacctgcccggcagcggccgcctggtggagggggaggtgtatgctgtggatgagaggatgctgcgcttcctggatgactttgagagctgcccagccctgtaccagaggacagtgctgcgggtgcagctgctggaggaccgggcccctggagctgaggagcccccagcccccacagctgtgcagtgctttgtgtacagccgggccaccttccccccagagtgggcccagctgccccaccacgacagctatgattctgagggcccccacggcctgcgctacaaccccagagaaaatagatag

SEQ ID NO: 143142 - DNA, 462 bp, synthetic construct; identical to SEQ ID NO: 143141
  misc_feature 1..462: note = Description of Artificial Sequence: Synthetic coding sequence
  source 1..462: mol_type = other DNA

SEQ ID NO: 143143 - DNA, 879 bp, synthetic construct
  misc_feature 1..879: note = Description of Artificial Sequence: Synthetic coding sequence
  source 1..879: mol_type = other DNA
atgaaccccttctggagcatgagcaccagctctgtgaggaagaggtctgagggggaggagaagaccctgactggagatgtgaagaccagcccccccaggacagcccccaagaagcagctgcccagcatccccaagaatgccctgcccatcaccaagcccaccagccctgccccagctgcccagagcaccaacggcacccacgccagctatggccccttctacctggagtacagcctgctggccgagttcaccctggtggtgaagcagaagctgcccggggtgtatgtgcagcccagctaccgcagcgccctgatgtggtttggagtcatcttcatccgccacggcctgtaccaggatggagtcttcaagttcaccgtgtacatcccagacaactacccagatggagactgcccccggctggtgtttgacatccctgtgttccaccccctggtggaccccaccagcggggagctggatgtgaagagggcctttgccaagtggaggaggaaccacaaccacatctggcaggtgctgatgtatgcccggcgggtcttctacaagattgacacagccagccccctgaaccctgaggccgctgtgctgtatgagaaggacatccagctgttcaagagcaaggtggtggacagcgtgaaggtgtgcacagcccggctgtttgaccagcccaagattgaggacccctatgccatctccttcagcccctggaaccccagcgtgcatgatgaggcccgggagaagatgctgacccagaagaagccagaggagcagcacaacaagtctgtgcacgtggccggcctgtcctgggtgaagccaggctctgtgcagcccttcagcaaggaggagaagacagtggccacctag

SEQ ID NO: 143144 - DNA, 879 bp, synthetic construct; identical to SEQ ID NO: 143143
  misc_feature 1..879: note = Description of Artificial Sequence: Synthetic coding sequence
  source 1..879: mol_type = other DNA

SEQ ID NO: 143145 - DNA, 1179 bp, synthetic construct
  misc_feature 1..1179: note = Description of Artificial Sequence: Synthetic coding sequence
  source 1..1179: mol_type = other DNA
atggccagccacaagctgctggtgaccccacccaaggccctgctgaagcccctgagcatccccaaccagctgctgctgggccctggccccagcaacctgcccccacgcatcatggccgccggcggcctgcagatgattggctccatgagcaaggacatgtaccagatcatggatgagatcaaggagggcatccagtatgtgttccagaccaggaaccccctgaccctggtgatcagcggcagcggccactgtgccctggaggccgccctggtgaatgtgctggagcccggggacagcttcctggtgggcgccaacggcatctggggccagagagctgtggacattggagagagaattggagcccgggtgcaccccatgaccaaggaccccggcggccactacaccctgcaggaggtggaggagggcctggcccagcacaagcctgtgctgctcttcctgacccatggagagagcagcactggagtgctgcagcccctggatggctttggagagctgtgccaccgctacaagtgcctgctgctggtggacagcgtggccagcctgggcggcacccccctgtacatggaccggcagggcatcgacatcctgtacagcggcagccagaaggccctgaatgcccctcctggcaccagcctcatctccttcagtgacaaggccaagaagaagatgtacagcaggaagaccaagcccttctccttctacctggacatcaagtggctggccaacttctggggctgtgatgaccagcccaggatgtaccaccacaccatccctgtgatcagcctgtacagcctgcgggagagcctggccctgattgctgagcagggcctggagaacagctggaggcagcaccgggaggccgccgcctacctgcacggccgcctgcaggccctgggcctgcagctgtttgtgaaggaccctgccctgcggctgcccaccgtgaccaccgtggccgtgcctgctggctatgactggagggacatcgtgtcctatgtgattgaccactttgatattgagatcatgggcggcctgggccccagcacaggcaaggtgctgagaattggcctgctgggctgcaatgccaccagagaaaatgtggacagagtgacagaggccctgcgggccgccctgcagcactgccccaagaagaagctgtag

SEQ ID NO: 143146 - DNA, 3078 bp, synthetic construct
  misc_feature 1..3078: note = Description of Artificial Sequence: Synthetic coding sequence
  source 1..3078: mol_type = other DNA
atggagcccttcaccaatgaccggctgcagctgcccaggaacatgattgaaaattccatgtttgaggaggagccagatgtggtggacctggccaaggagccctgcctgcaccccctggagccagatgaggtggagtatgagccccggggcagccggctgctggtgcggggcctgggggagcacgagatggaggaggatgaggaggactatgagagcagcgccaagctgctgggcatgtccttcatgaacagaagcagcggcctgagaaattctgccaccggctaccggcagagcccagatggagcctgcagcgtgcccagcgcccggaccatggtggtgtgtgccttcgtcatcgtggtggccgtgtctgtcatcatggtgatctacctgctgccccgctgcaccttcaccaaggagggctgccacaagaagaaccagagcatcggcctcatccagccctttgccaccaacgggaagctgttcccctgggcccagatccggctgcccacagctgtggtgcccctgcgctatgagctgagcctgcaccccaacctgacctccatgaccttccggggctctgtgaccatctctgtgcaggccctgcaggtgacctggaacatcatcctgcacagcacaggccacaacatcagccgggtgaccttcatgtctgctgtgagcagccaggagaagcaggccgagatcctggagtatgcctaccacggccagatcgccatcgtggcccctgaggccctgctggccggccacaactacaccctgaagattgagtacagcgccaacatcagcagcagctactacggcttctacggcttctcctacacagatgagagcaatgagaagaagtactttgctgccacccagtttgagcccctggccgcccggagcgccttcccctgctttgatgagcccgccttcaaggccaccttcatcatcaagatcatcagagatgagcagtacacagccctgagcaacatgcccaagaagagctctgtggtgctggatgatggcctggtgcaggatgagttcagcgagagcgtgaagatgagcacctacctggtggccttcatcgtgggggagatgaagaacctgagccaggatgtgaatggcaccctggtgtccatctatgctgtgcctgagaagattggccaggtgcactacgccctggagaccaccgtgaagctgctggagttcttccagaactactttgagatccagtaccccctgaagaagctggacctggtggccatcccagactttgaagctggggccatggagaactggggcctgctgaccttccgggaggagaccctgctgtatgacagcaacaccagctccatggctgacaggaagctggtgaccaagatcatcgcccacgagctggcccaccagtggtttggaaacctggtgaccatgaagtggtggaatgacctgtggctgaatgaaggatttgccaccttcatggagtacttcagcctggagaagatcttcaaggagctgagcagctatgaggacttcctggatgcccgcttcaagaccatgaagaaggacagcctgaacagcagccaccccatcagcagctctgtgcagagcagcgagcagatcgaggagatgtttgacagcctgagctacttcaagggcagcagcctgctgctgatgctgaagacctacctgtctgaagatgtgttccagcacgctgtggtgctgtacctgcacaaccacagctatgccagcatccagagtgatgacctgtgggacagcttcaatgaggtgaccaaccagaccctggatgtgaagaggatgatgaagacctggaccctgcagaagggcttccccctggtgacagtgcagaagaagggcaaggagctgttcatccagcaggagcgcttcttcctgaacatgaagccagagatccagcccagcgacaccagctacctgtggcacatccccctgtcctatgtgacagagggcaggaactacagcaagtaccagagcgtgtccctgctggacaagaagagcggggtcatcaacctgacagaggaggtgctgtgggtgaaggtgaacatcaacatgaatggctactacatcgtgcactatgcagatgatgactgggaggccctgatccaccagctgaagatcaacccctacgtgctgagtgacaaggaccgggccaacctgatcaacaacatctttgagctggccggcctgggcaaggtgcccctgaagagggcctttgacctgatcaactacctgggcaatgaaaaccacacagcccccatcacagaggccctcttccagacagacctgatctacaacctgctggagaagctgggctacatggacctggccagccggctggtgaccagggtcttcaagctgctgcagaaccagatccagcagcagacctggacagatgagggcacccccagcatgagggagctgcggagcgccctgctggagtttgcctgcacccacaacctgggcaactgcagcaccacagccatgaagctgtttgatgactggatggccagcaatggcacccagagcctgcccacagatgtgatgaccaccgtcttcaaggtgggcgccaagacagacaagggctggagcttcctgctgggcaagtacatcagcatcggcagcgaggccgagaagaacaagatcctggaggccctggccagcagtgaagatgtgaggaagctgtactggctgatgaagagcagcctgaatggagacaacttccgcacccagaagctgtccttcatcatcagaacagtgggccgccacttccctggccacctgctggcctgggactttgtgaaggagaactggaacaagctggtgcagaagttccccctgggcagctacaccatccagaacatcgtggccggcagcacctacctgttcagcaccaagacccacctgtctgaggtgcaggccttctttgagaaccagagcgaggccaccttccggctgcgctgtgtgcaggaggccctggaggtgatccagctgaacatccagtggatggagaagaacctgaagagcctgacctggtggctgtag

SEQ ID NO: 143147 - DNA, 2907 bp, synthetic construct
  misc_feature 1..2907: note = Description of Artificial Sequence: Synthetic coding sequence
  source 1..2907: mol_type = other DNA
atggacagcaccctgacagccagcgagatccggcagcgcttcatcgacttcttcaagagaaatgagcacacctacgtgcacagcagcgccaccatccccctggatgaccccaccctgctgtttgccaatgccggcatgaaccagttcaagcccatcttcctgaacaccatcgaccccagccaccccatggccaagctgagcagagctgccaacacccagaagtgcatccgggccggcggcaagcacaatgacctggatgatgtgggcaaggatgtgtaccaccacaccttctttgagatgctgggctcctggagctttggagactacttcaaggagctggcctgcaagatggccctggagctgctgacccaggagtttggcatccccatcgagcggctgtatgtgacctactttggaggagatgaagctgctggcctggaggccgacctggagtgcaagcagatctggcagaacctgggcctggatgacaccaagatcctgcccggcaacatgaaggacaacttctgggagatgggagacaccggcccctgtggcccctgcagcgagatccactatgacagaattggaggaagagatgctgcccacctggtgaaccaggatgaccccaacgtgctggagatctggaacctggtgttcatccagtacaaccgggaggctgatggcatcctgaagcccctgcccaagaagagcattgacaccggcatgggcctggagcggctggtgtctgtgctgcagaacaagatgagcaactatgacacagacctgtttgtgccctactttgaggccatccagaagggcaccggggcccggccctacaccgggaaggtgggcgcagaagatgctgatggcatcgacatggcctacagagtgctggccgaccacgcccggaccatcaccgtggccctggctgatggcggccgcccagacaacacaggccggggctacgtgctgcggcgcatcctgcggcgggctgtgcgctatgcccacgagaagctgaatgccagccggggcttctttgccaccctggtggatgtggtggtgcagagcctgggagatgccttccctgagctgaagaaggaccctgacatggtgaaggacatcatcaatgaggaggaggtgcagttcctgaagaccctgagccggggccgccgcatcctggacaggaagatccagagcctgggggacagcaagaccatccctggggacacagcctggctgctgtatgacacctacggcttccctgtggacctgaccggcctgattgctgaggagaagggcctggtggtggacatggatggctttgaggaggagaggaagctggcccagctgaagagccagggcaaaggagctggaggagaggacctgatcatgctggacatctatgccatcgaggagctgcgggcccggggcctggaggtgacagatgacagccccaagtacaactaccacctggacagcagcggcagctatgtgtttgagaacacagtggccaccgtgatggccctgcggcgggagaagatgtttgtggaggaggtgtccacaggccaggagtgtggggtggtgctggacaagacctgcttctacgccgagcagggcggccagatctatgatgagggctacctggtgaaggtggatgacagcagcgaggacaagacagagttcaccgtgaagaatgcccaggtgcggggcggctacgtgctgcacatcggcaccatctacggggacctgaaggtgggggaccaggtgtggctgttcattgatgagccccggcggcggcccatcatgagcaaccacacagccacccacatcctgaactttgccctgcggtctgtgctgggggaggccgaccagaagggcagcctggtggccccagaccggctgcgctttgacttcaccgccaagggggccatgagcacccagcagatcaagaaggccgaggagatcgccaatgagatgattgaggccgccaaggctgtgtacacccaggactgccccctggccgccgccaaggccatccagggcctgcgggctgtgtttgatgagacctacccagaccctgtgcgggtggtgtccattggagtgcctgtgtctgagctgctggatgaccccagcggccctgctggcagcctgacctctgtggagttctgtggcggcacccacctgaggaacagcagccacgccggggcctttgtgattgtgacagaggaggccatcgccaagggcatccgccgcatcgtggccgtgactggagctgaggcccagaaggccctgaggaaggccgagagcctgaagaagtgcctgtctgtgatggaggccaaggtgaaggcccagacagcccccaacaaggatgtgcagcgggagattgctgacctgggggaggccctggccacagctgtgatcccccagtggcagaaggatgagctgcgggagaccctgaagagcctgaagaaggtgatggatgacctggaccgggccagcaaggcagatgtgcagaagagggtgctggagaagaccaagcagttcatcgacagcaaccccaaccagcccctggtgatcctggagatggagagcggggccagcgccaaggccctgaatgaggccctgaagctgttcaagatgcacagcccccagaccagcgccatgctgttcaccgtggacaatgaggccggcaagatcacctgcctgtgccaggtgccccagaatgctgccaacagaggcctgaaggccagcgagtgggtgcagcaggtgtctggcctgatggatggcaagggcggcggcaaggatgtgtctgcccaggccaccgggaagaatgtgggctgcctgcaggaggccctgcagctggccaccagctttgcccagctgcggctgggagatgtgaagaactag

SEQ ID NO: 143148 - DNA, 2958 bp, synthetic construct
  misc_feature 1..2958: note = Description of Artificial Sequence: Synthetic coding sequence
  source 1..2958: mol_type = other DNA
atggccgcctctgtggccgccgccgcccggcggctgcggcgggccatcagaagaagccctgcctggaggggcctgagccaccggcccctgagcagcgagcccccagctgccaaggccagcgctgtgcgggccgccttcctgaacttcttccgggacagacatggccaccggctggtgcccagcgcctctgtgcggcccaggggggaccccagcctgctgtttgtgaatgccggcatgaaccagttcaagcccatcttcctgggcaccgtggaccccaggtctgagatggccggcttccggcgggtggccaacagccagaagtgtgtgcgggccggcggccaccacaatgacctggaggatgtgggccgggacctgagccaccacaccttctttgagatgctgggcaactgggcctttggaggagagtacttcaaggaggaggcctgcaacatggcctgggagctgctgacccaggtgtatggcatccctgaggagcggctgtggatctcctactttgatggagaccccaaggccggcctggaccctgacctggagacccgggacatctggctgagcctgggcgtgcctgccagccgggtgctgagctttggcccccaggagaacttctgggagatgggagacaccggcccctgtggcccctgcacagagatccactatgacctggccggcggcgtgggcgccccccagctggtggagctgtggaacctggtgttcatgcagcacaaccgggaggctgatggcagcctgcagcccctgccccagagacatgtggacaccggcatgggcctggagcggctggtggccgtgctgcagggcaagcacagcacctatgacacagacctcttcagccccctgctgaatgccatccagcagggctgccgggccccaccctacctgggccgggtgggcgtggctgatgagggccgcacagacacagcctacagagtggtggccgaccacatccgcaccctgtctgtgtgcatcagtgatggcatcttccctggcatgagcggcccccccctggtgctgcggcgcatcctgcggcgggctgtgcgcttctccatggagatcctgaaggcccctcctggcttcctgggcagcctggtgcctgtggtggtggagaccctgggagatgcctacccagagctgcagaggaacagcgcccagatcgccaacctggtgtctgaagatgaggccgccttcctggccagcctggagcggggccgccgcatcatcgacaggaccctgcggaccctgggccccagcgacatgtttcctgctgaggtggcctggagcctgagcctgtgtggggacctgggcctgcccctggacatggtggagctgatgctggaggagaagggcgtgcagctggacagcgctggcctggagcggctggcccaggaggaggcccagcaccgggcccggcaggccgagcctgtgcagaagcagggcctgtggctggatgtgcacgccctgggggagctgcagaggcagggcgtgcccccaacagatgacagccccaagtacaactacagcctgcggcccagcggcagctatgaatttggcacctgtgaggcccaggtgctgcagctgtacacagaagatggaacagctgtggcctctgtgggcaagggccagagatgtggcctgctgctggacaggaccaacttctacgccgagcagggcggccaggccagtgaccggggctacctggtgcgggccggccaggaggatgtgctcttccctgtggcccgggcccaggtgtgtggcggcttcatcctgcacgaggccgtggcccctgagtgcctgcggctgggggaccaggtgcagctgcacgtggatgaggcctggaggctgggctgcatggccaagcacacagccacccacctgctgaactgggccctgcggcagaccctgggccctggaacagagcagcagggcagccacctgaaccctgagcagctgcggctggatgtgaccacccagacccccctgaccccagagcagctgcgggctgtggagaacacagtgcaggaggccgtgggccaggatgaagctgtgtacatggaggaggtgcccctggccctgacagcccaggtgcccggcctgcggagcctggatgaggtgtacccagaccctgtgcgggtggtgtctgtgggcgtgcctgtggcccacgccctggaccctgccagccaggccgccctgcagacctctgtggagctgtgctgcggcacccacctgctgaggactggagctgtgggggacctggtgatcatcggggaccggcagctgagcaagggcaccacccggctgctggccgtgactggagagcaggcccagcaggcccgggagctgggccagagcctggcccaggaggtgaaggccgccacagagcggctgagcctgggcagcagagatgtggccgaggccctgcggctgagcaaggacatcggccgcctcatcgaggccgtggagacagctgtgatgccccagtggcagaggcgggagctgctggccaccgtgaagatgctgcagaggcgggccaacacagccatcaggaagctgcagatgggccaggccgccaagaagacccaggagctgctggagcggcacagcaagggccccctcatcgtggacacagtgtctgctgagagcctgtctgtgctggtgaaggtggtgcggcagctgtgtgagcaggcccccagcacctctgtgctgctgctgagcccccagcccatgggcaaggtgctgtgtgcctgccaggtggcccagggcgccatgcccaccttcaccgctgaggcctgggccctggccgtgtgcagccacatgggcggcaaggcctggggcagccgggtggtggcccagggcaccggcagcaccacagacctggaggccgccctgagcatcgcccagacctacgccctgagccagctgtag

SEQ ID NO: 143149 - DNA, 1578 bp, synthetic construct
  misc_feature 1..1578: note = Description of Artificial Sequence: Synthetic coding sequence
  source 1..1578: mol_type = other DNA
atggagttctgtgtggaggacagcacagatgtgcacgtgctgattgaggaccaccgcatcgtgttcagctgcaagaatgctgatggagtggagctgtacaatgaaattgagttctacgccaaggtgaacagcaaggacagccaggacaagaggagcagccgcagcatcacctgctttgtgaggaagtggaaggagaaggtggcctggccccggctgaccaaggaggacatcaagcctgtgtggctgtctgtggactttgacaactggagggactgggagggagatgaggagatggagctggcccacgtggagcactatgcagagctgctgaagaaggtgtccaccaagaggcctcctccagccatggatgacctggacttcaccaccaccgtggtgtcctgctgcccagctgagctgcagacagagggcagcaatggcaagaaggaggtgctgagcggcttccaggtggtgctggaggacacagtgctcttccctgagggcggcggccagccagatgaccggggcaccatcaatgacatctctgtgctgcgggtgaccaggagaggagagcaggccgaccacttcacccagacccccctggaccccggcagccaggtgctggtgcgggtggactgggagaggagatttgaccacatgcagcagcacagcggccagcacctgatcacagctgtggccgaccacctgttcaagctgaagaccacctcctgggagctgggccgcttccgcagcgccatcgagctggacacccccagcatgacagctgagcaggtggccgccatcgagcagagcgtgaatgagaagatccgggaccggctgcctgtgaatgtgcgggagctgagcctggatgatcctgaggtggagcaggtgtctggccggggcctgcctgatgaccacgccggccccatccgggtggtgaacatcgagggcgtggacagcaacatgtgctgcggcacccacgtgagcaacctgagtgacctgcaggtgatcaagatcctgggcacagagaagggcaagaagaacagaaccaacctgatcttcctgagcggcaacagagtgctgaagtggatggagaggagccatggaacagagaaggccctgacagccctgctgaagtgtggggctgaggaccacgtggaggccgtgaagaagctgcagaacagcaccaagatcctgcagaagaacaacctgaacctgctgcgggacctggccgtgcacatcgcccacagcctgaggaacagcccagactggggcggcgtggtgatcctgcacaggaaggagggggacagcgagttcatgaacatcatcgccaatgagatcggcagcgaggagaccctgctcttcctgactgtgggagatgagaagggcggcggcctcttcctgctggccggccccccagcctctgtggagaccctgggcccccgggtggccgaggtgctggagggcaaaggagctgggaagaagggccgcttccagggcaaggccaccaagatgagcaggaggatggaggcccaggccctgctgcaggactacatcagcacccagagcgccaaggagtag

SEQ ID NO: 143150 - DNA, 1761 bp, synthetic construct
  misc_feature 1..1761: note = Description of Artificial Sequence: Synthetic coding sequence
  source 1..1761: mol_type = other DNA
atgttcagcctgcccctgaactgcagcccagaccacatccggcggggcagctgctggggccggccccaggacctgaagattgctgccccagcctggaacagcaagtgccaccctggggccggggccgccatggcccggcagcacgcccggaccctgtggtatgaccggcccaggtatgtgttcatggagttctgtgtggaggacagcacagatgtgcacgtgctgattgaggaccacagaattgtgttcagctgcaagaatgctgatggagtggagctgtacaatgaaattgagttctacgccaaggtgaacagcaaggacagccaggacaagaggagcagccgcagcatcacctgctttgtgaggaagtggaaggagaaggtggcctggccccggctgaccaaggaggacatcaagcctgtgtggctgtctgtggactttgacaactggagggactgggagggagatgaggagatggagctggcccacgtggagcactacgccgagctgctgaagaaggtgtccaccaagaggcctcctccagccatggatgacctggacttcaccaccaccgtggtgtcctgctgcccagctgagctgcagacagagggcagcaatggcaagaaggaggtgctgagcggcttccaggtggtgctggaggacacagtgctcttccctgagggcggcggccagccagatgaccggggcaccatcaatgacatctctgtgctgcgggtgacccggcggggggagcaggccgaccacttcacccagacccccctggaccccggcagccaggtgctggtgcgggtggactgggagaggagatttgaccacatgcagcagcacagcggccagcacctgatcacagctgtggccgaccacctgttcaagctgaagaccacctcctgggagctgggccgcttccgcagcgccatcgagctggacacccccagcatgacagctgagcaggtggccgccatcgagcagagcgtgaatgagaagatccgggaccggctgcctgtgaatgtgcgggagctgagcctggatgatcctgaggtggagcaggtgtctggccggggcctgcctgatgaccatgctggccccatccgggtggtgaacattgaaggagtggacagcaacatgtgctgcggcacccacgtgagcaacctgagtgacctgcaggtgatcaagatcctgggcacagagaagggcaagaagaacagaaccaacctgatcttcctgagcggcaacagagtgctgaagtggatggagaggagccacggcacagagaaggccctgacagccctgctgaagtgtggggctgaagatcatgtggaggccgtgaagaagctgcagaacagcaccaagatcctgcagaagaacaacctgaacctgctgcgggacctggccgtgcacatcgcccacagcctgaggaacagcccagactggggcggcgtggtgatcctgcacaggaaggagggggacagcgagttcatgaacatcatcgccaatgaaattggcagcgaggagaccctgctcttcctgactgtgggagatgagaagggcggcggcctcttcctgctggccggccccccagcctctgtggagaccctgggcccccgggtggccgaggtgctggagggcaagggggccggcaagaagggccgcttccagggcaaggccaccaagatgagcaggaggatggaggcccaggccctgctgcaggactacatcagcacccagagcgccaaggagtag

SEQ ID NO: 143151 - DNA, 1761 bp, synthetic construct; identical to SEQ ID NO: 143150
  misc_feature 1..1761: note = Description of Artificial Sequence: Synthetic coding sequence
  source 1..1761: mol_type = other DNA

SEQ ID NO: 143152 - DNA, 1239 bp, synthetic construct
  misc_feature 1..1239: note = Description of Artificial Sequence: Synthetic coding sequence
  source 1..1239: mol_type = other DNA
atggccttctggtgccagagggacagctatgcccgggagttcaccaccaccgtggtgtcctgctgcccagctgagctgcagacagagggcagcaatggcaagaaggaggtgctgagcggcttccaggtggtgctggaggacacagtgctcttccctgagggcggcggccagccagatgaccggggcaccatcaatgacatctctgtgctgcgggtgacccggcggggggagcaggccgaccacttcacccagacccccctggaccccggcagccaggtgctggtgcgggtggactgggagaggagatttgaccacatgcagcagcacagcggccagcacctgatcacagctgtggccgaccacctgttcaagctgaagaccacctcctgggagctgggccgcttccgcagcgccatcgagctggacacccccagcatgacagctgagcaggtggccgccatcgagcagagcgtgaatgagaagatccgggaccggctgcctgtgaatgtgcgggagctgagcctggatgatcctgaggtggagcaggtgtctggccggggcctgcctgatgaccatgctggccccatccgggtggtgaacattgaaggagtggacagcaacatgtgctgcggcacccacgtgagcaacctgagtgacctgcaggtgatcaagatcctgggcacagagaagggcaagaagaacagaaccaacctgatcttcctgagcggcaacagagtgctgaagtggatggagaggagccacggcacagagaaggccctgacagccctgctgaagtgtggggctgaagatcatgtggaggccgtgaagaagctgcagaacagcaccaagatcctgcagaagaacaacctgaacctgctgcgggacctggccgtgcacatcgcccacagcctgaggaacagcccagactggggcggcgtggtgatcctgcacaggaaggagggggacagcgagttcatgaacatcatcgccaatgaaattggcagcgaggagaccctgctcttcctgactgtgggagatgagaagggcggcggcctcttcctgctggccggccccccagcctctgtggagaccctgggcccccgggtggccgaggtgctggagggcaagggggccggcaagaagggccgcttccagggcaaggccaccaagatgagcaggaggatggaggcccaggccctgctgcaggactacatcagcacccagagcgccaaggagtag

SEQ ID NO: 143153 - DNA, 501 bp, synthetic construct
  misc_feature 1..501: note = Description of Artificial Sequence: Synthetic coding sequence
  source 1..501: mol_type = other DNA
atgttcagcctgcccctgaactgcagcccagaccacatccggcggggcagctgctggggccggccccaggacctgaagattgctgccccagcctggaacagcaagtgccaccctggggccggggccgccatggcccggcagcacgcccggaccctgtggtatgaccggcccaggtatgtgttcatggagttctgtgtggaggacagcacagatgtgcacgtgctgattgaggaccacagaattgtgttcagctgcaagaatgctgatggagtggagctgtacaatgaaattgagttctacgccaaggtgaacagcaagcctgtgtggctgtctgtggactttgacaactggagggactgggagggagatgaggagatggagctggcccacgtggagcactatgcagagctgctgaagaaggtgtccaccaagaggcctcctccagccatggatgacctggatgatgacagcgacagcgcagatgatgccaccagcaactag

SEQ ID NO: 143154 - DNA, 399 bp, synthetic construct
  misc_feature 1..399: note = Description of Artificial Sequence: Synthetic coding sequence
  source 1..399: mol_type = other DNA
atggagttctgtgtggaggacagcacagatgtgcacgtgctgattgaggaccaccgcatcgtgttcagctgcaagaatgctgatggagtggagctgtacaatgaaattgagttctacgccaaggtgaacagcaaggacagccaggacaagaggagcagccgcagcatcacctgctttgtgaggaagtggaaggagaaggtggcctggccccggctgaccaaggaggacatcaagcctgtgtggctgtctgtggactttgacaactggagggactgggagggagatgaggagatggagctggcccacgtggagcactatgcagagctgctgaagaaggtgtccaccaagaggcctcctccagccatggatgacctggacttcaccaccaccgtggtgtag

SEQ ID NO: 143155 - DNA, 1830 bp, synthetic construct
  misc_feature 1..1830: note = Description of Artificial Sequence: Synthetic coding sequence
  source 1..1830: mol_type = other DNA
atgaagtgggtgaccttcatcagcctgctcttcctgttcagcagcgcctacagccggggcgtcttcagaagagatgcccacaagtctgaggtggcccaccgcttcaaggacctgggggaggagaacttcaaggccctggtgctgattgcctttgcccagtacctgcagcagtgcccctttgaagatcatgtgaagctggtgaatgaggtgacagaatttgccaagacctgtgtggctgatgagagcgctgagaactgtgacaagagcctgcacaccctgtttggagacaagctgtgcaccgtggccaccctgcgggagacctacggggagatggctgactgctgtgccaagcaggagcctgagagaaatgaatgcttcctgcagcacaaggatgacaaccccaacctgccccggctggtgcggcctgaggtggatgtgatgtgcacagccttccatgacaatgaggagaccttcctgaagaagtacctgtatgagatcgcccggcggcacccctacttctacgcccctgagctgctcttctttgccaagcgctacaaggccgccttcacagagtgctgccaggccgctgacaaggccgcctgcctgctgcccaagctggatgagctgagagatgagggcaaggccagcagcgccaagcagaggctgaagtgtgccagcctgcagaagtttggagagcgggccttcaaggcctgggccgtggcccggctgagccagcgcttccccaaggccgagtttgctgaggtgtccaagctggtgacagacctgaccaaggtgcacacagagtgctgccacggggacctgctggagtgtgctgatgacagagctgacctggccaagtacatctgtgagaaccaggacagcatcagcagcaagctgaaggagtgctgtgagaagcccctgctggagaagagccactgcatcgccgaggtggagaatgatgagatgcctgctgacctgcccagcctggccgctgactttgtggagagcaaggatgtgtgcaagaactatgcagaggccaaggatgtgttcctgggcatgttcctgtatgaatatgcccggcggcacccagactacagcgtggtgctgctgctgcggctggccaagacctatgagaccaccctggagaagtgctgtgccgctgctgacccccatgagtgctacgccaaggtgtttgatgagttcaagcccctggtggaggagccccagaacctgatcaagcagaactgtgagctgtttgagcagctgggggagtacaagttccagaatgccctgctggtgcgctacaccaagaaggtgccccaggtgtccacccccaccctggtggaggtgtccaggaacctgggcaaggtgggcagcaagtgctgcaagcaccctgaggccaagaggatgccctgtgccgaggactacctgtctgtggtgctgaaccagctgtgtgtgctgcacgagaagacccctgtgtctgacagagtgaccaagtgctgcacagagagcctggtgaacagaagaccctgcttcagcgccctggaggtggatgagacctacgtgcccaaggagttcaatgctgagaccttcaccttccacgccgacatctgcaccctgtctgagaaggagcggcagatcaagaagcagacagccctggtggagctggtgaagcacaagcccaaggccaccaaggagcagctgaaggctgtgatggatgactttgctgcctttgtggagaagtgctgcaaggcagatgacaaggagacctgctttgctgaggagggcaagaagctggtggccgccagccaggccgccctgggcctgtag

SEQ ID NO: 143156 - DNA, 1191 bp, synthetic construct
  misc_feature 1..1191: note = Description of Artificial Sequence: Synthetic coding sequence
  source 1..1191: mol_type = other DNA
atgaagtgggtgaccttcatcagcctgctcttcctgttcagcagcgcctacagccggggcgtcttcagaagagatgcccacaagtctgaggtggcccaccgcttcaaggacctgggggaggagaacttcaaggccctggtgctgattgcctttgcccagtacctgcagcagtgcccctttgaagatcatgtgaagctggtgaatgaggtgacagaatttgccaagacctgtgtggctgatgagagcgctgagaactgtgacaagagcctgcacaccctgtttggagacaagctgtgcaccgtggccaccctgcgggagacctacggggagatggctgactgctgtgccaagcaggagcctgagagaaatgaatgcttcctgcagcacaaggatgacaaccccaacctgccccggctggtgcggcctgaggtggatgtgatgtgcacagccttccatgacaatgaggagaccttcctgaagaagtacctgtatgagaccaccctggagaagtgctgtgccgctgctgacccccatgaatgttatgccaaggtgtttgatgagttcaagcccctggtggaggagccccagaacctgatcaagcagaactgtgagctgtttgagcagctgggggagtacaagttccagaatgccctgctggtgcgctacaccaagaaggtgccccaggtgtccacccccaccctggtggaggtgtccaggaacctgggcaaggtgggcagcaagtgctgcaagcaccctgaggccaagaggatgccctgtgccgaggactacctgtctgtggtgctgaaccagctgtgtgtgctgcacgagaagacccctgtgtctgacagagtgaccaagtgctgcacagagagcctggtgaacagaagaccctgcttcagcgccctggaggtggatgagacctacgtgcccaaggagttcaatgctgagaccttcaccttccacgccgacatctgcaccctgtctgagaaggagcggcagatcaagaagcagacagccctggtggagctggtgaagcacaagcccaaggccaccaaggagcagctgaaggctgtgatggatgactttgctgcctttgtggagaagtgctgcaaggcagatgacaaggagacctgctttgctgaggagggcaagaagctggtggccgccagccaggccgccctgggcctgtag

SEQ ID NO: 143157 - DNA, 1254 bp, synthetic construct
  misc_feature 1..1254: note = Description of Artificial Sequence: Synthetic coding sequence
  source 1..1254: mol_type = other DNA
atgaagtgggtgaccttcatcagcctgctcttcctgttcagcagcgcctacagccggggcgtcttcagaagagatgcccacaagtctgaggtggcccaccgcttcaaggacctgggggaggagaacttcaaggccctggccgtggcccggctgagccagcgcttccccaaggccgagtttgctgaggtgtccaagctggtgacagacctgaccaaggtgcacacagagtgctgccacggggacctgctggagtgtgctgatgacagagctgacctggccaagtacatctgtgagaaccaggacagcatcagcagcaagctgaaggagtgctgtgagaagcccctgctggagaagagccactgcatcgccgaggtggagaatgatgagatgcctgctgacctgcccagcctggccgctgactttgtggagagcaaggatgtgtgcaagaactatgcagaggccaaggatgtgttcctgggcatgttcctgtatgaatatgcccggcggcacccagactacagcgtggtgctgctgctgcggctggccaagacctatgagaccaccctggagaagtgctgtgccgctgctgacccccatgagtgctacgccaaggtgtttgatgagttcaagcccctggtggaggagccccagaacctgatcaagcagaactgtgagctgtttgagcagctgggggagtacaagttccagaatgccctgctggtgcgctacaccaagaaggtgccccaggtgtccacccccaccctggtggaggtgtccaggaacctgggcaaggtgggcagcaagtgctgcaagcaccctgaggccaagaggatgccctgtgccgaggactacctgtctgtggtgctgaaccagctgtgtgtgctgcacgagaagacccctgtgtctgacagagtgaccaagtgctgcacagagagcctggtgaacagaagaccctgcttcagcgccctggaggtggatgagacctacgtgcccaaggagttcaatgctgagaccttcaccttccacgccgacatctgcaccctgtctgagaaggagcggcagatcaagaagcagacagccctggtggagctggtgaagcacaagcccaaggccaccaaggagcagctgaaggctgtgatggatgactttgctgcctttgtggagaagtgctgcaaggcagatgacaaggagacctgctttgctgaggagggcaagaagctggtggccgccagccaggccgccctgggcctgtag

SEQ ID NO: 143158 - DNA, 1857 bp, synthetic construct
  misc_feature 1..1857: note = Description of Artificial Sequence: Synthetic coding sequence
  source 1..1857: mol_type = other DNA
atgaagtgggtgaccttcatcagcctgctcttcctgttcagcagcgcctacagccggggcgtcttcagaagagatgccctcttcctgttcttcttcccctgcccagacaagtctgaggtggcccaccgcttcaaggacctgggggaggagaacttcaaggccctggtgctgattgcctttgcccagtacctgcagcagtgcccctttgaggaccacgtgaagctggtgaatgaggtgacagaatttgccaagacctgtgtggctgatgaatctgctgagaactgtgacaagagcctgcacaccctgtttggagacaagctgtgcaccgtggccaccctgcgggagacctatggagagatggctgactgctgtgccaagcaggagcctgagagaaatgaatgcttcctgcagcacaaggatgacaaccccaacctgccccggctggtgcggcctgaggtggatgtgatgtgcacagccttccatgacaatgaggagaccttcctgaagaagtacctgtatgaaattgcccggcggcacccctacttctacgcccctgagctgctcttctttgccaagcgctacaaggccgccttcacagagtgctgccaggccgctgacaaggccgcctgcctgctgcccaagctggatgagctgagagatgagggcaaggccagcagcgccaagcagaggctgaagtgtgccagcctgcagaagtttggagagcgggccttcaaggcctgggccgtggcccggctgagccagcgcttccccaaggccgagtttgctgaggtgtccaagctggtgacagacctgaccaaggtgcacacagagtgctgccacggggacctgctggagtgtgctgatgacagagctgacctggccaagtacatctgtgagaaccaggacagcatcagcagcaagctgaaggagtgctgtgagaagcccctgctggagaagagccactgcatcgccgaggtggagaatgatgagatgcctgctgacctgcccagcctggccgctgactttgtggagagcaaggatgtgtgcaagaactatgcagaggccaaggatgtgttcctgggcatgttcctgtatgaatatgcccggcggcacccagactacagcgtggtgctgctgctgcggctggccaagacctatgagaccaccctggagaagtgctgtgccgctgctgacccccatgaatgttatgccaaggtgtttgatgagttcaagcccctggtggaggagccccagaacctgatcaagcagaactgtgagctgtttgagcagctgggggagtacaagttccagaatgccctgctggtgcgctacaccaagaaggtgccccaggtgtccacccccaccctggtggaggtgtccaggaacctgggcaaggtgggcagcaagtgctgcaagcaccctgaggccaagaggatgccctgtgccgaggactacctgtctgtggtgctgaaccagctgtgtgtgctgcacgagaagacccctgtgtctgacagagtgaccaagtgctgcacagagagcctggtgaacagaagaccctgcttcagcgccctggaggtggatgagacctacgtgcccaaggagttcaatgctgagaccttcaccttccacgccgacatctgcaccctgtctgagaaggagcggcagatcaagaagcagacagccctggtggagctggtgaagcacaagcccaaggccaccaaggagcagctgaaggctgtgatggatgactttgctgcctttgtggagaagtgctgcaaggcagatgacaaggagacctgctttgctgaggagggcaagaagctggtggccgccagccaggccgccctgggcctgtag

SEQ ID NO: 143159 - DNA, 1161 bp, synthetic construct
  misc_feature 1..1161: note = Description of Artificial Sequence: Synthetic coding sequence
  source 1..1161: mol_type = other DNA
atgtttgctgagatccagatccaggacaaggacaggatgggcacagctgggaaggtgatcaagtgcaaggctgctgtgctgtgggagcagaagcagcccttcagcattgaggagattgaggtggccccacccaagaccaaggaggtgcgcatcaagatcctggccaccggcatctgcaggacagatgaccacgtgatcaagggcaccatggtgtccaagtttcctgtgattgtgggccacgaggccactggaattgtggagagcattggagagggcgtgaccaccgtgaagccaggggacaaggtgatccccctcttcctgccccagtgccgggagtgcaatgcctgcagaaatccagatggcaacctgtgcatccgcagtgacatcaccggccggggcgtgctggctgatggcaccacccgcttcacctgcaagggcaagcctgtgcaccacttcatgaacaccagcaccttcacagagtacacagtggtggatgagagctctgtggccaagattgatgatgctgcccctcctgagaaggtgtgcctgattggctgcggcttcagcacaggctacggggctgctgtgaagacaggcaaggtgaagccaggcagcacctgtgtggtgtttggcctgggcggcgtgggcctgagcgtcatcatgggctgcaagtctgctggggccagccgcatcatcggcatcgacctgaacaaggacaagtttgagaaggccatggctgtgggcgccacagagtgcatcagccccaaggacagcaccaagcccatcagcgaggtgctgtctgagatgacaggcaacaacgtgggctacacctttgaggtgattggccacctggagaccatgattgatgccctggccagctgccacatgaactacggcacctctgtggtggtgggcgtgcccccatctgccaagatgctgacctatgaccccatgctgctcttcaccggccgcacctggaagggctgtgtgtttggaggcctgaagagcagagatgatgtgcccaagctggtgacagagttcctggccaagaagtttgacctggaccagctgatcacccacgtgctgcccttcaagaagatcagcgagggctttgagctgctgaacagcggccagagcatcagaacagtgctgaccttctag

SEQ ID NO: 143160 - DNA, 1128 bp, synthetic construct
  misc_feature 1..1128: note = Description of Artificial Sequence: Synthetic coding sequence
  source 1..1128: mol_type = other DNA
atgagcacagctgggaaggtgatcaagtgcaaggctgctgtgctgtgggaggtgaagaagcccttcagcattgaagatgtggaggtggccccacccaaggcctatgaggtgcgcatcaagatggtggccgtgggcatctgccacacagatgaccacgtggtgtctggcaacctggtgacccccctgcctgtgatcctgggccacgaggccgccggcatcgtggagagcgtgggggagggcgtgaccaccgtgaagccaggggacaaggtgatccccctcttcaccccccagtgtgggaagtgccgggtgtgcaagaaccctgagagcaactactgcctgaagaatgacctgggcaacccccggggcaccctgcaggacggcacccggcgcttcacctgccggggcaagcccatccaccacttcctgggcaccagcaccttcagccagtacacagtggtggatgaaaatgctgtggccaagattgatgctgccagccccctggagaaggtgtgcctgattggctgcggcttcagcacaggctacggcagcgctgtgaatgtggccaaggtgaccccaggcagcacctgtgctgtgtttggcctgggcggcgtgggcctgtctgctgtgatgggctgcaaggctgctggagctgcccgcatcatcgctgtggacatcaacaaggacaagtttgccaaggccaaggagctgggcgccacagagtgcatcaacccccaggactacaagaagcccatccaggaggtgctgaaggagatgacagatggcggcgtggacttctcctttgaagtcatcggccgcctggacaccatgatggccagcctgctgtgctgccacgaggcctgtggcaccagcgtcatcgtgggcgtgcccccagccagccagaacctgagcatcaaccccatgctgctgctgactggaagaacctggaagggagctgtgtatggaggcttcaagagcaaggagggcatccccaagctggtggccgacttcatggccaagaagttcagcctggatgccctgatcacccacgtgctgccctttgagaagatcaatgaaggatttgacctgctgcacagcggcaagagcatcagaacagtgctgaccttctag

SEQ ID NO: 143161 - DNA, 1008 bp, synthetic construct
  misc_feature 1..1008: note = Description of Artificial Sequence: Synthetic coding sequence
  source 1..1008: mol_type = other DNA
atggtggccgtgggcatctgccacacagatgaccacgtggtgtctggcaacctggtgacccccctgcctgtgatcctgggccacgaggccgccggcatcgtggagagcgtgggggagggcgtgaccaccgtgaagccaggggacaaggtgatccccctcttcaccccccagtgtgggaagtgccgggtgtgcaagaaccctgagagcaactactgcctgaagaatgacctgggcaacccccggggcaccctgcaggacggcacccggcgcttcacctgccggggcaagcccatccaccacttcctgggcaccagcaccttcagccagtacacagtggtggatgaaaatgctgtggccaagattgatgctgccagccccctggagaaggtgtgcctgattggctgcggcttcagcacaggctacggcagcgctgtgaatgtggccaaggtgaccccaggcagcacctgtgctgtgtttggcctgggcggcgtgggcctgtctgctgtgatgggctgcaaggctgctggagctgcccgcatcatcgctgtggacatcaacaaggacaagtttgccaaggccaaggagctgggcgccacagagtgcatcaacccccaggactacaagaagcccatccaggaggtgctgaaggagatgacagatggcggcgtggacttctcctttgaagtcatcggccgcctggacaccatgatggccagcctgctgtgctgccacgaggcctgtggcaccagcgtcatcgtgggcgtgcccccagccagccagaacctgagcatcaaccccatgctgctgctgactggaagaacctggaagggagctgtgtatggaggcttcaagagcaaggagggcatccccaagctggtggccgacttcatggccaagaagttcagcctggatgccctgatcacccacgtgctgccctttgagaagatcaatgaaggatttgacctgctgcacagcggcaagagcatcagaacagtgctgaccttctag

SEQ ID NO: 143162 - DNA, 1089 bp, synthetic construct
  misc_feature 1..1089: note = Description of Artificial Sequence: Synthetic coding sequence
  source 1..1089: mol_type = other DNA
atgagcacagctgggaaggtgatcaagtgcaaggctgctgtgctgtgggaggtgaagaagcccttcagcattgaagatgtggaggtggccccacccaaggcctatgaggtgcgcatcaagatggtggccgtgggcatctgccacacagatgaccacgtggtgtctggcaacctggtgacccccctgcctgtgatcctgggccacgaggccgccggcatcgtggagagcgtgggggagggcgtgaccaccgtgaagccaggggacaaggtgatccccctcttcaccccccagtgtgggaagtgccgggtgtgcaagaaccctgagagcaactactgcctgaagaatgacctgggcaacccccggggcaagcccatccaccacttcctgggcaccagcaccttcagccagtacacagtggtggatgaaaatgctgtggccaagattgatgctgccagccccctggagaaggtgtgcctgattggctgcggcttcagcacaggctacggcagcgctgtgaatgtggccaaggtgaccccaggcagcacctgtgctgtgtttggcctgggcggcgtgggcctgtctgctgtgatgggctgcaaggccgccggggccgcccgcatcatcgctgtggacatcaacaaggacaagtttgccaaggccaaggagctgggcgccacagagtgcatcaacccccaggactacaagaagcccatccaggaggtgctgaaggagatgacagatggaggagtggacttctcctttgaggtgattggccgcctggacaccatgatggccagcctgctgtgctgccacgaggcctgtggcacctctgtgattgtgggcgtgcccccagccagccagaacctgagcatcaaccccatgctgctgctgaccggccgcacctggaagggagctgtgtatggaggcttcaagagcaaggagggcatccccaagctggtggccgacttcatggccaagaagttcagcctggatgccctgatcacccacgtgctgccctttgagaagatcaatgaaggatttgacctgctgcacagcggcaagagcatcagaacagtgctgaccttctag

SEQ ID NO: 143163 - DNA, 1143 bp, synthetic construct
  misc_feature 1..1143: note = Description of Artificial Sequence: Synthetic coding sequence
  source 1..1143: mol_type = other DNA
atgggcaccaagggcaaggtgatcaagtgcaaggccgccatcgcctgggaggccggcaagcccctgtgcatcgaggaggtggaggtggccccacccaaggcccacgaggtgcgcatccagatcatcgccaccagcctgtgccacacagatgccaccgtcatcgacagcaagtttgagggcctggccttccctgtgattgtgggccatgaagctgctggcatcgtggagagcatcggccctggggtgaccaacgtgaagccaggggacaaggtgatccccctgtatgcccccctgtgcaggaagtgcaagttctgcctgagccccctgaccaacctgtgtgggaagatcagcaacctgaagagccctgccagtgaccagcagctgatggaggacaagaccagccgcttcacctgcaagggcaagcctgtgtaccacttcttcggcaccagcaccttcagccagtacacagtggtgtctgacatcaacctggccaagattgatgatgatgccaacctggagcgggtgtgcctgctgggctgcggcttcagcacaggctacggggccgccatcaacaatgccaaggtgaccccaggcagcacctgtgctgtgtttggcctgggcggcgtgggcctgtctgctgtgatgggctgcaaggccgccggggccagccgcatcatcggcatcgacatcaacagcgagaagtttgtgaaggccaaggccctgggcgccacagactgcctgaacccccgggacctgcacaagcccatccaggaggtgatcatcgagctgaccaagggcggcgtggactttgccctggactgtgccggcggcagcgagaccatgaaggccgccctggactgcaccacagctggctggggcagctgcaccttcatcggcgtggccgccggcagcaagggcctgaccatcttccctgaggagctgatcatcggccgcaccatcaatggcaccttctttggaggctggaagtctgtggacagcatccccaagctggtgacagactacaagaacaagaagttcaacctggatgccctggtgacccacaccctgccctttgacaagatcagcgaggcctttgacctgatgaaccagggcaagtctgtgaggaccatcctgatcttctag

SEQ ID NO: 143164 - DNA, 1200 bp, synthetic construct
  misc_feature 1..1200: note = Description of Artificial Sequence: Synthetic coding sequence
  source 1..1200: mol_type = other DNA
atgctggtgcggggcccccactttgagctgcagcgctgcaagacccacctgttcagcagcaactacctgacccaggtgatcaagtgcaaggccgccatcgcctgggaggccggcaagcccctgtgcatcgaggaggtggaggtggccccacccaaggcccacgaggtgcgcatccagatcatcgccaccagcctgtgccacacagatgccaccgtgattgacagcaagtttgagggcctggccttccctgtgattgtgggccacgaggccgccggcatcgtggagagcatcggccctggggtgaccaacgtgaagccaggggacaaggtgatccccctgtatgcccccctgtgcaggaagtgcaagttctgcctgagccccctgaccaacctgtgtgggaagatcagcaacctgaagagccctgccagtgaccagcagctgatggaggacaagaccagccgcttcacctgcaagggcaagcctgtgtaccacttcttcggcaccagcaccttcagccagtacacagtggtgtctgacatcaacctggccaagattgatgatgatgccaacctggagcgggtgtgcctgctgggctgcggcttcagcacaggctatggagctgccatcaacaatgccaaggtgaccccaggcagcacctgtgctgtgtttggcctgggcggcgtgggcctgtctgctgtgatgggctgcaaggctgctggggccagccgcatcattggaattgacatcaacagcgagaagtttgtgaaggccaaggccctgggcgccacagactgcctgaacccccgggacctgcacaagcccatccaggaggtgatcatcgagctgaccaagggcggcgtggactttgccctggactgtgccggcggcagcgagaccatgaaggccgccctggactgcaccacagctggctggggcagctgcaccttcatcggcgtggccgccggcagcaagggcctgaccatcttccctgaggagctgatcattggaagaaccatcaatggcaccttcttcggcggctggaagtctgtggacagcatccccaagctggtgacagactacaagaacaagaagttcaacctggatgccctggtgacccacaccctgccctttgacaagatcagcgaggcctttgacctgatgaaccagggcaagtctgtgaggaccatcctgatcttctag

SEQ ID NO: 143165 - DNA, 1125 bp, synthetic construct
  misc_feature 1..1125: note = Description of Artificial Sequence: Synthetic coding sequence
  source 1..1125: mol_type = other DNA
atggccaatgaagtcatcaagtgcaaggctgctgtggcctgggaggccggcaagcccctgagcattgaggagattgaggtggccccacccaaggcccacgaggtgcgcatcaagatcatcgccacagctgtgtgccacacagatgcctacaccctgtctggagctgaccctgagggctgcttccctgtgatcctgggccatgaaggagctggcatcgtggagagcgtgggggagggcgtgaccaagctgaaggccggggacaccgtcatccccctgtacatcccccagtgtggggagtgcaagttctgcctgaaccccaagaccaacctgtgccagaagatccgggtgacccagggcaagggcctgatgccagatggcaccagccgcttcacctgcaagggcaagaccatcctgcactacatgggcaccagcaccttcagcgagtacacagtggtggccgacatctctgtggccaagattgaccccctggcccccctggacaaggtgtgcctgctgggctgcggcatcagcacaggctacggggctgctgtgaacacagccaagctggagcccggctctgtgtgtgctgtgtttggcctgggcggcgtgggcctggccgtcatcatgggctgcaaggtggccggggccagccgcatcatcggcgtggacatcaacaaggacaagtttgcccgggccaaggagtttggagccacagagtgcatcaacccccaggacttcagcaagcccatccaggaggtgctgattgagatgacagatggaggagtggactacagctttgaatgtattggaaatgtgaaggtgatgagagctgccctggaggcctgccacaagggctggggcgtgtctgtggtggtgggcgtggccgccagcggggaggagatcgccacccggcccttccagctggtgacaggccgcacctggaagggcacagcctttggaggctggaagtctgtggagagcgtgcccaagctggtgtctgagtacatgagcaagaagatcaaggtggatgaatttgtgacccacaacctgagctttgatgagatcaacaaggcctttgagctgatgcacagcggcaagagcatcagaacagtggtgaagatctag

SEQ ID NO: 143166 - DNA, 1107 bp, synthetic construct
  misc_feature 1..1107: note = Description of Artificial Sequence: Synthetic coding sequence
  source 1..1107: mol_type = other DNA
atgtgcaccaccggccaggtgatccgctgcaaggccgccatcctgtggaagccaggggcccccttcagcattgaggaggtggaggtggccccacccaaggccaaggaggtgcgcatcaaggtggtggccaccggcctgtgtggcacagagatgaaggtgctgggcagcaagcacctggacctgctgtaccccaccatcctgggccatgaaggagctggcatcgtggagagcatcggggagggcgtgtccacagtgaagccaggggacaaggtgatcaccctcttcctgccccagtgtggagaatgtaccagctgcctgaacagcgagggcaacttctgcatccagttcaagcagagcaagacccagctgatgtctgatggcaccagccgcttcacctgcaagggcaagagcatctaccactttggaaacaccagcaccttctgtgagtacaccgtcatcaaggagatctctgtggccaagattgatgctgtggcccccctggagaaggtgtgcctgatcagctgtggcttcagcactggatttggagctgccatcaacacagccaaggtgaccccaggcagcacctgtgctgtgtttggcctgggcggcgtgggcctgtctgtggtgatgggctgcaaggctgctggagctgcccgcatcattggagtggatgtgaacaaggagaagttcaagaaggcccaggagctgggcgccacagagtgcctgaacccccaggacctgaagaagcccatccaggaggtgctgtttgacatgacagatgctggcatcgacttctgctttgaggccatcggcaacctggatgtgctggccgccgccctggccagctgcaatgaaagctatggagtgtgtgtggtggtgggcgtgctgcctgcctctgtgcagctgaagatcagcggccagctgttcttcagcggccgcagcctgaagggctctgtgtttggaggctggaagagccggcagcacatccccaagctggtggccgactacatggccgagaagctgaacctggaccccctcatcacccacaccctgaacctggacaagatcaatgaagctgtggagctgatgaagacaggcaagtggtag

SEQ ID NO: 143167 - DNA, 1128 bp, synthetic construct
  misc_feature 1..1128: note = Description of Artificial Sequence: Synthetic coding sequence
  source 1..1128: mol_type = other DNA
atgtgcaccaccggccaggtgatccgctgcaaggccgccatcctgtggaagccaggggcccccttcagcattgaggaggtggaggtggccccacccaaggccaaggaggtgcgcatcaaggtggtggccaccggcctgtgtggcacagagatgaaggtgctgggcagcaagcacctggacctgctgtaccccaccatcctgggccatgaaggagctggcatcgtggagagcatcggggagggcgtgtccacagtgaagccaggggacaaggtgatcaccctcttcctgccccagtgtggagaatgtaccagctgcctgaacagcgagggcaacttctgcatccagttcaagcagagcaagacccagctgatgtctgatggcaccagccgcttcacctgcaagggcaagagcatctaccactttggaaacaccagcaccttctgtgagtacaccgtcatcaaggagatctctgtggccaagattgatgctgtggcccccctggagaaggtgtgcctgatcagctgtggcttcagcactggatttggagctgccatcaacacagccaaggtgaccccaggcagcacctgtgctgtgtttggcctgggcggcgtgggcctgtctgtggtgatgggctgcaaggctgctggagctgcccgcatcattggagtggatgtgaacaaggagaagttcaagaaggcccaggagctgggcgccacagagtgcctgaacccccaggacctgaagaagcccatccaggaggtgctgtttgacatgacagatgctggcatcgacttctgctttgaggccatcggcaacctggatgtgctggccgccgccctggccagctgcaatgaaagctatggagtgtgtgtggtggtgggcgtgctgcctgcctctgtgcagctgaagatcagcggccagctgttcttcagcggccgcagcctgaagggctctgtgtttggaggctggaagagccggcagcacatccccaagctggtggccgactacatggccgagaagctgaacctggaccccctcatcacccacaccctgaacctggacaagatcaatgaagctgtggagctgatgaagacaggcaagtgcatccgctgcatcctgctgctgtag

SEQ ID NO: 143168 - DNA, 501 bp, synthetic construct
  misc_feature 1..501: note = Description of Artificial Sequence: Synthetic coding sequence
  source 1..501: mol_type = other DNA
atgggctgcaaggccgccggggccgcccgcatcatcggcgtggatgtgaacaaggagaagttcaagaaggcccaggagctgggcgccacagaatgtctgaacccccaggacctgaagaagcccatccaggaggtgctgtttgacatgacagatgctggcatcgacttctgctttgaggccatcggcaacctggatgtgctggccgccgccctggccagctgcaatgaaagctatggagtgtgtgtggtggtgggcgtgctgcctgcctctgtgcagctgaagatcagcggccagctgttcttcagcggccgcagcctgaagggctctgtgtttggaggctggaagagccggcagcacatccccaagctggtggccgactacatggccgagaagctgaacctggaccccctcatcacccacaccctgaacctggacaagatcaatgaggccgtggagctgatgaagacaggcaagtgcatccgctgcatcctgctgctgtag

SEQ ID NO: 143169 - DNA, 1068 bp, synthetic construct
  misc_feature 1..1068: note = Description of Artificial Sequence: Synthetic coding sequence
  source 1..1068: mol_type = other DNA
atggagcctgagaagcagacagagatcagcgagttcttcctgcagggcctgtctgagaagccagagcaccagaccctgctcttcaccatgttcctgagcacctacctggtgaccatcattggaaatgccctgatcatcctggccatcatcacagacagccacctgcacacccccatgtacttcttcctgttcaacctgagcctggtggacaccctgctgagcagcaccaccgtgcccaagatgctggccaacatccaggcccagagccgggccatcccctttgtgggctgcctgacccagatgtatgccttccacctgtttggcaccatggacagcttcctgctggccgtgatggccatcgacagatttgtggccatcgtgcacccccagcgctacctggtgctgatgtgcagccctgtgtgtggcctgctgctgggcgcctcctggatgatcaccaacctgcagagcctcatccacacctgcctgatggcccagctgaccttctgtgccggcagcgagatcagccacttcttctgtgacctgatgcccctgctgaagctgagcggcagtgacacccacaccaatgagctggtgatctttgccttcggcatcgtggtgggcaccagccccttcagctgcatcctgctgagctacatccgcatcttctggacagtgttcaagatccccagcacccggggcaagtggaaggccttcagcacctgtggcctgcacctgactgtggtgtccctgtcctatggcaccatctttgctgtgtacctgcagcccaccagccccagcagcagccagaaggacaaggccgccgccctgatgtgtggggtcttcatccccatgctgaaccccttcatctacagcatccggaacaaggacatgaaggccgccctgggcaagctgattggcaaggtggccgtgccctgccccaggcctgagcagctgctggatgtgtaccacgtgcccggcagcctgctggccgcccgggacacagagatgcaccccatcccctacccaggcggcgtgcagagcctggccggcaacagagacatggagtag

SEQ ID NO: 143170 - DNA, 1125 bp, synthetic construct
  misc_feature 1..1125: note = Description of Artificial Sequence: Synthetic coding sequence
  source 1..1125: mol_type = other DNA
atgggcacagctgggaaggtgatcaagtgcaaggctgctgtgctgtgggagcagaagcagcccttcagcattgaggagattgaggtggccccacccaagaccaaggaggtgcgcatcaagatcctggccaccggcatctgcaggacagatgaccacgtgatcaagggcaccatggtgtccaagtttcctgtgattgtgggccacgaggccactggaattgtggagagcattggagagggcgtgaccaccgtgaagccaggggacaaggtgatccccctcttcctgccccagtgccgggagtgcaatgcctgcagaaatccagatggcaacctgtgcatccgcagtgacatcaccggccggggcgtgctggctgatggcaccacccgcttcacctgcaagggcaagcctgtgcaccacttcatgaacaccagcaccttcacagagtacacagtggtggatgagagctctgtggccaagattgatgatgctgcccctcctgagaaggtgtgcctgattggctgcggcttcagcacaggctacggggctgctgtgaagacaggcaaggtgaagccaggcagcacctgtgtggtgtttggcctgggcggcgtgggcctgagcgtcatcatgggctgcaagtctgctggggccagccgcatcatcggcatcgacctgaacaaggacaagtttgagaaggccatggctgtgggcgccacagagtgcatcagccccaaggacagcaccaagcccatcagcgaggtgctgtctgagatgacaggcaacaacgtgggctacacctttgaggtgattggccacctggagaccatgattgatgccctggccagctgccacatgaactacggcacctctgtggtggtgggcgtgcccccatctgccaagatgctgacctatgaccccatgctgctcttcaccggccgcacctggaagggctgtgtgtttggaggcctgaagagcagagatgatgtgcccaagctggtgacagagttcctggccaagaagtttgacctggaccagctgatcacccacgtgctgcccttcaagaagatcagcgagggctttgagctgctgaacagcggccagagcatcagaacagtgctgaccttctag

SEQ ID NO: 143171 - DNA, 1185 bp, synthetic construct
  misc_feature 1..1185: note = Description of Artificial Sequence: Synthetic coding sequence
  source 1..1185: mol_type = other DNA
atgaagtgcctggtgagccgccacacagtgcgggagaccctggacatggtgttccagaggatgtctgtggaggccggggtcatcaagtgcaaggctgctgtgctgtgggagcagaagcagcccttcagcattgaggagattgaggtggccccacccaagaccaaggaggtgcgcatcaagatcctggccaccggcatctgcaggacagatgaccacgtgatcaagggcaccatggtgtccaagtttcctgtgattgtgggccacgaggccactggaattgtggagagcattggagagggcgtgaccaccgtgaagccaggggacaaggtgatccccctcttcctgccccagtgccgggagtgcaatgcctgcagaaatccagatggcaacctgtgcatccgcagtgacatcaccggccggggcgtgctggctgatggcaccacccgcttcacctgcaagggcaagcctgtgcaccacttcatgaacaccagcaccttcacagagtacacagtggtggatgagagctctgtggccaagattgatgatgctgcccctcctgagaaggtgtgcctgattggctgcggcttcagcacaggctacggggctgctgtgaagacaggcaaggtgaagccaggcagcacctgtgtggtgtttggcctgggcggcgtgggcctgagcgtcatcatgggctgcaagtctgctggggccagccgcatcatcggcatcgacctgaacaaggacaagtttgagaaggccatggctgtgggcgccacagagtgcatcagccccaaggacagcaccaagcccatcagcgaggtgctgtctgagatgacaggcaacaacgtgggctacacctttgaggtgattggccacctggagaccatgattgatgccctggccagctgccacatgaactacggcacctctgtggtggtgggcgtgcccccatctgccaagatgctgacctatgaccccatgctgctcttcaccggccgcacctggaagggctgtgtgtttggaggcctgaagagcagagatgatgtgcccaagctggtgacagagttcctggccaagaagtttgacctggaccagctgatcacccacgtgctgcccttcaagaagatcagcgagggctttgagctgctgaacagcggccagagcatcagaacagtgctgaccttctag

SEQ ID NO: 143172 - DNA, 954 bp, synthetic construct
  misc_feature 1..954: note = Description of Artificial Sequence: Synthetic coding sequence
  source 1..954: mol_type = other DNA
atggtgtccaagtttcctgtgattgtgggccacgaggccaccggcatcgtggagagcatcggggagggcgtgaccaccgtgaagccaggggacaaggtgatccccctcttcctgccccagtgcagagaatgtaatgcctgcaggaacccagatggcaacctgtgcatccgcagtgacatcaccggccggggcgtgctggctgatggcaccacccgcttcacctgcaagggcaagcctgtgcaccacttcatgaacaccagcaccttcacagagtacacagtggtggatgagagctctgtggccaagattgatgatgctgcccctcctgagaaggtgtgcctgattggctgcggcttcagcacaggctatggagctgctgtgaagacaggcaaggtgaagccaggcagcacctgtgtggtgtttggcctgggcggcgtgggcctgagcgtcatcatgggctgcaagtctgctggggccagccgcatcattggaattgacctgaacaaggacaagtttgagaaggccatggctgtgggcgccacagagtgcatcagccccaaggacagcaccaagcccatcagcgaggtgctgtctgagatgactggaaacaacgtgggctacacctttgaagtcatcggccacctggagaccatgattgatgccctggccagctgccacatgaactacggcacctctgtggtggtgggcgtgccccccagcgccaagatgctgacctatgaccccatgctgctcttcaccggccgcacctggaagggctgtgtgtttggaggcctgaagagcagagatgatgtgcccaagctggtgacagagttcctggccaagaagtttgacctggaccagctgatcacccacgtgctgcccttcaagaagatcagcgagggctttgagctgctgaacagcggccagagcatcagaacagtgctgaccttctag

SEQ ID NO: 143173 - DNA, 912 bp, synthetic construct
  misc_feature 1..912: note = Description of Artificial Sequence: Synthetic coding sequence
  source 1..912: mol_type = other DNA
atggctgctgctgcccgggcccgggtggcctacctgctgcggcagctgcagagagctgcctgccagtgccccacccacagccacacctacagccaggcccctggcctgagccccagcggcaagaccacagattatgcctttgagatggctgtgagcaacatccgctacggggctgctgtgaccaaggaggtgggcatggacctgaagaacatgggcgccaagaatgtgtgcctgatgacagacaagaacctgagcaagctgccccctgtgcaggtggccatggacagcctggtgaagaatggcatccccttcaccgtgtatgacaacgtgcgggtggagcccacagacagcagcttcatggaggccattgaatttgcccagaagggggcctttgatgcctacgtggccgtgggcggcggcagcaccatggacacctgcaaggccgccaacctgtatgccagcagcccccacagcgacttcctggactatgtgtctgcccccatcggcaagggcaagcctgtgtctgtgcccctgaagcccctgattgctgtgcccaccaccagcggcaccggcagcgagaccactggagtggccatctttgattatgagcacctgaaggtgaagattggcatcaccagccgggccatcaagcccaccctgggcctgattgaccccctgcacaccctgcacatgcctgcccgggtggtggccaacagcggctttgatgtgctgtgccacgccctggagagctacaccaccctgccctaccacctgcggagcccctgccccagcaaccccatcaccaggcctgcctaccagggcagcaaccccatcagtgacatctgggccatccacgccctgagaattgtggccaagtacctgaagagagctgtgaacagcacagacaagtag

SEQ ID NO: 143174 - DNA, 1404 bp, synthetic construct
  misc_feature 1..1404: note = Description of Artificial Sequence: Synthetic coding sequence
  source 1..1404: mol_type = other DNA
atggctgctgctgcccgggcccgggtggcctacctgctgcggcagctgcagagagctgcctgccagtgccccacccacagccacacctacagccaggcccctggcctgagccccagcggcaagaccacagattatgcctttgagatggctgtgagcaacatccgctacggggctgctgtgaccaaggaggtgggcatggacctgaagaacatgggcgccaagaatgtgtgcctgatgacagacaagaacctgagcaagctgccccctgtgcaggtggccatggacagcctggtgaagaatggcatccccttcaccgtgtatgacaacgtgcgggtggagcccacagacagcagcttcatggaggccattgaatttgcccagaagggggcctttgatgcctacgtggccgtgggcggcggcagcaccatggacacctgcaaggccgccaacctgtatgccagcagcccccacagcgacttcctggactatgtgtctgcccccatcggcaagggcaagcctgtgtctgtgcccctgaagcccctgattgctgtgcccaccaccagcggcaccggcagcgagaccactggagtggccatctttgattatgagcacctgaaggtgaagattggcatcaccagccgggccatcaagcccaccctgggcctgattgaccccctgcacaccctgcacatgcctgcccgggtggtggccaacagcggctttgatgtgctgtgccacgccctggagagctacaccaccctgccctaccacctgcggagcccctgccccagcaaccccatcaccaggcctgcctaccagggcagcaaccccatcagtgacatctgggccatccacgccctgagaattgtggccaagtacctgaagagagctgtgagaaatccagatgacctggaggcccggagccacatgcacctggccagcgcctttgctggcattggatttggaaatgctggggtgcacctgtgccacggcatgagctaccccatcagcggcctggtgaagatgtacaaggccaaggactacaacgtggaccaccccctggtgccccacggcctgtctgtggtgctgaccagccctgctgtgttcaccttcaccgcccagatgtttcctgagcggcacctggagatggccgagatcctgggcgctgacaccaggacagcccgcatccaggatgctggcctggtgctggccgacaccctgaggaagttcctgtttgacctggatgtggatgatggcctggccgctgtgggctacagcaaggctgacatcccagccctggtgaagggcaccctgccccaggagcgggtgaccaagctggccccctgcccccagagcgaggaggacctggccgccctgtttgaggcctccatgaagctgtactag

SEQ ID NO: 143175 - DNA, 2406 bp, synthetic construct
  misc_feature 1..2406: note = Description of Artificial Sequence: Synthetic coding sequence
  source 1..2406: mol_type = other DNA
atgaagattgctgtgattggccagagcctgtttggccaggaggtgtactgccacctgaggaaggagggccacgaggtggtgggcgtcttcaccgtgcctgacaaggatggcaaggctgaccccctgggcctggaggccgagaaggatggagtgcctgtgttcaagtacagccgctggagggccaagggccaggccctgcctgatgtggtggccaagtaccaggccctgggcgctgagctgaatgtgctgcccttctgcagccagttcatccccatggagatcatcagcgcccccaggcatggcagcatcatctaccaccccagcctgctgcccaggcacagaggagccagcgccatccacaactggatcagaggaaatgacaaggtgcctggggcctggacagaggcctgtgagcagaagctgaccttcttcaacagcaccctgaacaccagcggcctggtgcctgaaggagatgccctgcccatccctggggcccacaggcctggggtggtgaccaaggccggcctcatcctgtttggaaatgatgacaagatgctgctggtgaagaacatccagctggaggatggcaagatgatcctggccagcaacttcttcaagggggccgccagctctgtgctggagctgacagaggccgagctggtgacagctgaggccgtgcgctctgtgtggcagaggatcctgcccaaggtgctggaggtggaggacagcacagacttcttcaagtctggagctgcctctgtggatgtggtgcggctggtggaggaggtgaaggagctgtgtgatggcctggagctggagaatgaagatgtgtacatggccagcacctttggagacttcatccagctgctggtgaggaagctgcggggagatgatgaggagggggagtgcagcattgattatgtggagatggctgtgaacaagaggacagtgaggatgccccaccagctgttcatcggcggggagtttgtggatgctgagggcgccaagaccagcgagaccatcaaccccacagatggcagcgtcatctgccaggtgtccctggcccaggtgacagatgtggacaaggctgtggccgccgccaaggatgcctttgaaaatggccgctggggcaagatcagcgcccgggaccggggccgcctgatgtaccgcctggccgacctgatggagcagcaccaggaggagctggccaccatcgaggccctggatgctggagctgtgtacaccctggccctgaagacccacgtgggcatgagcatccagaccttccgctactttgctggctggtgtgacaagatccagggcagcaccatccccatcaaccaggcccggcccaacagaaacctgaccctgaccaggaaggagcctgtgggcgtgtgtggcatcatcatcccctggaactaccccctgatgatgctgtcctggaagacagctgcctgcctggccgccggcaacacagtggtgatcaagccagcccaggtgacccccctgacagccctgaagtttgctgagctgaccctgaaggccggcatccccaagggcgtggtgaatgtgctgcccggcagcggcagcctggtgggccagaggctgagtgaccacccagatgtgaggaagattggcttcaccggcagcacagaggtgggcaagcacatcatgaagagctgtgccatcagcaatgtgaagaaggtgtccctggagctgggcggcaagagccccctcatcatctttgctgactgtgacctgaacaaggctgtgcagatgggcatgagctctgtgttcttcaacaagggggagaactgcatcgctgctggccgcctgtttgtggaggacagcatccatgatgaatttgtgcggcgggtggtggaggaggtgaggaagatgaaggtgggcaaccccctggaccgggacacagaccacggcccccagaaccaccacgcccacctggtgaagctgatggagtactgccagcacggcgtgaaggagggcgccaccctggtgtgtggcggcaaccaggtgcccaggcctggcttcttctttgagcccaccgtcttcacagatgtggaggaccacatgtttattgccaaggaggagagctttggacctgtgatgatcatcagcagatttgctgatggagacctggatgctgtgctgagccgggccaatgccacagaatttggcctggccagcggggtcttcacccgggacatcaacaaggccctgtatgtgtctgacaagctgcaggccggcaccgtgtttgtgaacacctacaacaagacagatgtggccgccccctttggaggcttcaagcagagcggctttgggaaggacctgggggaggccgccctgaatgagtacctgcgggtgaagacagtgacctttgagtactag

SEQ ID NO: 143176 - DNA, 1506 bp, synthetic construct
  misc_feature 1..1506: note = Description of Artificial Sequence: Synthetic coding sequence
  source 1..1506: mol_type = other DNA
atgagcagcagcggcaccccagacctgcctgtgctgctgacagacctgaagatccagtacaccaagatcttcatcaacaatgagtggcatgacagcgtgtctgggaagaagtttcctgtgttcaacccagccacagaggaggagctgtgccaggtggaggagggggacaaggaggatgtggacaaggctgtgaaggccgcccggcaggccttccagatcggcagcccctggaggaccatggatgccagcgagcggggccgcctgctgtacaagctggccgacctgattgaaagagaccggctgctgctggccaccatggagagcatgaatggaggcaagctgtacagcaatgcctacctgaatgacctggccggctgcatcaagaccctgcgctactgtgccggctgggccgacaagatccagggccgcaccatccccattgatggcaacttcttcacctacaccaggcatgagcccatcggcgtgtgtggccagatcatcccctggaacttccccctggtgatgctgatctggaagattggccctgccctgagctgtggcaacacagtggtggtgaagccagctgagcagacccccctgacagccctgcacgtggccagcctcatcaaggaggccggcttccccccaggagtggtgaacatcgtgcccggctacggccccacagctggagctgccatcagcagccacatggacatcgacaaggtggccttcaccggcagcacagaggtgggcaagctgatcaaggaggccgccggcaagagcaacctgaagagggtgaccctggagctgggcggcaagagcccctgcatcgtgctggctgatgctgacctggacaatgctgtggagtttgcccaccacggcgtcttctaccaccagggccagtgctgcatcgccgccagccgcatctttgtggaggagagcatctatgatgaatttgtgagaagatctgtggagcgggccaagaagtacatcctgggcaaccccctgaccccaggagtgacccagggcccccagattgacaaggagcagtatgacaagatcctggacctgattgagagcggcaagaaggagggcgccaagctggagtgtggcggcggcccctggggcaacaagggctactttgtgcagcccaccgtcttcagcaatgtgacagatgagatgagaattgccaaggaggagatcttcggccctgtgcagcagatcatgaagttcaagagcctggatgatgtgatcaagagggccaacaacaccttctacggcctgtctgctggggtcttcaccaaggacatcgacaaggccatcaccatcagcagcgccctgcaggccggcaccgtgtgggtgaactgctatggagtggtgtctgcccagtgcccctttggaggcttcaagatgtctggaaatggccgggagctgggggagtatggcttccacgagtacacagaggtgaagacagtgacagtgaagatcagccagaagaacagctag

SEQ ID NO: 143177 - DNA, 693 bp, synthetic construct
  misc_feature 1..693: note = Description of Artificial Sequence: Synthetic coding sequence
  source 1..693: mol_type = other DNA
atgagcagcagcggcaccccagacctgcctgtgctgctgacagacctgaagatccagtacaccaagatcttcatcaacaatgagtggcatgacagcgtgtctgggaagaagtttcctgtgttcaacccagccacagaggaggagctgtgccaggtggaggagggggacaaggaggatgtggacaaggctgtgaaggccgcccggcaggccttccagatcggcagcccctggaggaccatggatgccagcgagcggggccgcctgctgtacaagctggccgacctgattgaaagagaccggctgctgctggccaccatggagagcatgaatggaggcaagctgtacagcaatgcctacctgaatgacctggccggctgcatcaagaccctgcgctactgtgccggctgggccgacaagatccagggccgcaccatccccattgatggcaacttcttcacctacaccaggcatgagcccatcggcgtgtgtggccagatcatcccctggaacttccccctggtgatgctgatctggaagattggccctgccctgagctgtggcaacacagtggtggtgaagccagctgagcagacccccctgacagccctgcacgtggccagcctcatcaaggaggccggcttccccccaggagtggtgaacatcgtgcccggctatggagcctctgtggtgtag

SEQ ID NO: 143178 - DNA, 717 bp, synthetic construct
  misc_feature 1..717: note = Description of Artificial Sequence: Synthetic coding sequence
  source 1..717: mol_type = other DNA
atgagcagcagcggcaccccagacctgcctgtgctgctgacagacctgaagatccagtacaccaagatcttcatcaacaatgagtggcatgacagcgtgtctgggaagaagtttcctgtgttcaacccagccacagaggaggagctgtgccaggtggaggagggggacaaggaggatgtggacaaggctgtgaaggccgcccggcaggccttccagatcggcagcccctggaggaccatggatgccagcgagcggggccgcctgctgtacaagctggccgacctgattgaaagagaccggctgctgctggccaccatggagagcatgaatggaggcaagctgtacagcaatgcctacctgaatgacctggccggctgcatcaagaccctgcgctactgtgccggctgggccgacaagatccagggccgcaccatccccattgatggcaacttcttcacctacaccaggcatgagcccatcggcgtgtgtggccagatcatcccctggaacttccccctggtgatgctgatctggaagattggccctgccctgagctgtggcaacacagtggtggtgaagccagctgagcagacccccctgacagccctgcacgtggccagcctcatcaaggaggccggcttccccccaggagtggtgaacatcgtgcccggctacggccccacagctggagctgccatcagcagccacatggactag

SEQ ID NO: 143179 - DNA, 990 bp, synthetic construct
  misc_feature 1..990: note = Description of Artificial Sequence: Synthetic coding sequence
  source 1..990: mol_type = other DNA
attgctgagcctgtgacctgtgtgcctggagctgagagcgagatgagcagcagcggcaccccagacctgcctgtgctgctgacagacctgaagatccagtacaccaagatcttcatcaacaatgagtggcatgacagcgtgtctgggaagaagtttcctgtgttcaacccagccacagaggaggagctgtgccaggtggaggagggggacaaggaggatgtggacaaggctgtgaaggccgcccggcaggccttccagatcggcagcccctggaggaccatggatgccagcgagcggggccgcctgctgtacaagctggccgacctgattgaaagagaccggctgctgctggccaccatggagagcatgaatggaggcaagctgtacagcaatgcctacctgaatgacctggccggctgcatcaagaccctgcgctactgtgccggctgggccgacaagatccagggccgcaccatccccattgatggcaacttcttcacctacaccaggcatgagcccatcggcgtgtgtggccagatcatcccctggaacttccccctggtgatgctgatctggaagattggccctgccctgagctgtggcaacacagtggtggtgaagccagctgagcagacccccctgacagccctgcacgtggccagcctcatcaaggaggccggcttccccccaggagtggtgaacatcgtgcccggctacggccccacagctggagctgccatcagcagccacatggacatcgacaaggtggccttcaccggcagcacagaggtgggcaagctgatcaaggaggccgccggcaagagcaacctgaagagggtgaccctggagctgggcggcaagagcccctgcatcgtgctggctgatgctgacctggacaatgctgtggagtttgcccaccacggcgtcttctaccaccagggccagtgctgcatcgccgccagccgcttctgtggccgcatcaacctgtag

SEQ ID NO: 143180 - DNA, 612 bp, synthetic construct
  misc_feature 1..612: note = Description of Artificial Sequence: Synthetic coding sequence
  source 1..612: mol_type = other DNA
atgagcagcagcggcaccccagacctgcctgtgctgctgacagacctgaagatccagtacaccaagatcttcatcaacaatgagtggcatgacagcgtgtctgggaagaagtttcctgtgttcaacccagccacagaggaggagctgtgccaggtggaggagggggacaaggaggatgtggacaaggctgtgaaggccgcccggcaggccttccagatcggcagcccctggaggaccatggatgccagcgagcggggccgcctgctgtacaagctggccgacctgattgaaagagaccggctgctgctggccaccatggagagcatgaatggaggcaagctgtacagcaatgcctacctgaatgacctggccggctgcatcaagaccctgcgctactgtgccggctgggccgacaagatccagggccgcaccatccccattgatggcaacttcttcacctacaccaggcatgagcccatcggcgtgtgtggccagatcatcccctggaacttccccctggtgatgctgatctggaagattggccctgccctgagctgtggcaacacagtggtggtgaagccagctgagcagacccccctgacagccctgtag

SEQ ID NO: 143181 - DNA, 1557 bp, synthetic construct
  misc_feature 1..1557: note = Description of Artificial Sequence: Synthetic coding sequence
  source 1..1557: mol_type = other DNA
atgaccagcagcaagattgagatgcctggagaggtgaaggctgaccctgctgccctgatggccagcctgcacctgctgcccagccccacccccaacctggagatcaagtacaccaagatcttcatcaacaatgagtggcagaacagcgagagcggccgggtcttccctgtgtacaacccagccaccggggagcaggtgtgtgaggtgcaggaggccgacaaggctgacatcgacaaggctgtgcaggccgcccggctggccttcagcctgggctctgtgtggaggaggatggatgccagcgagcggggccgcctgctggacaagctggccgacctggtggagcgggacagagctgtgctggccaccatggagagcctgaatggaggcaagcccttcctgcaggccttctacgtggacctgcagggcgtcatcaagaccttccgctactatgccggctgggccgacaagatccacggcatgaccatccctgtggatggagactacttcaccttcaccaggcatgagcccatcggcgtgtgtggccagatcatcccctggaacttccccctgctgatgtttgcctggaagatcgccccagccctgtgctgcggcaacacagtggtgatcaagccagctgagcagacccccctgagcgccctgtacatgggcgccctgatcaaggaggccggcttccccccaggagtcatcaacatcctgcccggctacggccccacagctggggccgccatcgccagccacatcggcatcgacaagatcgccttcaccggcagcacagaggtgggcaagctgatccaggaggccgccggccgcagcaacctgaagagggtgaccctggagctgggcggcaagagccccaacatcatctttgctgatgctgacctggactatgctgtggagcaggcccaccagggcgtcttcttcaaccagggccagtgctgcacagctggcagccgcatctttgtggaggagagcatctatgaggagtttgtgcggcgctctgtggagcgggccaagagaagagtggtgggcagcccctttgaccccaccacagagcagggcccccagattgacaagaagcagtacaacaagatcctggagctgatccagagcggcgtggccgagggcgccaagctggagtgtggcggcaagggcctgggcaggaagggcttcttcatcgagcccaccgtcttcagcaatgtgacagatgacatgagaattgccaaggaggagatctttggacctgtgcaggagatcctgcgcttcaagaccatggatgaggtgattgagcgggccaacaacagcgactttggcctggtggccgctgtgttcaccaatgacatcaacaaggccctgactgtgagcagcgccatgcaggccggcaccgtgtggatcaactgctacaatgccctgaatgcccagagcccctttggaggcttcaagatgtctggaaatggccgggagatgggagaatttggcctgcgggagtacagcgaggtgaagacagtgacagtgaagatcccccagaagaacagctag

SEQ ID NO: 143182 - DNA, 1443 bp, synthetic construct
  misc_feature 1..1443: note = Description of Artificial Sequence: Synthetic coding sequence
  source 1..1443: mol_type = other DNA
atgaccagcagcaagattgagatgcctggagaggtgaaggctgaccctgctgccctgatggccagcctgcacctgctgcccagccccacccccaacctggagatcaagtacaccaagatcttcatcaacaatgagtggcagaacagcgagagcggccgggtcttccctgtgtacaacccagccaccggggagcaggtgtgtgaggtgcaggaggccgacaaggctgacatcgacaaggctgtgcaggccgcccggctggccttcagcctgggctctgtgtggaggaggatggatgccagcgagcggggccgcctgctggacaagctggccgacctggtggagcgggacagagctgtgctggccaccatggagagcctgaatggaggcaagcccttcctgcaggccttctacgtggacctgcagggcgtcatcaagaccttccgctactatgccggctgggccgacaagatccacggcatgaccatccctgtggatggagactacttcaccttcaccaggcatgagcccatcggcgtgtgtggccagatcatcccctggaacttccccctgctgatgtttgcctggaagatcgccccagccctgtgctgcggcaacacagtggtgatcaagccagctgagcagacccccctgagcgccctgtacatgggcgccctgatcaaggaggtgggcaagctgatccaggaggccgccggccgcagcaacctgaagagggtgaccctggagctgggcggcaagagccccaacatcatctttgctgatgctgacctggactatgctgtggagcaggcccaccagggcgtcttcttcaaccagggccagtgctgcacagctggcagccgcatctttgtggaggagagcatctatgaggagtttgtgcggcgctctgtggagcgggccaagagaagagtggtgggcagcccctttgaccccaccacagagcagggcccccagattgacaagaagcagtacaacaagatcctggagctgatccagagcggcgtggccgagggcgccaagctggagtgtggcggcaagggcctgggcaggaagggcttcttcatcgagcccaccgtcttcagcaatgtgacagatgacatgagaattgccaaggaggagatctttggacctgtgcaggagatcctgcgcttcaagaccatggatgaggtgattgagcgggccaacaacagcgactttggcctggtggccgctgtgttcaccaatgacatcaacaaggccctgactgtgagcagcgccatgcaggccggcaccgtgtggatcaactgctacaatgccctgaatgcccagagcccctttggaggcttcaagatgtctggaaatggccgggagatgggagaatttggcctgcgggagtacagcgaggtgaagacagtgacagtgaagatcccccagaagaacagctag

SEQ ID NO: 143183 - DNA, 1494 bp, synthetic construct
  misc_feature 1..1494: note = Description of Artificial Sequence: Synthetic coding sequence
  source 1..1494: mol_type = other DNA
atgaagaaccagtgtgaaacagtgtggctgaagagccccatcaagctgaagctgatcttcatcaacaatgagtggcagaacagcgagagcggccgggtcttccctgtgtacaacccagccactggagagcaggtgtgtgaggtgcaggaggccgacaaggctgacatcgacaaggctgtgcaggccgcccggctggccttcagcctgggctctgtgtggaggaggatggatgccagcgagcggggccgcctgctggacaagctggccgacctggtggagcgggacagagctgtgctggccaccatggagagcctgaatggaggcaagcccttcctgcaggccttctacgtggacctgcagggcgtcatcaagaccttccgctactatgccggctgggccgacaagatccacggcatgaccatccctgtggatggagactacttcaccttcaccaggcatgagcccatcggcgtgtgtggccagatcatcccctggaacttccccctgctgatgtttgcctggaagatcgccccagccctgtgctgcggcaacacagtggtgatcaagccagctgagcagacccccctgagcgccctgtacatgggcgccctgatcaaggaggccggcttccccccaggagtcatcaacatcctgcccggctacggccccacagctggagctgccatcgccagccacatcggcatcgacaagatcgccttcaccggcagcacagaggtgggcaagctgatccaggaggccgccggccgcagcaacctgaagagggtgaccctggagctgggcggcaagagccccaacatcatctttgctgatgctgacctggactatgctgtggagcaggcccaccagggcgtcttcttcaaccagggccagtgctgcacagctggcagccgcatctttgtggaggagagcatctatgaggagtttgtgagaagatctgtggagcgggccaagagaagagtggtgggcagcccctttgaccccaccacagagcagggcccccagattgacaagaagcagtacaacaagatcctggagctgatccagagcggcgtggccgagggcgccaagctggagtgtggcggcaagggcctgggcaggaagggcttcttcatcgagcccaccgtcttcagcaatgtgacagatgacatgagaattgccaaggaggagatcttcggccctgtgcaggagatcctgcgcttcaagaccatggatgaagtcatcgagcgggccaacaacagcgactttggcctggtggccgctgtgttcaccaatgacatcaacaaggccctgactgtgtcctctgccatgcaggccggcaccgtgtggatcaactgctacaatgccctgaatgcccagagcccctttggaggcttcaagatgtctggaaatggccgggagatgggagaatttggcctgcgggagtacagcgaggtgaagacagtgacagtgaagatcccccagaagaacagctag

SEQ ID NO: 143184 - DNA, 1470 bp, synthetic construct
  misc_feature 1..1470: note = Description of Artificial Sequence: Synthetic coding sequence
  source 1..1470: mol_type = other DNA
atgaagggcaagaactgcaatgatgtgaagatcttcatcaacaatgagtggcagaacagcgagagcggccgggtcttccctgtgtacaacccagccactggagagcaggtgtgtgaggtgcaggaggccgacaaggctgacatcgacaaggctgtgcaggccgcccggctggccttcagcctgggctctgtgtggaggaggatggatgccagcgagcggggccgcctgctggacaagctggccgacctggtggagcgggacagagctgtgctggccaccatggagagcctgaatggaggcaagcccttcctgcaggccttctacgtggacctgcagggcgtcatcaagaccttccgctactatgccggctgggccgacaagatccacggcatgaccatccctgtggatggagactacttcaccttcaccaggcatgagcccatcggcgtgtgtggccagatcatcccctggaacttccccctgctgatgtttgcctggaagatcgccccagccctgtgctgcggcaacacagtggtgatcaagccagctgagcagacccccctgagcgccctgtacatgggcgccctgatcaaggaggccggcttccccccaggagtcatcaacatcctgcccggctacggccccacagctggagctgccatcgccagccacatcggcatcgacaagatcgccttcaccggcagcacagaggtgggcaagctgatccaggaggccgccggccgcagcaacctgaagagggtgaccctggagctgggcggcaagagccccaacatcatctttgctgatgctgacctggactatgctgtggagcaggcccaccagggcgtcttcttcaaccagggccagtgctgcacagctggcagccgcatctttgtggaggagagcatctatgaggagtttgtgagaagatctgtggagcgggccaagagaagagtggtgggcagcccctttgaccccaccacagagcagggcccccagattgacaagaagcagtacaacaagatcctggagctgatccagagcggcgtggccgagggcgccaagctggagtgtggcggcaagggcctgggcaggaagggcttcttcatcgagcccaccgtcttcagcaatgtgacagatgacatgagaattgccaaggaggagatcttcggccctgtgcaggagatcctgcgcttcaagaccatggatgaagtcatcgagcgggccaacaacagcgactttggcctggtggccgctgtgttcaccaatgacatcaacaaggccctgactgtgtcctctgccatgcaggccggcaccgtgtggatcaactgctacaatgccctgaatgcccagagcccctttggaggcttcaagatgtctggaaatggccgggagatgggagaatttggcctgcgggagtacagcgaggtgaagacagtgacagtgaagatcccccagaagaacagctag

SEQ ID NO: 143185 - DNA, 30 bp, synthetic construct
  misc_feature 1..30: note = Description of Artificial Sequence: Synthetic coding sequence
  source 1..30: mol_type = other DNA
atggatgccagcgagcggggccgcctgtag

SEQ ID NO: 143186 - DNA, 1470 bp, synthetic construct
  misc_feature 1..1470: note = Description of Artificial Sequence: Synthetic coding sequence
  source 1..1470: mol_type = other DNA
atgaagggcaggaactggaagaccaccaagatcttcatcaacaatgagtggcagaacagcgagagcggccgggtcttccctgtgtacaacccagccactggagagcaggtgtgtgaggtgcaggaggccgacaaggctgacatcgacaaggctgtgcaggccgcccggctggccttcagcctgggctctgtgtggaggaggatggatgccagcgagcggggccgcctgctggacaagctggccgacctggtggagcgggacagagctgtgctggccaccatggagagcctgaatggaggcaagcccttcctgcaggccttctacgtggacctgcagggcgtcatcaagaccttccgctactatgccggctgggccgacaagatccacggcatgaccatccctgtggatggagactacttcaccttcaccaggcatgagcccatcggcgtgtgtggccagatcatcccctggaacttccccctgctgatgtttgcctggaagatcgccccagccctgtgctgcggcaacacagtggtgatcaagccagctgagcagacccccctgagcgccctgtacatgggcgccctgatcaaggaggccggcttccccccaggagtcatcaacatcctgcccggctacggccccacagctggagctgccatcgccagccacatcggcatcgacaagatcgccttcaccggcagcacagaggtgggcaagctgatccaggaggccgccggccgcagcaacctgaagagggtgaccctggagctgggcggcaagagccccaacatcatctttgctgatgctgacctggactatgctgtggagcaggcccaccagggcgtcttcttcaaccagggccagtgctgcacagctggcagccgcatctttgtggaggagagcatctatgaggagtttgtgagaagatctgtggagcgggccaagagaagagtggtgggcagcccctttgaccccaccacagagcagggcccccagattgacaagaagcagtacaacaagatcctggagctgatccagagcggcgtggccgagggcgccaagctggagtgtggcggcaagggcctgggcaggaagggcttcttcatcgagcccaccgtcttcagcaatgtgacagatgacatgagaattgccaaggaggagatcttcggccctgtgcaggagatcctgcgcttcaagaccatggatgaagtcatcgagcgggccaacaacagcgactttggcctggtggccgctgtgttcaccaatgacatcaacaaggccctgactgtgtcctctgccatgcaggccggcaccgtgtggatcaactgctacaatgccctgaatgcccagagcccctttggaggcttcaagatgtctggaaatggccgggagatgggagaatttggcctgcgggagtacagcgaggtgaagacagtgacagtgaagatcccccagaagaacagctag

SEQ ID NO: 143187 - DNA, 78 bp, synthetic construct
  misc_feature 1..78: note = Description of Artificial Sequence: Synthetic coding sequence
  source 1..78: mol_type = other DNA
atggatgccagcgagcggggccgcctgctggacaagctggccgacctggtggagcgggacagagctgtgctggcctag

SEQ ID NO: 143188 - DNA, 1269 bp, synthetic construct
  misc_feature 1..1269: note = Description of Artificial Sequence: Synthetic coding sequence
  source 1..1269: mol_type = other DNA
atggatgccagcgagcggggccgcctgctggacaagctggccgacctggtggagcgggacagagctgtgctggccaccatggagagcctgaatggaggcaagcccttcctgcaggccttctacgtggacctgcagggcgtcatcaagaccttccgctactatgccggctgggccgacaagatccacggcatgaccatccctgtggatggagactacttcaccttcaccaggcatgagcccatcggcgtgtgtggccagatcatcccctggaacttccccctgctgatgtttgcctggaagatcgccccagccctgtgctgcggcaacacagtggtgatcaagccagctgagcagacccccctgagcgccctgtacatgggcgccctgatcaaggaggccggcttccccccaggagtcatcaacatcctgcccggctacggccccacagctggggccgccatcgccagccacatcggcatcgacaagatcgccttcaccggcagcacagaggtgggcaagctgatccaggaggccgccggccgcagcaacctgaagagggtgaccctggagctgggcggcaagagccccaacatcatctttgctgatgctgacctggactatgctgtggagcaggcccaccagggcgtcttcttcaaccagggccagtgctgcacagctggcagccgcatctttgtggaggagagcatctatgaggagtttgtgcggcgctctgtggagcgggccaagagaagagtggtgggcagcccctttgaccccaccacagagcagggcccccagattgacaagaagcagtacaacaagatcctggagctgatccagagcggcgtggccgagggcgccaagctggagtgtggcggcaagggcctgggcaggaagggcttcttcatcgagcccaccgtcttcagcaatgtgacagatgacatgagaattgccaaggaggagatctttggacctgtgcaggagatcctgcgcttcaagaccatggatgaggtgattgagcgggccaacaacagcgactttggcctggtggccgctgtgttcaccaatgacatcaacaaggccctgactgtgagcagcgccatgcaggccggcaccgtgtggatcaactgctacaatgccctgaatgcccagagcccctttggaggcttcaagatgtctggaaatggccgggagatgggagaatttggcctgcgggagtacagcgaggtgaagacagtgacagtgaagatcccccagaagaacagctag

SEQ ID NO: 143189 - DNA, 258 bp, synthetic construct
  misc_feature 1..258: note = Description of Artificial Sequence: Synthetic coding sequence
  source 1..258: mol_type = other DNA
atggatgccagcgagcggggccgcctgctggacaagctggccgacctggtggagcgggacagagctgtgctggccaccatggagagcctgaatggaggcaagcccttcctgcaggccttctacgtggacctgcagggcgtcatcaagaccttccgctactatgccggctgggccgacaagatccacggcatgaccatccctgtggatggagactacttcaccttcaccaggcatgagcccatcggcgtgtgtggctag

SEQ ID NO: 143190 - DNA, 1539 bp, synthetic construct
  misc_feature 1..1539: note = Description of Artificial Sequence: Synthetic coding sequence
  source 1..1539: mol_type = other DNA
atggccacagccaatggagctgtggagaatggccagcctgacaggaagcccccagccctgccccggcccatccggaacctggaggtgaagttcaccaagatcttcatcaacaatgagtggcatgagagcaagagcggcaagaagtttgccacctgcaaccccagcacccgggagcagatctgtgaggtggaggagggggacaagccagatgtggacaaggctgtggaggccgcccaggtggccttccagaggggcagcccctggaggcggctggatgccctgagccggggccgcctgctgcaccagctggccgacctggtggagcgggaccgggccaccctggccgccctggagaccatggacaccgggaagcccttcctgcacgccttcttcatcgacctggagggctgcatccgcaccctgcgctactttgctggctgggccgacaagatccagggcaagaccatccccacagatgacaacgtggtgtgcttcaccaggcatgagcccatcggcgtgtgtggggccatcaccccctggaacttccccctgctgatgctggtgtggaagctggccccagccctgtgctgcggcaacaccatggtgctgaagccagctgagcagacccccctgacagccctgtacctgggcagcctcatcaaggaggccggcttccccccaggagtggtgaacatcgtgcccggcttcggccccaccgtgggcgccgccatcagcagccacccccagatcaacaagatcgccttcaccggcagcacagaggtgggcaagctggtgaaggaggccgccagccgcagcaacctgaagagggtgaccctggagctgggcggcaagaacccctgcatcgtgtgtgctgatgctgacctggacctggccgtggagtgtgcccaccagggcgtcttcttcaaccagggccagtgctgcacagctgccagccgggtgtttgtggaggagcaggtgtacagcgagtttgtgcggcgctctgtggagtatgccaagaagaggcctgtgggggacccctttgatgtgaagacagagcagggcccccagattgaccagaagcagtttgacaagatcctggagctgattgaaagtggcaagaaggagggcgccaagctggagtgtggcggcagcgccatggaggacaagggcctcttcatcaagcccaccgtcttcagcgaggtgacagacaacatgagaattgccaaggaggagatctttggacctgtgcagcccatcctgaagttcaagagcattgaggaggtgatcaagagggccaacagcacagattatggcctgacagctgctgtgttcaccaagaacctggacaaggccctgaagctggccagcgccctggagagcggcaccgtgtggatcaactgctacaatgccctgtatgcccaggccccctttggaggcttcaagatgtctggaaatggccgggagctgggggagtatgccctggccgagtacacagaggtgaagacagtgaccatcaagctgggggacaagaacccctag

SEQ ID NO: 143191 - DNA, 456 bp, synthetic construct
  misc_feature 1..456: note = Description of Artificial Sequence: Synthetic coding sequence
  source 1..456: mol_type = other DNA
atggccacagccaatggagctgtggagaatggccagcctgacaggaagcccccagccctgccccggcccatccggaacctggaggtgaagttcaccaagatcttcatcaacaatgagtggcatgagagcaagagcggcaagaagtttgccacctgcaaccccagcacccgggagcagatctgtgaggtggaggagggggacaagccagatgtggacaaggctgtggaggccgcccaggtggccttccagaggggcagcccctggaggcggctggatgccctgagccggggccgcctgctgcaccagctggccgacctggtggagcgggaccgggccaccctggccgccctggagaccatggacaccgggaagcccttcctgcacgccttcttcatcgacctggagggctgcatccgcaccctgcggctcatcaagagcagcagcaccaagagctag

SEQ ID NO: 143192 - DNA, 1554 bp, synthetic construct
  misc_feature 1..1554: note = Description of Artificial Sequence: Synthetic coding sequence
  source 1..1554: mol_type = other DNA
atgctgcgcttcctggccccccggctgctgagcctgcagggccgcacagcccgctacagcagcgctgctgccctgcccagccccatcctgaacccagacatcccctacaaccagctgttcatcaacaatgagtggcaggatgctgtgtccaagaagaccttccccaccgtgaaccccaccactggagaggtgattggacatgtggccgagggggacagagcagatgtggacagagctgtgaaggccgcccgggaggccttccggctgggcagcccctggaggaggatggatgccagcgagcggggccgcctgctgaaccggctggccgacctggtggagcgggacagagtgtacctggccagcctggagaccctggacaatggcaagcccttccaggagagctatgccctggacctggatgaggtgatcaaggtgtaccgctactttgctggctgggccgacaagtggcacggcaagaccatccccatggatggccagcacttctgcttcaccaggcatgagcctgtgggcgtgtgtggccagatcatcccctggaacttccccctggtgatgcagggctggaagctggccccagccctggccaccggcaacacagtggtgatgaaggtggccgagcagacccccctgagcgccctgtacctggccagcctcatcaaggaggccggcttccccccaggagtggtgaacatcatcaccggctacggccccacagctggagctgccatcgcccagcacgtggatgtggacaaggtggccttcaccggcagcacagaggtgggccacctgatccagaaggccgccggggacagcaacctgaagagggtgaccctggagctgggcggcaagagccccagcatcgtgctggctgatgctgacatggagcacgctgtggagcagtgccacgaggccctcttcttcaacatgggccagtgctgctgtgccggcagcaggacctttgtggaggagagcatctacaatgagttcctggagaggacagtggagaaggccaagcagaggaaggtgggcaacccctttgagctggacacccagcagggcccccaggtggacaaggagcagtttgagcgggtgctgggctacatccagctgggccagaaggagggcgccaagctgctgtgtggcggggagagatttggagagcggggcttcttcatcaagcccaccgtgtttggaggagtgcaggatgacatgagaattgccaaggaggagatcttcggccctgtgcagcccctcttcaagttcaagaagattgaggaggtggtggagcgggccaacaacaccaggtatggcctggccgctgctgtgttcacccgggacctggacaaggccatgtacttcacccaggccctgcaggccggcaccgtgtgggtgaacacctacaacatcgtgacctgccacaccccatttggaggcttcaaggagagcggaaatggccgggagctgggggaggatggcctgaaggcctacacagaggtgaagacagtgaccatcaaggtgccccagaagaacagctag

SEQ ID NO: 143193 - DNA, 657 bp, synthetic construct
  misc_feature 1..657: note = Description of Artificial Sequence: Synthetic coding sequence
  source 1..657: mol_type = other DNA
atggagcacgctgtggagcagtgccacgaggccctcttcttcaacatgggccagtgctgctgtgccggcagcaggacctttgtggaggagagcatctacaatgagttcctggagaggacagtggagaaggccaagcagaggaaggtgggcaacccctttgagctggacacccagcagggcccccaggtggacaaggagcagtttgagcgggtgctgggctacatccagctgggccagaaggagggcgccaagctgctgtgtggcggggagagatttggagagcggggcttcttcatcaagcccaccgtgtttggaggagtgcaggatgacatgagaattgccaaggaggagatctttggacctgtgcagcccctcttcaagttcaagaagattgaggaggtggtggagcgggccaacaacaccaggtatggcctggccgctgctgtgttcacccgggacctggacaaggccatgtacttcacccaggccctgcaggccggcaccgtgtgggtgaacacctacaacatcgtgacctgccacaccccatttggaggcttcaaggagagcggaaatggccgggagctgggagaagatggcctgaaggcctacacagaggtgaagacagtgaccatcaaggtgccccagaagaacagctag

SEQ ID NO: 143194 - DNA, 2739 bp, synthetic construct
  misc_feature 1..2739: note = Description of Artificial Sequence: Synthetic coding sequence
  source 1..2739: mol_type = other DNA
atggccggccccagcaaccccccagccaccatgaagattgctgtgattggccagagcctgtttggccaggaggtgtactgccacctgaggaaggagggccacgaggtggtgggcgtcttcaccgtgcctgacaaggatggcaaggctgaccccctgggcctggaggccgagaaggatggagtgcctgtgttcaagtacagccgctggagggccaagggccaggccctgcctgatgtggtggccaagtaccaggccctgggcgctgagctgaatgtgctgcccttctgcagccagttcatccccatggagatcatcagcgcccccaggcatggcagcatcatctaccaccccagcctgctgcccaggcacagaggagccagcgccatcaactggaccctcatccatggagacaagaagggcggcttcagcatcttctgggcagatgatggcctggacacaggagacctgctgctgcagaaggaatgtgaggtgctgcctgatgacacagtgtccaccctgtacaaccgcttcctgtttcctgagggcatcaagggcatggtgcaggccgtgcggctgattgctgagggcaaggccccccggctgccccagcctgaggagggcgccacctatgagggcatccagaagaaggagacagccaagatcaactgggaccagcctgctgaggccatccacaactggatcagaggaaatgacaaggtgcctggggcctggacagaggcctgtgagcagaagctgaccttcttcaacagcaccctgaacaccagcggcctggtgcctgaaggagatgccctgcccatccctggggcccacaggcctggggtggtgaccaaggccggcctcatcctgtttggaaatgatgacaagatgctgctggtgaagaacatccagctggaggatggcaagatgatcctggccagcaacttcttcaagggagctgccagctctgtgctggagctgacagaagctgagctggtgacagctgaggccgtgcgctctgtgtggcagaggatcctgcccaaggtgctggaggtggaggacagcacagacttcttcaagagcggggccgcctctgtggatgtggtgcggctggtggaggaggtgaaggagctgtgtgatggcctggagctggagaatgaagatgtgtacatggccagcaccttcggggacttcatccagctgctggtgaggaagctgcggggagatgatgaggagggagaatgttccattgattatgtggagatggctgtgaacaagaggacagtgaggatgccccaccagctgttcatcggcggggagtttgtggatgctgagggcgccaagaccagcgagaccatcaaccccacagatggcagcgtcatctgccaggtgtccctggcccaggtgacagatgtggacaaggctgtggccgccgccaaggatgcctttgaaaatggccgctggggcaagatcagcgcccgggaccggggccgcctgatgtaccgcctggccgacctgatggagcagcaccaggaggagctggccaccatcgaggccctggatgctggagctgtgtacaccctggccctgaagacccacgtgggcatgagcatccagaccttccgctactttgctggctggtgtgacaagatccagggcagcaccatccccatcaaccaggcccggcccaacagaaacctgaccctgaccaggaaggagcctgtgggcgtgtgtggcatcatcatcccctggaactaccccctgatgatgctgtcctggaagacagctgcctgcctggccgccggcaacacagtggtgatcaagccagcccaggtgacccccctgacagccctgaagtttgctgagctgaccctgaaggccggcatccccaagggcgtggtgaatgtgctgcccggcagcggcagcctggtgggccagaggctgagtgaccacccagatgtgaggaagattggcttcaccggcagcacagaggtgggcaagcacatcatgaagagctgtgccatcagcaatgtgaagaaggtgtccctggagctgggcggcaagagccccctcatcatctttgctgactgtgacctgaacaaggctgtgcagatgggcatgagcagcgtcttcttcaacaagggggagaactgcatcgccgccggccgcctgtttgtggaggacagcatccatgatgaatttgtgagaagagtggtggaggaggtgaggaagatgaaggtgggcaaccccctggaccgggacacagaccacggcccccagaaccaccacgcccacctggtgaagctgatggagtactgccagcacggcgtgaaggagggcgccaccctggtgtgtggcggcaaccaggtgccccggcccggcttcttctttgagcccaccgtcttcacagatgtggaggaccacatgttcatcgccaaggaggagagctttggacctgtgatgatcatcagcagatttgctgatggagacctggatgctgtgctgagccgggccaatgccacagaatttggcctggccagcggggtcttcacccgggacatcaacaaggccctgtatgtgtctgacaagctgcaggccggcaccgtgtttgtgaacacctacaacaagacagatgtggccgccccctttggaggcttcaagcagagcggctttgggaaggacctgggggaggccgccctgaatgagtacctgcgggtgaagacagtgacctttgagtactag

SEQ ID NO: 143195 - DNA, 1518 bp, synthetic construct
  misc_feature 1..1518: note = Description of Artificial Sequence: Synthetic coding sequence
  source 1..1518: mol_type = other DNA
atgaagattgctgtgattggccagagcctgtttggccaggaggtgtactgccacctgaggaaggagggccacgaggtggtgggcgtcttcaccgtgcctgacaaggatggcaaggctgaccccctgggcctggaggccgagaaggatggagtgcctgtgttcaagtacagccgctggagggccaagggccaggccctgcctgatgtggtggccaagtaccaggccctgggcgctgagctgaatgtgctgcccttctgcagccagttcatccccatggagatcatcagcgcccccaggcatggcagcatcatctaccaccccagcctgctgcccaggcacagaggagccagcgccatcaactggaccctcatccatggagacaagaagggcggcttcagcatcttctgggcagatgatggcctggacacaggagacctgctgctgcagaaggaatgtgaggtgctgcctgatgacacagtgtccaccctgtacaaccgcttcctgtttcctgagggcatcaagggcatggtgcaggccgtgcggctgattgctgagggcaaggccccccggctgccccagcctgaggagggcgccacctatgagggcatccagaagaaggagacagccaagatcaactgggaccagcctgctgaggccatccacaactggatcagaggaaatgacaaggtgcctggggcctggacagaggcctgtgagcagaagctgaccttcttcaacagcaccctgaacaccagcggcctggtgcctgaaggagatgccctgcccatccctggggcccacaggcctggggtggtgaccaaggccggcctcatcctgtttggaaatgatgacaagatgctgctggtgaagaacatccagctggaggatggcaagatgatcctggccagcaacttcttcaagggagctgccagctctgtgctggagctgacagaagctgagctggtgacagctgaggccgtgcgctctgtgtggcagaggatcctgcccaaggtgctggaggtggaggacagcacagacttcttcaagagcggggccgcctctgtggatgtggtgcggctggtggaggaggtgaaggagctgtgtgatggcctggagctggagaatgaagatgtgtacatggccagcaccttcggggacttcatccagctgctggtgaggaagctgcggggagatgatgaggagggagaatgttccattgattatgtggagatggctgtgaacaagaggacagtgaggatgccccaccagctgttcatcggcggggagtttgtggatgctgagggcgccaagaccagcgagaccatcaaccccacagatggcagcgtcatctgccaggtgtccctggcccaggtgacagatgtggacaaggctgtggccgccgccaaggatgcctttgaaaatggccgctggggcaagatcagcgcccgggaccggggccgcctgatgtaccgggccccacccagccccagcaccaggccagaccccacagccacctag

SEQ ID NO: 143196 - DNA, 2709 bp, synthetic construct
  misc_feature 1..2709: note = Description of Artificial Sequence: Synthetic coding sequence
  source 1..2709: mol_type = other DNA
atgaagattgctgtgattggccagagcctgtttggccaggaggtgtactgccacctgaggaaggagggccacgaggtggtgggcgtcttcaccgtgcctgacaaggatggcaaggctgaccccctgggcctggaggccgagaaggatggagtgcctgtgttcaagtacagccgctggagggccaagggccaggccctgcctgatgtggtggccaagtaccaggccctgggcgctgagctgaatgtgctgcccttctgcagccagttcatccccatggagatcatcagcgcccccaggcatggcagcatcatctaccaccccagcctgctgcccaggcacagaggagccagcgccatcaactggaccctcatccatggagacaagaagggcggcttcagcatcttctgggcagatgatggcctggacacaggagacctgctgctgcagaaggaatgtgaggtgctgcctgatgacacagtgtccaccctgtacaaccgcttcctgtttcctgagggcatcaagggcatggtgcaggccgtgcggctgattgctgagggcaaggccccccggctgccccagcctgaggagggcgccacctatgagggcatccagaagaaggagacagccaagatcaactgggaccagcctgctgaggccatccacaactggatcagaggaaatgacaaggtgcctggggcctggacagaggcctgtgagcagaagctgaccttcttcaacagcaccctgaacaccagcggcctggtgcctgaaggagatgccctgcccatccctggggcccacaggcctggggtggtgaccaaggccggcctcatcctgtttggaaatgatgacaagatgctgctggtgaagaacatccagctggaggatggcaagatgatcctggccagcaacttcttcaagggagctgccagctctgtgctggagctgacagaagctgagctggtgacagctgaggccgtgcgctctgtgtggcagaggatcctgcccaaggtgctggaggtggaggacagcacagacttcttcaagagcggggccgcctctgtggatgtggtgcggctggtggaggaggtgaaggagctgtgtgatggcctggagctggagaatgaagatgtgtacatggccagcaccttcggggacttcatccagctgctggtgaggaagctgcggggagatgatgaggagggagaatgttccattgattatgtggagatggctgtgaacaagaggacagtgaggatgccccaccagctgttcatcggcggggagtttgtggatgctgagggcgccaagaccagcgagaccatcaaccccacagatggcagcgtcatctgccaggtgtccctggcccaggtgacagatgtggacaaggctgtggccgccgccaaggatgcctttgaaaatggccgctggggcaagatcagcgcccgggaccggggccgcctgatgtaccgcctggccgacctgatggagcagcaccaggaggagctggccaccatcgaggccctggatgctggagctgtgtacaccctggccctgaagacccacgtgggcatgagcatccagaccttccgctactttgctggctggtgtgacaagatccagggcagcaccatccccatcaaccaggcccggcccaacagaaacctgaccctgaccaggaaggagcctgtgggcgtgtgtggcatcatcatcccctggaactaccccctgatgatgctgtcctggaagacagctgcctgcctggccgccggcaacacagtggtgatcaagccagcccaggtgacccccctgacagccctgaagtttgctgagctgaccctgaaggccggcatccccaagggcgtggtgaatgtgctgcccggcagcggcagcctggtgggccagaggctgagtgaccacccagatgtgaggaagattggcttcaccggcagcacagaggtgggcaagcacatcatgaagagctgtgccatcagcaatgtgaagaaggtgtccctggagctgggcggcaagagccccctcatcatctttgctgactgtgacctgaacaaggctgtgcagatgggcatgagcagcgtcttcttcaacaagggggagaactgcatcgccgccggccgcctgtttgtggaggacagcatccatgatgaatttgtgagaagagtggtggaggaggtgaggaagatgaaggtgggcaaccccctggaccgggacacagaccacggcccccagaaccaccacgcccacctggtgaagctgatggagtactgccagcacggcgtgaaggagggcgccaccctggtgtgtggcggcaaccaggtgccccggcccggcttcttctttgagcccaccgtcttcacagatgtggaggaccacatgttcatcgccaaggaggagagctttggacctgtgatgatcatcagcagatttgctgatggagacctggatgctgtgctgagccgggccaatgccacagaatttggcctggccagcggggtcttcacccgggacatcaacaaggccctgtatgtgtctgacaagctgcaggccggcaccgtgtttgtgaacacctacaacaagacagatgtggccgccccctttggaggcttcaagcagagcggctttgggaaggacctgggggaggccgccctgaatgagtacctgcgggtgaagacagtgacctttgagtactag

SEQ ID NO: 143197 - DNA, 483 bp, synthetic construct
  misc_feature 1..483: note = Description of Artificial Sequence: Synthetic coding sequence
  source 1..483: mol_type = other DNA
atggtgcaggccgtgcggctgattgctgagggcaaggccccccggctgccccagcctgaggagggcgccacctatgagggcatccagaagaaggagacagccaagatcaactgggaccagcctgctgaggccatccacaactggatcagaggaaatgacaaggtgcctggggcctggacagaggcctgtgagcagaagctgaccttcttcaacagcaccctgaacaccagcggcctggtgcctgaaggagatgccctgcccatccctggggcccacaggcctggggtggtgaccaaggccggcctcatcctgtttggaaatgatgacaagatggtgcgggcccggctgtgggtgacctgcctgctgaaggccacccacgcccctgtgctgggcctgcggccccacaggaagaccctgggcagcagcggggagaatggcaagaaccagacccaggagggcaccctgaccctcatctgcccctag

SEQ ID NO: 143198 - DNA, 507 bp, synthetic construct
  misc_feature 1..507: note = Description of Artificial Sequence: Synthetic coding sequence
  source 1..507: mol_type = other DNA
atgaagattgctgtgattggccagagcctgtttggccaggaggtgtactgccacctgaggaaggagggccacgaggtggtgggcgtcttcaccgtgcctgacaaggatggcaaggctgaccccctgggcctggaggccgagaaggatggagtgcctgtgttcaagtacagccgctggagggccaagggccaggccctgcctgatgtggtggccaagtaccaggccctgggcgctgagctgaatgtgctgcccttctgcagccagttcatccccatggagatcatcagcgcccccaggcatggcagcatcatctaccaccccagcctgctgcccaggcacagaggagccagcgccatcaactggaccctcatccatggagacaagaagggcggcttcagcatcttctgggcagatgatggcctggacacaggagacctgctgctgcagaaggaatgtgaggtgctgcctgatgacacagtgtccaccctgtacaaccgcttcctgtag

SEQ ID NO: 143199 - DNA, 2709 bp, synthetic construct; identical to SEQ ID NO: 143196
  misc_feature 1..2709: note = Description of Artificial Sequence: Synthetic coding sequence
  source 1..2709: mol_type = other DNA

SEQ ID NO: 143200 - DNA, 474 bp, synthetic construct
  misc_feature 1..474: note = Description of Artificial Sequence: Synthetic coding sequence
  source 1..474: mol_type = other DNA
atgaagattgctgtgattggccagagcctgtttggccaggaggtgtactgccacctgaggaaggagggccacgaggtggtgggcgtcttcaccgtgcctgacaaggatggcaaggctgaccccctgggcctggaggccgagaaggatggagtgcctgtgttcaagtacagccgctggagggccaagggccaggccctgcctgatgtggtggccaagtaccaggccctgggcgctgagctgaatgtgctgcccttctgcagccagttcatccccatggagatcatcagcgcccccaggcatggcagcatcatctaccaccccagcctgctgcccaggcacagaggagccagcgccatcaactggaccctcatccatggagacaagaagggcggcttcagcatcttctgggcagatgatggcctggacacaggagacctgctgctgcagaaggaatgtgaggtgctgcctgactag

SEQ ID NO: 143201 - DNA, 534 bp, synthetic construct
  misc_feature 1..534: note = Description of Artificial Sequence: Synthetic coding sequence
  source 1..534: mol_type = other DNA
atgaagattgctgtgattggccagagcctgtttggccaggaggtgtactgccacctgaggaaggagggccacgaggtggtgggcgtcttcaccgtgcctgacaaggatggcaaggctgaccccctgggcctggaggccgagaaggatggagtgcctgtgttcaagtacagccgctggagggccaagggccaggccctgcctgatgtggtggccaagtaccaggccctgggcgctgagctgaatgtgctgcccttctgcagccagttcatccccatggagatcatcagcgcccccaggcatggcagcatcatctaccaccccagcctgctgcccaggcacagaggagccagcgccatcaactggaccctcatccatggagacaagaagggcggcttcagcatcttctgggcagatgatggcctggacacaggagacctgctgctgcagaaggaatgtgaggtgctgcctgatgacacagtgtccaccctgtacaaccgcttcctgtttcctgagggcatcaagggcatggtgtag

SEQ ID NO: 143202 - DNA, 303 bp, synthetic construct
  misc_feature 1..303: note = Description of Artificial Sequence: Synthetic coding sequence
  source 1..303: mol_type = other DNA
atgaagattgctgtgattggccagagcctgtttggccaggaggtgtactgccacctgaggaaggagggccacgaggtggtgggcgtcttcaccgtgcctgacaaggatggcaaggctgaccccctgggcctggaggccgagaaggatggagtgcctgtgttcaagtacagccgctggagggccaagggccaggccctgcctgatgtggtggccaagtaccaggccctgggcgctgagctgaatgtgctgcccttctgcagccagttcatccccatggagatcatcagcgcccccaggcactag

SEQ ID NO: 143203 - DNA, 2409 bp, synthetic construct
  misc_feature 1..2409: note = Description of Artificial Sequence: Synthetic coding sequence
  source 1..2409: mol_type = other DNA
atggccgccacccgggccggcccccgggcccgggagatcttcaccagcctggagtatggccctgtgcctgagagccacgcctgtgccctggcctggctggacacccaggaccgctgcctgggccactacgtgaatggcaagtggctgaagccagagcacaggaacagcgtgccctgccaggaccccatcaccggggagaacctggccagctgcctgcaggcccaggctgaagatgtggccgctgctgtggaggccgccaggatggccttcaagggctggagcgcccaccctggggtggtgcgggcccagcacctgacccggctggccgaggtgatccagaagcaccagaggctgctgtggaccctggagagcctggtgacaggccgggctgtgcgggaggtgagagatggagatgtgcagctggcccagcagctgctgcactaccacgccatccaggccagcacccaggaggaggccctggccggctgggagcccatgggcgtgattggcctcatcctgccccccaccttctccttcctggagatgatgtggaggatctgcccagccctggccgtgggctgcaccgtggtggccctggtgcccccagccagccctgcccccctgctgctggcccagctggccggggagctgggccccttccctggcatcctgaatgtgctgagcggccctgccagcctggtgcccatcctggccagccagcccggcatcaggaaggtggccttctgtggggcccctgaggagggccgggccctgcggcgcagcctggccggagaatgtgccgagctgggcctggccctgggcacagagagcctgctgctgctgacagacacagcagatgtggacagcgctgtggagggcgtggtggatgctgcctggagcgaccggggccctgggggcctgcggctgctgatccaggagagcgtgtgggatgaggccatgaggcggctgcaggagaggatgggccgcctgcggagcggccggggcctggatggagctgtggacatgggcgcccggggagctgctgcctgtgacctggtgcagagatttgtgcgggaggcccagagccagggcgcccaggtgttccaggccggagatgtgcccagcgagcggcccttctacccacccaccctggtgagcaacctgcccccagccagcccctgtgcccaggtggaggtgccctggcctgtggtggtggccagccccttcagaacagccaaggaggccctgctggtggccaacggcaccccccggggcggcagcgcctctgtgtggagcgagcggctgggccaggccctggagctgggctacggcctgcaggtgggcaccgtgtggatcaatgcccacggcctgcgggaccccagcgtgcccaccggcggctgcaaggagagcggctgctcctggcatggaggcccagatggcctgtatgagtacctgcggcccagcggcaccccagcccggctgagctgcctgagcaagaacctgaactatgacaccttcggcctggccgtgcccagcaccctgcctgctggccctgagatcggccccagccctgccccaccctacggcctgtttgtgggcggccgcttccaggcccctggggcccggagcagccggcccatccgggacagcagcggcaacctgcacggctacgtggccgagggcggggccaaggacatcagaggagctgtggaggccgcccaccaggccttccctggctgggccggccagagccctggggcccgggccgccctgctgtgggccctggccgccgccctggagaggaggaagagcaccctggccagccggctggagcggcagggcgctgagctgaaggctgctgaggccgaggtggagctgagcgcccggcggctgcgggcctggggcgcccgggtgcaggcccagggccacaccctgcaggtggccggcctgcggggccctgtgctgcggctgcgggagcccctgggcgtgctggccgtggtgtgcccagatgagtggcccctgctggcctttgtgtccctgctggccccagccctggcctacggcaacacagtggtgatggtgcccagcgctgcctgccccctgctggccctggaggtgtgccaggacatggccaccgtcttccctgctggcctggccaacgtggtgactggagaccgggaccacctgacccgctgcctggccctgcaccaggatgtgcaggccatgtggtactttggaagtgcccagggcagccagtttgtggagtgggccagcgctggcaacctgaagcctgtgtgggccagccggggctgcccccgggcctgggaccaggaggccgagggcgccggccctgagctgggcctgcgggtggcccggaccaaggccctgtggctgcccatgggagactag

SEQ ID NO: 143204 - DNA, 1914 bp, synthetic construct
  misc_feature 1..1914: note = Description of Artificial Sequence: Synthetic coding sequence
  source 1..1914: mol_type = other DNA
atgggcgtcatcggcctcatcctgccccccaccttctccttcctggagatgatgtggaggatctgcccagccctggccgtgggctgcaccgtggtggccctggtgcccccagccagccctgcccccctgctgctggcccagctggccggggagctgggccccttccctggcatcctgaatgtgctgagcggccctgccagcctggtgcccatcctggccagccagcccggcatcaggaaggtggccttctgtggggcccctgaggagggccgggccctgcggcgcagcctggccggggagtgtgccgagctgggcctggccctgggcacagagagcctgctgctgctgacagacacagcagatgtggacagcgctgtggagggcgtggtggatgctgcctggagcgaccggggccctgggggcctgcggctgctgatccaggagagcgtgtgggatgaggccatgaggcggctgcaggagaggatgggccgcctgcggagcggccggggcctggatggagctgtggacatgggcgcccggggagctgctgcctgtgacctggtgcagagatttgtgcgggaggcccagagccagggcgcccaggtgttccaggccggagatgtgcccagcgagcggcccttctacccacccaccctggtgagcaacctgcccccagccagcccctgtgcccaggtggaggtgccctggcctgtggtggtggccagccccttcagaacagccaaggaggccctgctggtggccaacggcaccccccggggcggcagcgcctctgtgtggagcgagcggctgggccaggccctggagctgggctacggcctgcaggtgggcaccgtgtggatcaatgcccacggcctgcgggaccccagcgtgcccactggaggctgcaaggagagcggctgctcctggcacggcggcccagatggcctgtatgagtacctgcggcccagcggcaccccagcccggctgagctgcctgagcaagaacctgaactatgacaccttcggcctggccgtgcccagcaccctgcctgctggccctgagatcggccccagccctgccccaccctacggcctgtttgtgggcggccgcttccaggcccctggggcccggagcagccggcccatccgggacagcagcggcaacctgcacggctacgtggccgagggcggggccaaggacatcagaggagctgtggaggccgcccaccaggccttccctggctgggccggccagagccctggggcccgggccgccctgctgtgggccctggccgccgccctggagaggaggaagagcaccctggccagccggctggagcggcagggcgctgagctgaaggctgctgaggccgaggtggagctgagcgcccggcggctgcgggcctggggcgcccgggtgcaggcccagggccacaccctgcaggtggccggcctgcggggccctgtgctgcggctgcgggagcccctgggcgtgctggccgtggtgtgcccagatgagtggcccctgctggcctttgtgtccctgctggccccagccctggcctacggcaacacagtggtgatggtgcccagcgctgcctgccccctgctggccctggaggtgtgccaggacatggccaccgtcttccctgctggcctggccaacgtggtgactggagaccgggaccacctgacccgctgcctggccctgcaccaggatgtgcaggccatgtggtacttcggcagcgcccagggcagccagtttgtggagtgggccagcgctggcaacctgaagcctgtgtgggccagccggggctgcccccgggcctgggaccaggaggccgagggcgccggccctgagctgggcctgcgggtggcccggaccaaggccctgtggctgcccatgggagactag

SEQ ID NO: 143205 - DNA, 2256 bp, synthetic construct
  misc_feature 1..2256: note = Description of Artificial Sequence: Synthetic coding sequence
  source 1..2256: mol_type = other DNA
atggccgccacccgggccggcccccgggcccgggagatcttcaccagcctggagtatggccctgtgcctgagagccacgcctgtgccctggcctggctggacacccaggaccgctgcctgggccactacgtgaatggcaagtggctgaagccagagcacaggaacagcgtgccctgccaggaccccatcaccggggagaacctggccagctgcctgcaggcccaggctgaagatgtggccgctgctgtggaggccgccaggatggccttcaagggctggagcgcccaccctggggtggtgcgggcccagcacctgacccggctggccgaggtgatccagaagcaccagaggctgctgtggaccctggagagcctggtgacaggccgggctgtgcgggaggtgagagatggagatgtgcagctggcccagcagctgctgcactaccacgccatccaggccagcacccaggaggaggccctggccggctgggagcccatgggcgtgattggcctcatcctgccccccaccttctccttcctggagatgatgtggaggatctgcccagccctggccgtgggctgcaccgtggtggccctggtgcccccagccagccctgcccccctgctgctggcccagctggccggggagctgggccccttccctggcatcctgaatgtgctgagcggccctgccagcctggtgcccatcctggccagccagcccggcatcaggaaggtggccttctgtggggcccctgagggcggcctgcggctgctgatccaggagagcgtgtgggatgaggccatgaggcggctgcaggagaggatgggccgcctgcggagcggccggggcctggatggagctgtggacatgggcgcccggggagctgctgcctgtgacctggtgcagagatttgtgcgggaggcccagagccagggcgcccaggtgttccaggccggagatgtgcccagcgagcggcccttctacccacccaccctggtgagcaacctgcccccagccagcccctgtgcccaggtggaggtgccctggcctgtggtggtggccagccccttcagaacagccaaggaggccctgctggtggccaacggcaccccccggggcggcagcgcctctgtgtggagcgagcggctgggccaggccctggagctgggctacggcctgcaggtgggcaccgtgtggatcaatgcccacggcctgcgggaccccagcgtgcccactggaggctgcaaggagagcggctgctcctggcacggcggcccagatggcctgtatgagtacctgcggcccagcggcaccccagcccggctgagctgcctgagcaagaacctgaactatgacaccttcggcctggccgtgcccagcaccctgcctgctggccctgagatcggccccagccctgccccaccctacggcctgtttgtgggcggccgcttccaggcccctggggcccggagcagccggcccatccgggacagcagcggcaacctgcacggctacgtggccgagggcggggccaaggacatcagaggagctgtggaggccgcccaccaggccttccctggctgggccggccagagccctggggcccgggccgccctgctgtgggccctggccgccgccctggagaggaggaagagcaccctggccagccggctggagcggcagggcgctgagctgaaggctgctgaggccgaggtggagctgagcgcccggcggctgcgggcctggggcgcccgggtgcaggcccagggccacaccctgcaggtggccggcctgcggggccctgtgctgcggctgcgggagcccctgggcgtgctggccgtggtgtgcccagatgagtggcccctgctggcctttgtgtccctgctggccccagccctggcctacggcaacacagtggtgatggtgcccagcgctgcctgccccctgctggccctggaggtgtgccaggacatggccaccgtcttccctgctggcctggccaacgtggtgactggagaccgggaccacctgacccgctgcctggccctgcaccaggatgtgcaggccatgtggtacttcggcagcgcccagggcagccagtttgtggagtgggccagcgctggcaacctgaagcctgtgtgggccagccggggctgcccccgggcctgggaccaggaggccgagggcgccggccctgagctgggcctgcgggtggcccggaccaaggccctgtggctgcccatgggagactag

SEQ ID NO: 143206 - DNA, 1920 bp, synthetic construct
  misc_feature 1..1920: note = Description of Artificial Sequence: Synthetic coding sequence
  source 1..1920: mol_type = other DNA
atgaggactggagtcatcggcctcatcctgccccccaccttctccttcctggagatgatgtggaggatctgcccagccctggccgtgggctgcaccgtggtggccctggtgcccccagccagccctgcccccctgctgctggcccagctggccggggagctgggccccttccctggcatcctgaatgtgctgagcggccctgccagcctggtgcccatcctggccagccagcccggcatcaggaaggtggccttctgtggggcccctgaggagggccgggccctgcggcgcagcctggccggggagtgtgccgagctgggcctggccctgggcacagagagcctgctgctgctgacagacacagcagatgtggacagcgctgtggagggcgtggtggatgctgcctggagcgaccggggccctgggggcctgcggctgctgatccaggagagcgtgtgggatgaggccatgaggcggctgcaggagaggatgggccgcctgcggagcggccggggcctggatggagctgtggacatgggcgcccggggagctgctgcctgtgacctggtgcagagatttgtgcgggaggcccagagccagggcgcccaggtgttccaggccggagatgtgcccagcgagcggcccttctacccacccaccctggtgagcaacctgcccccagccagcccctgtgcccaggtggaggtgccctggcctgtggtggtggccagccccttcagaacagccaaggaggccctgctggtggccaacggcaccccccggggcggcagcgcctctgtgtggagcgagcggctgggccaggccctggagctgggctacggcctgcaggtgggcaccgtgtggatcaatgcccacggcctgcgggaccccagcgtgcccactggaggctgcaaggagagcggctgctcctggcacggcggcccagatggcctgtatgagtacctgcggcccagcggcaccccagcccggctgagctgcctgagcaagaacctgaactatgacaccttcggcctggccgtgcccagcaccctgcctgctggccctgagatcggccccagccctgccccaccctacggcctgtttgtgggcggccgcttccaggcccctggggcccggagcagccggcccatccgggacagcagcggcaacctgcacggctacgtggccgagggcggggccaaggacatcagaggagctgtggaggccgcccaccaggccttccctggctgggccggccagagccctggggcccgggccgccctgctgtgggccctggccgccgccctggagaggaggaagagcaccctggccagccggctggagcggcagggcgctgagctgaaggctgctgaggccgaggtggagctgagcgcccggcggctgcgggcctggggcgcccgggtgcaggcccagggccacaccctgcaggtggccggcctgcggggccctgtgctgcggctgcgggagcccctgggcgtgctggccgtggtgtgcccagatgagtggcccctgctggcctttgtgtccctgctggccccagccctggcctacggcaacacagtggtgatggtgcccagcgctgcctgccccctgctggccctggaggtgtgccaggacatggccaccgtcttccctgctggcctggccaacgtggtgactggagaccgggaccacctgacccgctgcctggccctgcaccaggatgtgcaggccatgtggtacttcggcagcgcccagggcagccagtttgtggagtgggccagcgctggcaacctgaagcctgtgtgggccagccggggctgcccccgggcctgggaccaggaggccgagggcgccggccctgagctgggcctgcgggtggcccggaccaaggccctgtggctgcccatgggagactag

SEQ ID NO: 143207 - DNA, 2382 bp, synthetic construct
  misc_feature 1..2382: note = Description of Artificial Sequence: Synthetic coding sequence
  source 1..2382: mol_type = other DNA
atgctgagccaggtgtaccgctgtggcttccagcccttcaaccagcacctgctgccctgggtgaagtgcaccaccgtcttccgcagccactgcatccagcccagcgtcatcagacatgtgcgctcctggagcaacatccccttcatcaccgtgcccctgagcaggacccacggcaagagctttgcccacaggtctgagctgaagcacgccaagagaattgtggtgaagctgggcagcgctgtggtgaccagaggagatgaatgtggcctggccctgggccgcctggccagcatcgtggagcaggtgtctgtgctgcagaaccagggccgggagatgatgctggtgaccagcggggctgtggccttcggcaagcagaggctgcggcatgagatcctgctgagccagagcgtgcggcaggccctgcacagcggccagaaccagctgaaggagatggccatccctgtgctggaggcccgggcctgtgccgccgccggccagagcggcctgatggccctgtatgaggccatgttcacccagtacagcatctgtgccgcccagatcctggtgaccaacctggacttccatgatgagcagaagagaagaaacctgaatggcaccctgcacgagctgctgaggatgaacatcgtgcccatcgtgaacaccaatgatgctgtggtgcccccagctgagcccaacagcgacctgcagggcgtcatctctgtgaaggacaatgacagcctggccgcccggctggccgtggagatgaagacagacctgctgattgtgctgagtgatgtggagggcctgtttgacagccccccaggcagtgatgatgccaagctgattgacatcttctacccaggggaccagcagagcgtgaccttcggcaccaagagccgggtgggcatgggcggcatggaggccaaggtgaaggccgccctgtgggccctgcagggcggcacctctgtggtgattgccaacggcacccaccccaaggtgtctggccacgtgatcacagacatcgtggagggcaagaaggtgggcaccttcttcagcgaggtgaagccagctggccccaccgtggagcagcagggcgagatggcccggagcggcggccgcatgctggccaccctggagcctgagcagagagctgagatcatccaccacctggccgacctgctgacagaccagagagatgagatcctgctggccaacaagaaggacctggaggaggccgagggccgcctggccgcccccctgctgaagaggctgagcctgagcaccagcaagctgaacagcctggccatcggcctgcggcagattgctgccagcagccaggacagcgtgggccgggtgctgcggaggacccgcatcgccaagaacctggagctggagcaggtgacagtgcccatcggcgtgctgctggtgatctttgagagcaggccagactgcctgccccaggtggccgccctggccatcgccagcggaaatggcctgctgctgaagggcggcaaggaggccgcccacagcaaccgcatcctgcacctgctgacccaggaggccctgagcatccatggagtgaaggaggccgtgcagctggtgaacacccgggaggaggtggaggacctgtgccgcctggacaagatgattgacctgatcatcccccggggcagcagccagctggtgcgggacatccagaaggccgccaagggcatccctgtgatgggccacagcgagggcatctgccacatgtatgtggacagcgaggcctctgtggacaaggtgacccggctggtgcgggacagcaaatgtgagtacccagctgcctgcaatgccctggagaccctgctgatccaccgggacctgctgcggacccccctgtttgaccagatcatcgacatgctgcgggtggagcaggtgaagatccacgccggccccaagtttgccagctacctgaccttcagccccagcgaggtgaagagcctgaggacagaatatggagacctggagctgtgcatcgaggtggtggacaacgtgcaggatgccatcgaccacatccacaagtatggcagcagccacacagatgtgattgtgacagaagatgagaacacagctgagttcttcctgcagcacgtggacagcgcctgtgtgttctggaatgccagcacccgcttcagtgatggctacagatttggcctgggcgctgaggtgggcatcagcaccagccgcatccacgcccggggccctgtgggcctggagggcctgctgaccaccaagtggctgctgcggggcaaggaccacgtggtgtctgacttcagcgagcacggcagcctgaagtacctgcacgagaacctgcccatcccccagaggaacaccaactag

SEQ ID NO: 143208 - DNA, 2388 bp, synthetic construct
  misc_feature 1..2388: note = Description of Artificial Sequence: Synthetic coding sequence
  source 1..2388: mol_type = other DNA
atgctgagccaggtgtaccgctgtggcttccagcccttcaaccagcacctgctgccctgggtgaagtgcaccaccgtcttccgcagccactgcatccagcccagcgtcatcagacatgtgcgctcctggagcaacatccccttcatcaccgtgcccctgagcaggacccacggcaagagctttgcccacaggtctgagctgaagcacgccaagagaattgtggtgaagctgggcagcgctgtggtgaccagaggagatgaatgtggcctggccctgggccgcctggccagcatcgtggagcaggtgtctgtgctgcagaaccagggccgggagatgatgctggtgaccagcggggctgtggccttcggcaagcagaggctgcggcatgagatcctgctgagccagagcgtgcggcaggccctgcacagcggccagaaccagctgaaggagatggccatccctgtgctggaggcccgggcctgtgccgccgccggccagagcggcctgatggccctgtatgaggccatgttcacccagtacagcatctgtgccgcccagatcctggtgaccaacctggacttccatgatgagcagaagagaagaaacctgaatggcaccctgcacgagctgctgaggatgaacatcgtgcccatcgtgaacaccaatgatgctgtggtgcccccagctgagcccaacagcgacctgcagggcgtgaatgtcatctctgtgaaggacaatgacagcctggccgcccggctggccgtggagatgaagacagacctgctgattgtgctgagtgatgtggagggcctgtttgacagccccccaggcagtgatgatgccaagctgattgacatcttctacccaggggaccagcagagcgtgaccttcggcaccaagagccgggtgggcatgggcggcatggaggccaaggtgaaggccgccctgtgggccctgcagggcggcacctctgtggtgattgccaacggcacccaccccaaggtgtctggccacgtgatcacagacatcgtggagggcaagaaggtgggcaccttcttcagcgaggtgaagccagctggccccaccgtggagcagcagggcgagatggcccggagcggcggccgcatgctggccaccctggagcctgagcagagagctgagatcatccaccacctggccgacctgctgacagaccagagagatgagatcctgctggccaacaagaaggacctggaggaggccgagggccgcctggccgcccccctgctgaagaggctgagcctgagcaccagcaagctgaacagcctggccatcggcctgcggcagattgctgccagcagccaggacagcgtgggccgggtgctgcggaggacccgcatcgccaagaacctggagctggagcaggtgacagtgcccatcggcgtgctgctggtgatctttgagagcaggccagactgcctgccccaggtggccgccctggccatcgccagcggaaatggcctgctgctgaagggcggcaaggaggccgcccacagcaaccgcatcctgcacctgctgacccaggaggccctgagcatccatggagtgaaggaggccgtgcagctggtgaacacccgggaggaggtggaggacctgtgccgcctggacaagatgattgacctgatcatcccccggggcagcagccagctggtgcgggacatccagaaggccgccaagggcatccctgtgatgggccacagcgagggcatctgccacatgtatgtggacagcgaggcctctgtggacaaggtgacccggctggtgcgggacagcaaatgtgagtacccagctgcctgcaatgccctggagaccctgctgatccaccgggacctgctgcggacccccctgtttgaccagatcatcgacatgctgcgggtggagcaggtgaagatccacgccggccccaagtttgccagctacctgaccttcagccccagcgaggtgaagagcctgaggacagaatatggagacctggagctgtgcatcgaggtggtggacaacgtgcaggatgccatcgaccacatccacaagtatggcagcagccacacagatgtgattgtgacagaagatgagaacacagctgagttcttcctgcagcacgtggacagcgcctgtgtgttctggaatgccagcacccgcttcagtgatggctacagatttggcctgggcgctgaggtgggcatcagcaccagccgcatccacgcccggggccctgtgggcctggagggcctgctgaccaccaagtggctgctgcggggcaaggaccacgtggtgtctgacttcagcgagcacggcagcctgaagtacctgcacgagaacctgcccatcccccagaggaacaccaactag

SEQ ID NO: 143209 - DNA, 1554 bp, synthetic construct
  misc_feature 1..1554: note = Description of Artificial Sequence: Synthetic coding sequence
  source 1..1554: mol_type = other DNA
atgctgcgggctgctgcccgcttcggcccccggctgggccggcggctgctgtctgctgctgccacccaggccgtgcctgcccccaaccagcagcctgaggtgttctgcaaccagatcttcatcaacaatgagtggcatgatgctgtgtccaggaagaccttccccaccgtgaaccccagcactggagaggtgatctgccaggtggccgagggggacaaggaggatgtggacaaggctgtgaaggccgcccgggccgccttccagctgggcagcccctggaggaggatggatgccagccaccggggccgcctgctgaaccggctggccgacctgattgaaagagacaggacctacctggccgccctggagaccctggacaatggcaagccctacgtgatctcctacctggtggacctggacatggtgctgaagtgcctgcgctactatgccggctgggccgacaagtaccacggcaagaccatccccattgatggagacttcttctcctacaccaggcatgagcctgtgggcgtgtgtggccagatcatcccctggaacttccccctgctgatgcaggcctggaagctgggccctgccctggccactggaaatgtggtggtgatgaaggtggccgagcagacccccctgacagccctgtatgtggccaacctgatcaaggaggccggcttccccccaggagtggtgaacatcgtgcccggcttcggccccacagctggagctgccatcgccagccatgaagatgtggacaaggtggccttcaccggcagcacagagatcggccgggtcatccaggtggccgccggcagcagcaacctgaagagggtgaccctggagctgggcggcaagagccccaacatcatcatgtctgatgctgacatggactgggccgtggagcaggcccactttgccctcttcttcaaccagggccagtgctgctgtgccggcagcaggacctttgtgcaggaggacatctatgatgaatttgtggagaggtctgtggcccgggccaagagccgggtggtgggcaacccctttgacagcaagacagagcagggcccccaggtggatgagacccagttcaagaagatcctgggctacatcaacacaggcaagcaggagggcgccaagctgctgtgtggcggcggcattgctgctgaccggggctacttcatccagcccaccgtgtttggagatgtgcaggacggcatgaccatcgccaaggaggagatcttcggccctgtgatgcagatcctgaagttcaagaccatcgaggaggtggtgggccgggccaacaacagcacctacggcctggccgctgctgtgttcaccaaggacctggacaaggccaactacctgagccaggccctgcaggccggcaccgtgtgggtgaactgctatgatgtgtttggagcccagagcccctttggaggctacaagatgagcggcagcggccgggagctgggggagtatggcctgcaggcctacacagaggtgaagacagtgacagtgaaggtgccccagaagaacagctag

SEQ ID NO: 143210 - DNA, 1413 bp, synthetic construct
  misc_feature 1..1413: note = Description of Artificial Sequence: Synthetic coding sequence
  source 1..1413: mol_type = other DNA
atgctgcgggctgctgcccgcttcggcccccggctgggccggcggctgctgtctgctgctgccacccaggccgtgcctgcccccaaccagcagcctgaggtgttctgcaaccagatcttcatcaacaatgagtggcatgatgctgtgtccaggaagaccttccccaccgtgaaccccagcactggagaggtgatctgccaggtggccgagggggacaaggccctggagaccctggacaacgggaagccctacgtgatctcctacctggtggacctggacatggtgctgaagtgcctgcgctactatgccggctgggccgacaagtaccacggcaagaccatccccattgatggagacttcttctcctacaccaggcatgagcctgtgggcgtgtgtggccagatcatcccctggaacttccccctgctgatgcaggcctggaagctgggccctgccctggccactggaaatgtggtggtgatgaaggtggccgagcagacccccctgacagccctgtatgtggccaacctgatcaaggaggccggcttccccccaggagtggtgaacatcgtgcccggcttcggccccacagctggggccgccatcgccagccatgaagatgtggacaaggtggccttcaccggcagcacagaaattggccgggtcatccaggtggccgccggcagcagcaacctgaagagggtgaccctggagctgggcggcaagagccccaacatcatcatgtctgatgctgacatggactgggccgtggagcaggcccactttgccctcttcttcaaccagggccagtgctgctgtgccggcagcaggacctttgtgcaggaggacatctatgatgaatttgtggagaggtctgtggcccgggccaagagccgggtggtgggcaacccctttgacagcaagacagagcagggcccccaggtggatgagacccagttcaagaagatcctgggctacatcaacacaggcaagcaggagggcgccaagctgctgtgtggcggcggcattgctgctgaccggggctacttcatccagcccaccgtgtttggagatgtgcaggacggcatgaccatcgccaaggaggagatctttggacctgtgatgcagatcctgaagttcaagaccatcgaggaggtggtgggccgggccaacaacagcacctacggcctggccgctgctgtgttcaccaaggacctggacaaggccaactacctgagccaggccctgcaggccggcaccgtgtgggtgaactgctatgatgtgtttggagcccagagcccctttggaggctacaagatgagcggcagcggccgggagctgggggagtatggcctgcaggcctacacagaggtgaagacagtgacagtgaaggtgccccagaagaacagctag

SEQ ID NO: 143211 - DNA, 1989 bp, synthetic construct
  misc_feature 1..1989: note = Description of Artificial Sequence: Synthetic coding sequence
  source 1..1989: mol_type = other DNA
atgagaggagctggccccagcccccggcagagccccaggaccctgcggccagaccccggccctgccatgtccttcttccggaggaaggtgaagggcaaggagcaggagaagaccagtgatgtgaagagcatcaaggccagcatctctgtgcacagcccccagaagagcaccaagaaccacgccctgctggaggccgccggccccagccacgtggccatcaatgccatcagcgccaacatggacagcttcagcagcagcaggacagccaccctgaagaagcagcccagccacatggaggccgcccactttggagacctgggccgcagctgcctggactaccagacccaggagaccaagagcagcctgagcaagaccctggagcaggtgctgcatgacaccatcgtgctgccctacttcatccagttcatggagctgcggaggatggagcacctggtgaagttctggctggaggccgagagcttccacagcaccacctggagccgcatccgggcccacagcctgaacacagtgaagcagagcagcctggccgagcctgtgagccccagcaagaagcatgagaccacagccagcttcctgacagacagcctggacaagaggctggaggacagcggcagcgcccagctgttcatgacccacagcgagggcatcgacctgaacaacagaaccaacagcacccagaaccacctgctgctgagccaggagtgtgacagcgcccacagcctgcggctggagatggcccgggccggcacccaccaggtgtccatggagacccaggagagcagcagcaccctgactgtggccagcaggaacagccctgccagccccctgaaggagctgagcggcaagctgatgaagagcattgagcaggatgctgtgaacaccttcaccaagtacatcagcccagatgctgccaagcccatccccatcacagaggccatgagaaatgacatcatcgcccgcatctgtggagaagatggccaggtggaccccaactgctttgtgctggcccagagcatcgtgttttctgccatggagcaggagcacttcagcgagttcctgcggagccaccacttctgcaagtaccagatcgaggtgctgaccagcggcaccgtgtacctggccgacatcctcttctgtgagagcgccctcttctacttcagcgagtacatggagaaggaggatgctgtgaacatcctgcagttctggctggccgctgacaacttccagagccagctggccgccaagaagggccagtatgatggccaggaggcccagaatgatgccatgatcctgtatgacaagtacttcagcctgcaggccacccaccccctgggctttgatgatgtggtgcggctggagattgagagcaacatctgccgggagggcggccccctgcccaactgcttcaccacccccctgcggcaggcctggaccaccatggagaaggtgttcctgcccggcttcctgagcagcaacctgtactacaagtacctgaatgacctgatccacagcgtgagaggagatgagttcctgggcggcaatgtgtccctgacagcccctggctctgtgggccccccagatgagagccaccctggcagcagtgacagcagcgccagccagagctctgtgaagaaggccagcatcaagatcctgaagaactttgatgaggccatcatcgtggatgctgccagcctggaccctgagagcctgtaccagaggacctacgccggcaagatgaccttcggccgggtgtctgacctgggccagttcatccgggagagcgagcctgagccagatgtgaggaagagcaagggctccatgttcagccaggccatgaagaagtgggtgcagggcaacacagatgaggcccaggaggagctggcctggaagatcgccaagatgattgtgtctgacatcatgcagcaggcccagtatgaccagcccctggagaagagcaccaagctgtag

SEQ ID NO: 143212 - DNA, 1536 bp, synthetic construct
  misc_feature 1..1536: note = Description of Artificial Sequence: Synthetic coding sequence
  source 1..1536: mol_type = other DNA
gaggtgcagaggaccccccaccccacctttgagtacttcttcttcctgagcaggaagctgcccggccaggagctgcagggcctgaatggccgggaggccggcagcctgaacaccagccccctgggcagctgccgcagccgcagccccagctaccgggagcggctgtgccagaggagacatgagcaggaccagaggggccgggaggcccggccccggcggctgcagggccgcacccggcccctgcagttccgcatccagcagctggaggccctgcagaggctcatccaggagcaggagcaggagctggtgggcgccctggccgctgacctgcacaagaatgagtggaatgcctactatgaggaggtggtgtatgtgctggaggagattgagtacatgatccagaagctgcctgagtgggccgcagatgagcctgtggagaagaccccccagacccagcaggatgagctgtacatccacagcgagcccctgggcgtggtgctggtgattggcacctggaactaccccttcaacctgaccatccagcccatggtgggcgccatcgctgctggcaacagcgtggtgctgaagcccagcgagctgtctgagaacatggccagcctgctggccaccatcatcccccagtacctggacaaggacctgtaccctgtgatcaatggaggagtgcctgagaccacagagctgctgaaggagagatttgaccacatcctgtacacaggcagcactggagtgggcaagatcatcatgacagctgctgccaagcacctgacccctgtgaccctggagctgggcggcaagagcccctgctacgtggacaagaactgtgacctggatgtggcctgccgccgcatcgcctggggcaagttcatgaacagcggccagacctgtgtggccccagactacatcctgtgtgaccccagcatccagaaccagatcgtggagaagctgaagaagagcctgaaggagttctacggggaggatgccaagaagagccgggactatggccgcatcatcagcgcccggcacttccagagggtgatgggcctcatcgagggccagaaggtggcctatggaggcactggagatgctgccacccgctacatcgcccccaccatcctgacagatgtggacccccagagccctgtgatgcaggaggagatcttcggccctgtgctgcccatcgtgtgtgtgcgcagcctggaggaggccatccagttcatcaaccagcgggagaagcccctggccctgtacatgttcagcagcaatgacaaggtgatcaagaagatgattgctgagaccagcagtggaggagtggccgccaatgatgtgattgtgcacatcaccctgcacagcctgccctttggaggagtgggcaacagcggcatgggcagctaccacggcaagaagagctttgagaccttcagccacagaagaagctgcctggtgcggcccctgatgaatgatgagggcctgaaggtgcgctacccacccagccctgccaagatgacccagcactag

SEQ ID NO: 143213 - DNA, 1170 bp, synthetic construct
  misc_feature 1..1170: note = Description of Artificial Sequence: Synthetic coding sequence
  source 1..1170: mol_type = other DNA
atgagcaagatcagcgaggccgtgaagagggcccgggccgccttcagcagcggccgcacccggcccctgcagttccgcatccagcagctggaggccctgcagaggctcatccaggagcaggagcaggagctggtgggcgccctggccgctgacctgcacaagaatgagtggaatgcctactatgaggaggtggtgtatgtgctggaggagattgagtacatgatccagaagctgcctgagtgggccgcagatgagcctgtggagaagaccccccagacccagcaggatgagctgtacatccacagcgagcccctgggcgtggtgctggtgattggcacctggaactaccccttcaacctgaccatccagcccatggtgggcgccatcgctgctggcaacagcgtggtgctgaagcccagcgagctgtctgagaacatggccagcctgctggccaccatcatcccccagtacctggacaaggacctgtaccctgtgatcaatggaggagtgcctgagaccacagagctgctgaaggagagatttgaccacatcctgtacacaggcagcactggagtgggcaagatcatcatgacagctgctgccaagcacctgacccctgtgaccctggagctgggcggcaagagcccctgctacgtggacaagaactgtgacctggatgtggcctgccgccgcatcgcctggggcaagttcatgaacagcggccagacctgtgtggccccagactacatcctgtgtgaccccagcatccagaaccagatcgtggagaagctgaagaagagcctgaaggagatcttcggccctgtgctgcccatcgtgtgtgtgcgcagcctggaggaggccatccagttcatcaaccagcgggagaagcccctggccctgtacatgttcagcagcaatgacaaggtgatcaagaagatgattgctgagaccagcagtggaggagtggccgccaatgatgtgattgtgcacatcaccctgcacagcctgccctttggaggagtgggcaacagcggcatgggcagctaccacggcaagaagagctttgagaccttcagccacagaagaagctgcctggtgcggcccctgatgaatgatgagggcctgaaggtgcgctacccacccagccctgccaagatgacccagcactag

SEQ ID NO: 143214 - DNA, 693 bp, synthetic construct
  misc_feature 1..693: note = Description of Artificial Sequence: Synthetic coding sequence
  source 1..693: mol_type = other DNA
atgagcaagatcagcgaggccgtgaagagggcccgggccgccttcagcagcggccgcacccggcccctgcagttccgcatccagcagctggaggccctgcagaggctcatccaggagcaggagcaggagctggtgggcgccctggccgctgacctgcacaagaatgagtggaatgcctactatgaggaggtggtgtatgtgctggaggagattgagtacatgatccagaagctgcctgagtgggccgcagatgagcctgtggagaagaccccccagacccagcaggatgagctgtacatccacagcgagcccctgggcgtggtgctggtgattggcacctggaactaccccttcaacctgaccatccagcccatggtgggcgccatcgctgctggcaacagcgtggtgctgaagcccagcgagctgtctgagaacatggccagcctgctggccaccatcatcccccagtacctggacaaggacctgtaccctgtgatcaatggaggagtgcctgagaccacagagctgctgaaggagagatttgaccacatcctgtacacaggcagcactggagtgggcaagatcatcatgacagctgctgccaagcacctgacccctgtgaccctggagctgggcggcaagagcccctgctacgtggacaagaactgtgacctggatgtggcctgcaggtag

SEQ ID NO: 143215 - DNA, 1119 bp, synthetic construct
  misc_feature 1..1119: note = Description of Artificial Sequence: Synthetic coding sequence
  source 1..1119: mol_type = other DNA
atgagcaagatcagcgaggccgtgaagagggcccgggccgccttcagcagcggccgcacccggcccctgcagttccgcatccagcagctggaggccctgcagaggctcatccaggagcaggagcaggagctggtgggcgccctggccgctgacctgcacaagaatgagtggaatgcctactatgaggaggtggtgtatgtgctggaggagattgagtacatgatccagaagctgcctgagtgggccgcagatgagcctgtggagaagaccccccagacccagcaggatgagctgtacatccacagcgagcccctgggcgtggtgctggtgattggcacctggaactaccccttcaacctgaccatccagcccatggtgggcgccatcgctgctggcaacagcgtggtgctgaagcccagcgagctgtctgagaacatggccagcctgctggccaccatcatcccccagtacctggacaaggacctgtaccctgtgatcaatggaggagtgcctgagaccacagagctgctgaaggagagatttgaccacatcctgtacacaggcagcactggagtgggcaagatcatcatgacagctgctgccaagcacctgacccctgtgaccctggagctgggcggcaagagcccctgctacgtggacaagaactgtgacctggatgtggcctgccgccgcatcgcctggggcaagttcatgaacagcggccagacctgtgtggccccagactacatcctgtgtgaccccagcatccagaaccagatcgtggagaagctgaagaagagcctgaaggagttctacggggaggatgccaagaagagccgggactatggccgcatcatcagcgcccggcacttccagagggtgatgggcctcatcgagggccagaaggtggcctatggaggcactggagatgctgccacccgctacatcgcccccaccatcctgacagatgtggacccccagagccctgtgatgcaggaggagatcttcggccctgtgctgcccatcgtgtgtgtgcgcagcctggaggaggccatccagttcatcaaccagcgggagaagcccctggccctgtacatgttcagcagcaatgacaagtag

SEQ ID NO: 143216 - DNA, 1362 bp, synthetic construct
  misc_feature 1..1362: note = Description of Artificial Sequence: Synthetic coding sequence
  source 1..1362: mol_type = other DNA
atgagcaagatcagcgaggccgtgaagagggcccgggccgccttcagcagcggccgcacccggcccctgcagttccgcatccagcagctggaggccctgcagaggctcatccaggagcaggagcaggagctggtgggcgccctggccgctgacctgcacaagaatgagtggaatgcctactatgaggaggtggtgtatgtgctggaggagattgagtacatgatccagaagctgcctgagtgggccgcagatgagcctgtggagaagaccccccagacccagcaggatgagctgtacatccacagcgagcccctgggcgtggtgctggtgattggcacctggaactaccccttcaacctgaccatccagcccatggtgggcgccatcgctgctggcaacagcgtggtgctgaagcccagcgagctgtctgagaacatggccagcctgctggccaccatcatcccccagtacctggacaaggacctgtaccctgtgatcaatggaggagtgcctgagaccacagagctgctgaaggagagatttgaccacatcctgtacacaggcagcactggagtgggcaagatcatcatgacagctgctgccaagcacctgacccctgtgaccctggagctgggcggcaagagcccctgctacgtggacaagaactgtgacctggatgtggcctgccgccgcatcgcctggggcaagttcatgaacagcggccagacctgtgtggccccagactacatcctgtgtgaccccagcatccagaaccagatcgtggagaagctgaagaagagcctgaaggagttctacggggaggatgccaagaagagccgggactatggccgcatcatcagcgcccggcacttccagagggtgatgggcctcatcgagggccagaaggtggcctatggaggcactggagatgctgccacccgctacatcgcccccaccatcctgacagatgtggacccccagagccctgtgatgcaggaggagatcttcggccctgtgctgcccatcgtgtgtgtgcgcagcctggaggaggccatccagttcatcaaccagcgggagaagcccctggccctgtacatgttcagcagcaatgacaaggtgatcaagaagatgattgctgagaccagcagtggaggagtggccgccaatgatgtgattgtgcacatcaccctgcacagcctgccctttggaggagtgggcaacagcggcatgggcagctaccacggcaagaagagctttgagaccttcagccacagaagaagctgcctggtgcggcccctgatgaatgatgagggcctgaaggtgcgctacccacccagccctgccaagatgacccagcactag

SEQ ID NO: 143217 - DNA, 1362 bp, synthetic construct; identical to SEQ ID NO: 143216
  misc_feature 1..1362: note = Description of Artificial Sequence: Synthetic coding sequence
  source 1..1362: mol_type = other DNA

SEQ ID NO: 143218 - DNA, 1203 bp, synthetic construct
  misc_feature 1..1203: note = Description of Artificial Sequence: Synthetic coding sequence
  source 1..1203: mol_type = other DNA
atgatccagaagctgcctgagtgggccgcagatgagcctgtggagaagaccccccagacccagcaggatgagctgtacatccacagcgagcccctgggcgtggtgctggtgattggcacctggaactaccccttcaacctgaccatccagcccatggtgggcgccatcgccgccggcaacagcgtggtgctgaagcccagcgagctgtctgagaacatggccagcctgctggccaccatcatcccccagtacctggacaaggacctgtaccctgtgatcaatggaggagtgcctgagaccacagagctgctgaaggagagatttgaccacatcctgtacacaggcagcactggagtgggcaagatcatcatgacagctgctgccaagcacctgacccctgtgaccctggagctgggcggcaagagcccctgctacgtggacaagaactgtgacctggatgtggcctgcagaagaattgcctggggcaagttcatgaacagcggccagacctgtgtggccccagactacatcctgtgtgaccccagcatccagaaccagatcgtggagaagctgaagaagagcctgaaggagttctatggagaagatgccaagaagagccgggactatggccgcatcatcagcgcccggcacttccagagggtgatgggcctgattgagggccagaaggtggcctacggcggcactggagatgctgccacccgctacatcgcccccaccatcctgacagatgtggacccccagagccctgtgatgcaggaggagatctttggacctgtgctgcccatcgtgtgtgtgcgcagcctggaggaggccatccagttcatcaaccagcgggagaagcccctggccctgtacatgttcagcagcaatgacaaggtgatcaagaagatgattgctgagaccagcagcggcggcgtggccgccaatgatgtgattgtgcacatcaccctgcacagcctgccctttggaggagtgggcaacagcggcatgggcagctaccacggcaagaagagctttgagaccttcagccaccggcgcagctgcctggtgcggcccctgatgaatgatgagggcctgaaggtgcgctacccacccagccctgccaagatgacccagcactggctgtcctggccctgggagaacagaagctgcagccccagccctgcccccctgctgtgctag

SEQ ID NO: 143219 - DNA, 1458 bp, synthetic construct
  misc_feature 1..1458: note = Description of Artificial Sequence: Synthetic coding sequence
  source 1..1458: mol_type = other DNA
atggagctggaggtgcggcgggtgcggcaggccttcctgagcggccgcagccggcccctgcgcttccggctgcagcagctggaggccctgcggaggatggtgcaggagcgggagaaggacatcctgacagccatcgctgctgacctgtgcaagtctgagttcaacgtgtacagccaggaggtgatcaccgtgctgggggagattgacttcatgctggagaacctgcctgagtgggtgacagccaagcctgtgaagaagaatgtgctgaccatgctggatgaggcctacatccagccccagcccctgggcgtggtgctgatcatcggggcctggaactacccctttgtgctgaccatccagcccctgattggagccatcgctgctggaaatgctgtgatcatcaagcccagcgagctgtctgaaaatacagccaagatcctggccaagctgctgccccagtacctggaccaggacctgtacatcgtcatcaatggaggagtggaggagaccacagagctgctgaagcagagatttgaccacatcttctacacaggcaacacagctgtgggcaagatcgtgatggaggccgccgccaagcacctgacccctgtgaccctggagctgggcggcaagagcccctgctacatcgacaaggactgtgacctggacatcgtgtgccgccgcatcacctggggcaagtacatgaactgtggccagacctgcatcgccccagactacatcctgtgtgaggccagcctgcagaaccagatcgtgtggaagatcaaggagaccgtgaaggagttctatggagagaacatcaaggagagcccagactatgagcgcatcatcaacctgcggcacttcaagaggatcctgagcctgctggagggccagaagatcgccttcggcggggagacagatgaggccacccgctacatcgcccccaccgtgctgacagatgtggaccccaagaccaaggtgatgcaggaggagatcttcggccccatcctgcccatcgtgcctgtgaagaatgtggatgaggccatcaacttcatcaatgaaagagagaagcccctggccctgtatgtgttcagccacaaccacaagctgatcaagaggatgattgatgagaccagcagcggcggcgtgactggaaatgatgtgatcatgcacttcaccctgaacagcttcccctttggaggagtgggcagcagcggcatgggcgcctaccacggcaagcacagctttgacaccttcagccaccagaggccctgcctgctgaagagcctgaagcgggagggcgccaacaagctgcgctacccacccaacagccagagcaaggtggactggggcaagttcttcctgctgaagcgcttcaacaaggagaagctgggcctgctgctgctgaccttcctgggcatcgtggccgctgtgctggtgaaggccgagtactactag

SEQ ID NO: 143220 - DNA, 1527 bp, synthetic construct
  misc_feature 1..1527: note = Description of Artificial Sequence: Synthetic coding sequence
  source 1..1527: mol_type = other DNA
atggagctggaggtgcggcgggtgcggcaggccttcctgagcggccgcagccggcccctgcgcttccggctgcagcagctggaggccctgcggaggatggtgcaggagcgggagaaggacatcctgacagccatcgctgctgacctgtgcaagtctgagttcaacgtgtacagccaggaggtgatcaccgtgctgggggagattgacttcatgctggagaacctgcctgagtgggtgacagccaagcctgtgaagaagaatgtgctgaccatgctggatgaggcctacatccagccccagcccctgggcgtggtgctgatcatcggggcctggaactacccctttgtgctgaccatccagcccctgattggagccatcgctgctggaaatgctgtgatcatcaagcccagcgagctgtctgaaaatacagccaagatcctggccaagctgctgccccagtacctggaccaggacctgtacatcgtcatcaatggaggagtggaggagaccacagagctgctgaagcagagatttgaccacatcttctacacaggcaacacagctgtgggcaagatcgtgatggaggccgccgccaagcacctgacccctgtgaccctggagctgggcggcaagagcccctgctacatcgacaaggactgtgacctggacatcgtgtgccgccgcatcacctggggcaagtacatgaactgtggccagacctgcatcgccccagactacatcctgtgtgaggccagcctgcagaaccagatcgtgtggaagatcaaggagaccgtgaaggagttctatggagagaacatcaaggagagcccagactatgagcgcatcatcaacctgcggcacttcaagaggatcctgagcctgctggagggccagaagatcgccttcggcggggagacagatgaggccacccgctacatcgcccccaccgtgctgacagatgtggaccccaagaccaaggtgatgcaggaggagatcttcggccccatcctgcccatcgtgcctgtgaagaatgtggatgaggccatcaacttcatcaatgaaagagagaagcccctggccctgtatgtgttcagccacaaccacaagctgatcaagaggatgattgatgagaccagcagcggcggcgtgactggaaatgatgtgatcatgcacttcaccctgaacagcttcccctttggaggagtgggcagcagcggcatgggcgcctaccacggcaagcacagctttgacaccttcagccaccagaggccctgcctgctgaagagcctgaagcgggagggcgccaacaagctgcgctacccacccaacagccagagcaaggtggactggggcaagttcttcctgctgaagcgcttcaacaaggagaagctgggcctgctgctgctgaccttcctgggcatcgtggccgctgtgctggtgaagaagtaccaggccgtgctgcggaggaaggccctgctgatcttcctggtggtgcaccggctgcgctggagcagcaagcagaggtag

SEQ ID NO: 143221 - DNA, 1458 bp, synthetic construct; identical to SEQ ID NO: 143219
  misc_feature 1..1458: note = Description of Artificial Sequence: Synthetic coding sequence
  source 1..1458: mol_type = other DNA

SEQ ID NO: 143222 - DNA, 501 bp, synthetic construct
  misc_feature 1..501: note = Description of Artificial Sequence: Synthetic coding sequence
  source 1..501: mol_type = other DNA
atggagctggaggtgcggcgggtgcggcaggccttcctgagcggccgcagccggcccctgcgcttccggctgcagcagctggaggccctgcggaggatggtgcaggagcgggagaaggacatcctgacagccatcgctgctgacctgtgcaagtctgagttcaacgtgtacagccaggaggtgatcaccgtgctgggggagattgacttcatgctggagaacctgcctgagtgggtgacagccaagcctgtgaagaagaatgtgctgaccatgctggatgaggcctacatccagccccagcccctgggcgtggtgctgatcatcggggcctggaactacccctttgtgctgaccatccagcccctgattggagccatcgctgctggaaatgctgtgatcatcaagcccagcgagctgtctgaaaatacagccaagatcctggccaagctgctgccccagtacctggaccaggacctgtacatcgtcatcaatggaggatag

SEQ ID NO: 143223 - DNA, 1158 bp, synthetic construct
  misc_feature 1..1158: note = Description of Artificial Sequence: Synthetic coding sequence
  source 1..1158: mol_type = other DNA
atgaaggatgagcccaggagcaccaacctcttcatgaagctggacagcgtcttcatctggaaggagcccttcggcctggtgctgatcatcgccccctggaactaccccctgaacctgaccctggtgctgctggtgggcgccctggccgccggcagctgtgtggtgctgaagcccagcgagatcagccagggcacagagaaggtgctggccgaggtgctgccccagtacctggaccagagctgctttgctgtggtgctgggcggcccccaggagaccggccagctgctggagcacaagctggactacatcttcttcaccggcagcccccgggtgggcaagatcgtgatgacagctgccaccaagcacctgacccctgtgaccctggagctgggcggcaagaacccctgctacgtggatgacaactgtgacccccagacagtggccaacagagtggcctggttctgctacttcaatgccggccagacctgtgtggccccagactatgtgctgtgcagccctgagatgcaggagcggctgctgcctgccctgcagagcaccatcacccgcttctatggagatgacccccagagcagccccaacctgggccacatcatcaaccagaagcagttccagaggctgcgggccctgctgggctgcagccgggtggccatcggcggccagagcaatgaaagtgaccgctacatcgcccccaccgtgctggtggatgtgcaggagacagagcctgtgatgcaggaggagatcttcggccccatcctgcccatcgtgaatgtgcagagcgtggatgaggccatcaagttcatcaaccggcaggagaagcccctggccctgtatgccttcagcaacagcagccaggtggtgaaccagatgctggagaggaccagcagcggcagctttggaggaaatgaaggcttcacctacatcagcctgctgtctgtgccctttggaggagtgggccacagcggcatgggccgctaccacggcaagttcacctttgacaccttcagccaccacaggacctgcctgctggcccccagcggcctggagaagctgaaggagatccactacccaccctacacagactggaaccagcagctgctgcgctggggcatgggcagccagagctgcaccctgctgtag

SEQ ID NO: 143224 - DNA, 447 bp, synthetic construct
  misc_feature 1..447: note = Description of Artificial Sequence: Synthetic coding sequence
  source 1..447: mol_type = other DNA
atgaaggatgagcccaggagcaccaacctcttcatgaagctggacagcgtcttcatctggaaggagcccttcggcctggtgctgatcatcgccccctggaactaccccctgaacctgaccctggtgctgctggtgggcgccctggccgccggcagctgtgtggtgctgaagcccagcgagatcagccagggcacagagaaggtgctggccgaggtgctgccccagtacctggaccagagctgctttgctgtggtgctgggcggcccccaggagaccggccagctgctggagcacaagctggactacatcttcttcaccggcagcccccgggtgggcaagatcgtgatgacagctgccaccaagcacctgacccctgtgaccctggagctgggcggcaagaacccctgctacgtggatgacaactgtgacccccagacagtggcctag

SEQ ID NO: 143225 - DNA, 288 bp, synthetic construct
  misc_feature 1..288: note = Description of Artificial Sequence: Synthetic coding sequence
  source 1..288: mol_type = other DNA
atgaaggatgagcccaggagcaccaacctcttcatgaagctggacagcgtcttcatctggaaggagcccttcggcctggtgctgatcatcgccccctggaactaccccctgaacctgaccctggtgctgctggtgggcgccctggccgccggcagctgtgtggtgctgaagcccagcgagatcagccagggcacagagaaggtgctggccgaggtgctgccccagtacctggaccagagctgctttgctgtggtgctgggcggcccccaggagaccggccagctgtag

SEQ ID NO: 143226 - DNA, 1158 bp, synthetic construct; identical to SEQ ID NO: 143223
  misc_feature 1..1158: note = Description of Artificial Sequence: Synthetic coding sequence
  source 1..1158: mol_type = other DNA

SEQ ID NO: 143227 - DNA, 1692 bp, synthetic construct
  misc_feature 1..1692: note = Description of Artificial Sequence: Synthetic coding sequence
  source 1..1692: mol_type = other DNA
atgctgctgcctgccccagccctgcggcgggccctgctgagccggccctggacaggagctggcctgcgctggaagcacaccagcagcctgaaggtggccaatgaacctgtgctggccttcacccagggcagccctgagagagatgccctgcagaaggccctgaaggacctgaagggccgcatggaggccatcccctgtgtggtgggagatgaggaggtgtggaccagtgatgtgcagtaccaggtgagccccttcaaccacggccacaaggtggccaagttctgctatgctgacaagagcctgctgaacaaggccatcgaggccgccctggccgccaggaaggagtgggacctgaagcccatcgctgaccgggcccagatcttcctgaaggctgctgacatgctgagcggccccaggagagctgagatcctggccaagaccatggtgggccagggcaagacagtcatccaggccgagattgatgctgctgctgagctgattgacttcttccgcttcaatgccaagtatgctgtggagctggagggccagcagcccatctctgtgccccccagcaccaacagcacagtgtaccggggcctggagggctttgtggccgccatcagccccttcaacttcaccgccatcggcggcaacctggccggggccccagccctgatgggaaatgtggtgctgtggaagcccagcgacacagccatgctggccagctatgctgtgtaccgcatcctgcgggaggccggcctgccccccaacatcatccagtttgtgcctgcagatggccccctgtttggagacacagtgaccagcagcgagcacctgtgtggcatcaacttcaccggctctgtgcccaccttcaagcacctgtggaagcaggtggcccagaacctggaccgcttccacaccttcccccggctggccggggagtgtggcggcaagaacttccactttgtgcacaggtctgcagatgtggagagcgtggtgtctggcaccctgcggagcgcctttgaatatggaggccagaagtgcagcgcctgcagccggctgtatgtgccccacagcctgtggccccagatcaagggccgcctgctggaggagcacagccgcatcaaggtgggggaccctgctgaggactttggcaccttcttctctgctgtgattgatgccaagagctttgcccgcatcaagaagtggctggagcacgcccggagcagccccagcctgaccatcctggccggcggcaaatgtgatgacagcgtgggctactttgtggagccctgcatcgtggagagcaaggacccccaggagcccatcatgaaggaggagatctttggacctgtgctgtctgtgtatgtgtacccagatgacaagtacaaggagaccctgcagctggtggacagcaccaccagctatggcctgactggagctgtgttcagccaggacaaggatgtggtgcaggaggccaccaaggtgctgagaaatgctgctggcaacttctacatcaatgacaagagcacaggcagcatcgtgggccagcagccctttggaggagcccgggccagcggcaccaatgacaagccaggcggcccccactacatcctgcgctggaccagcccccaggtgatcaaggagacccacaagcccctgggggactggagctatgcctacatgcagtag

SEQ ID NO: 143228 - DNA, 588 bp, synthetic construct
  misc_feature 1..588: note = Description of Artificial Sequence: Synthetic coding sequence
  source 1..588: mol_type = other DNA
atggaggccatcccctgtgtggtgggagatgaggaggtgtggaccagtgatgtgcagtaccaggtgagccccttcaaccacggccacaaggtggccaagttctgctatgctgacaagagcctgctgaacaaggccatcgaggccgccctggccgccaggaaggagtgggacctgaagcccatcgctgaccgggcccagatcttcctgaaggctgctgacatgctgagcggccccaggagagctgagatcctggccaagaccatggtgggccagggcaagacagtcatccaggccgagattgatgctgctgctgagctgattgacttcttccgcttcaatgccaagtatgctgtggagctggagggccagcagcccatctctgtgccccccagcaccaacagcacagtgtaccggggcctggagggctttgtggccgccatcagccccttcaacttcaccgccatcggcggcaacctggccggggccccagccctgatgctgcgggagggcgtggtgaccctgcccctgtgccagatgaccaagctgcggcacacagctgtgacctacctggcccggctgagtgactag

SEQ ID NO: 143229 - DNA, 633 bp, synthetic construct
  misc_feature 1..633: note = Description of Artificial Sequence: Synthetic coding sequence
  source 1..633: mol_type = other DNA
atgctgctgcctgccccagccctgcggcgggccctgctgagccggccctggacaggagctggcctgcgctggaagcacaccagcagcctgaaggtggccaatgaacctgtgctggccttcacccagggcagccctgagagagatgccctgcagaaggccctgaaggacctgaagggccgcatggaggccatcccctgtgtggtgggagatgaggaggtgtggaccagtgatgtgcagtaccaggtgagcagcctgctgaacaaggccatcgaggccgccctggccgccaggaaggagtgggacctgaagcccatcgctgaccgggcccagatcttcctgaaggctgctgacatgctgagcggccccaggagagctgagatcctggccaagaccatggtgggccagggcaagacagtcatccaggccgagattgatgctgctgctgagctgattgacttcttccgcttcaatgccaagtatgctgtggagctggagggccagcagcccatctctgtgccccccagcaccaacagcacagtgtaccggggcctggagggctttgtggccgccatcagccccttcaacttcaccgccatcggcggcaacctggccggggccccagccctgatgtag

SEQ ID NO: 143230 - DNA, 1692 bp, synthetic construct; identical to SEQ ID NO: 143227
  misc_feature 1..1692: note = Description of Artificial Sequence: Synthetic coding sequence
  source 1..1692: mol_type = other DNA

SEQ ID NO: 143231 - DNA, 645 bp, synthetic construct
  misc_feature 1..645: note = Description of Artificial Sequence: Synthetic coding sequence
  source 1..645: mol_type = other DNA
atgctgctgcctgccccagccctgcggcgggccctgctgagccggccctggacaggagctggcctgcgctggaagcacaccagcagcctgaaggtggccaatgaacctgtgctggccttcacccagggcagccctgagagagatgccctgcagaaggccctgaaggacctgaagggccgcatggaggccatcccctgtgtggtgggagatgaggaggtgtggaccagtgatgtgcagtaccaggtgagcagcctgctgaacaaggccatcgaggccgccctggccgccaggaaggagtgggacctgaagcccatcgctgaccgggcccagatcttcctgaaggctgctgacatgctgagcggccccaggagagctgagatcctggccaagaccatggtgggccagggcaagacagtcatccaggccgagattgatgctgctgctgagctgattgacttcttccgcttcaatgccaagtatgctgtggagctggagggccagcagcccatctctgtgccccccagcaccaacagcacagtgtaccggggcctggagggctttgtggccgccatcagccccttcaacttcaccgccatcggcggcaacctggccggggccccagccctgatggtgcgctgtggctag

SEQ ID NO: 143232 - DNA, 462 bp, synthetic construct
  misc_feature 1..462: note = Description of Artificial Sequence: Synthetic coding sequence
  source 1..462: mol_type = other DNA
aacaaggccatcgaggccgccctggccgccaggaaggagtgggacctgaagcccatcgctgaccgggcccagatcttcctgaaggctgctgacatgctgagcggccccaggagagctgagatcctggccaagaccatggtgggccagggcaagacagtcatccaggccgagattgatgctgctgctgagctgattgacttcttccgcttcaatgccaagtatgctgtggagctggagggccagcagcccatctctgtgccccccagcaccaacagcacagtgtaccggggcctggagggctttgtggccgccatcagccccttcaacttcaccgccatcggcggcaacctggccggggccccagccctgatgctgcgggagggcgtggtgaccctgcccctgtgccagatgaccaagctgcggcacacagctgtgacctacctggcccggctgagtgactag

SEQ ID NO: 143233 - DNA, 1512 bp, synthetic construct
  misc_feature 1..1512: note = Description of Artificial Sequence: Synthetic coding sequence
  source 1..1512: mol_type = other DNA
atggaggccatcccctgtgtggtgggagatgaggaggtgtggaccagtgatgtgcagtaccaggtgagccccttcaaccacggccacaaggtggccaagttctgctatgctgacaagagcctgctgaacaaggccatcgaggccgccctggccgccaggaaggagtgggacctgaagcccatcgctgaccgggcccagatcttcctgaaggctgctgacatgctgagcggccccaggagagctgagatcctggccaagaccatggtgggccagggcaagacagtcatccaggccgagattgatgctgctgctgagctgattgacttcttccgcttcaatgccaagtatgctgtggagctggagggccagcagcccatctctgtgccccccagcaccaacagcacagtgtaccggggcctggagggctttgtggccgccatcagccccttcaacttcaccgccatcggcggcaacctggccggggccccagccctgatgggaaatgtggtgctgtggaagcccagcgacacagccatgctggccagctatgctgtgtaccgcatcctgcgggaggccggcctgccccccaacatcatccagtttgtgcctgcagatggccccctgtttggagacacagtgaccagcagcgagcacctgtgtggcatcaacttcaccggctctgtgcccaccttcaagcacctgtggaagcaggtggcccagaacctggaccgcttccacaccttcccccggctggccggggagtgtggcggcaagaacttccactttgtgcacaggtctgcagatgtggagagcgtggtgtctggcaccctgcggagcgcctttgaatatggaggccagaagtgcagcgcctgcagccggctgtatgtgccccacagcctgtggccccagatcaagggccgcctgctggaggagcacagccgcatcaaggtgggggaccctgctgaggactttggcaccttcttctctgctgtgattgatgccaagagctttgcccgcatcaagaagtggctggagcacgcccggagcagccccagcctgaccatcctggccggcggcaaatgtgatgacagcgtgggctactttgtggagccctgcatcgtggagagcaaggacccccaggagcccatcatgaaggaggagatctttggacctgtgctgtctgtgtatgtgtacccagatgacaagtacaaggagaccctgcagctggtggacagcaccaccagctatggcctgactggagctgtgttcagccaggacaaggatgtggtgcaggaggccaccaaggtgctgagaaatgctgctggcaacttctacatcaatgacaagagcacaggcagcatcgtgggccagcagccctttggaggagcccgggccagcggcaccaatgacaagccaggcggcccccactacatcctgcgctggaccagcccccaggtgatcaaggagacccacaagcccctgggggactggagctatgcctacatgcagtag

SEQ ID NO: 143234 - DNA, 1539 bp, synthetic construct
  misc_feature 1..1539: note = Description of Artificial Sequence: Synthetic coding sequence
  source 1..1539: mol_type = other DNA
atgctgctgcctgccccagccctgcggcgggccctgctgagccggccctggacaggagctggcctgcgctggaagcacaccagcagcctgaaggtggccaatgaacctgtgctggccttcacccagggcagccctgagagagatgccctgcagaaggccctgaaggacctgaagggccgcatggaggccatcccctgtgtggtgggagatgaggaggtgtggaccagtgatgtgcagtaccaggtgagccccttcaaccacggccacaaggtggccaagttctgctatgctgacaagagcctgctgaacaaggccatcgaggccgccctggccgccaggaaggagtgggacctgaagcccatcgctgaccgggcccagatcttcctgaaggctgctgacatgctgagcggccccaggagagctgagatcctggccaagaccatggtgggccagggcaagacagtcatccaggccgagattgatgctgctgctgagctgattgacttcttccgcttcaatgccaagtatgctgtggagctggagggccagcagcccatctctgtgccccccagcaccaacagcacagtgtaccggggcctggagggctttgtggccgccatcagccccttcaacttcaccgccatcggcggcaacctggccggggccccagccctgatgggaaatgtggtgctgtggaagcccagcgacacagccatgctggccagctatgctgtgtaccgcatcctgcgggaggccggcctgccccccaacatcatccagtttgtgcctgcagatggccccctgtttggagacacagtgaccagcagcgagcacctgtgtggcatcaacttcaccggctctgtgcccaccttcaagcacctgtggaagcaggtggcccagaacctggaccgcttccacaccttcccccggctggccggggagtgtggcggcaagaacttccactttgtgcacaggtctgcagatgtggagagcgtggtgtctggcaccctgcggagcgcctttgaatatggaggccagaagtgcagcgcctgcagccggctgtatgtgccccacagcctgtggccccagatcaagggccgcctgctggaggagcacagccgcatcaaggtgggggaccctgctgaggactttggcaccttcttctctgctgtgattgatgccaaggagatcttcggccctgtgctgtctgtgtatgtgtacccagatgacaagtacaaggagaccctgcagctggtggacagcaccaccagctatggcctgaccggggctgtgttcagccaggacaaggatgtggtgcaggaggccaccaaggtgctgagaaatgctgctggcaacttctacatcaatgacaagagcacaggcagcatcgtgggccagcagccctttggaggagcccgggccagcggcaccaatgacaagccaggcggcccccactacatcctgcgctggaccagcccccaggtgatcaaggagacccacaagcccctgggggactggagctatgcctacatgcagtag

SEQ ID NO: 143235 - DNA, 1647 bp, synthetic construct
  misc_feature 1..1647: note = Description of Artificial Sequence: Synthetic coding sequence
  source 1..1647: mol_type = other DNA
atggccacctgcatctggctgcggagctgtggggcccggcggctgggcagcaccttccctggctgccgcctgcggccccgggccggcggcctggtgcctgccagcggccctgcccctggccctgcccagctgcgctgctacgccggccgcctggccggcctgtctgctgccctgctgaggacagacagctttgtgggcggccgctggctgcctgctgctgccaccttccctgtgcaggaccctgccagcggggccgccctgggcatggtggccgactgtggggtgcgggaggcccgggctgctgtgcgggccgcctatgaggccttctgccgctggagggaggtgtctgccaaggagaggagcagcctgctgaggaagtggtacaacctgatgatccagaacaaggatgacctggcccgcatcatcacagctgagagcggcaagcccctgaaggaggcccacggggagatcctgtacagcgccttcttcctggagtggttcagcgaggaggcccggcgggtgtatggagacatcatccacaccccagccaaggaccggcgggccctggtgctgaagcagcccatcggcgtggccgctgtgatcaccccctggaacttccccagcgccatgatcaccaggaaggtgggcgccgccctggccgccggctgcaccgtggtggtgaagccagctgaggacacccccttcagcgccctggccctggccgaggtgaaccagggcttcctgctggacctggaccccctgctgctggccagccaggccggcatccccagcggcgtgtacaacgtcatcccctgcagcaggaagaatgccaaggaggtgggggaggccatctgcacagaccccctggtgtccaagatctccttcaccggcagcaccaccaccgggaagatcctgctgcaccacgccgccaacagcgtgaagagggtgtccatggagctgggcggcctggcccccttcatcgtgtttgattctgccaacgtggaccaggccgtggccggggccatggccagcaagttcaggaacacaggccagacctgtgtgtgcagcaaccagttcctggtgcagaggggcatccatgatgcctttgtgaaggcctttgctgaggccatgaagaagaacctgcgggtgggcaatggatttgaggagggcaccacccagggccccctcatcaatgagaaggctgtggagaaggtggagaagcaggtgaatgatgctgtgtccaaaggagccaccgtggtgactggaggcaagaggcaccagctgggcaagaacttctttgagcccaccctgctgtgcaatgtgacccaggacatgctgtgcacccatgaggagaccttcggccccctggcccctgtgatcaagtttgacacagaggaggaggccatcgccatcgccaatgctgctgatgtgggcctggccggctacttctacagccaggaccctgcccagatctggagggtggccgagcagctggaggtgggcatggtgggcgtgaatgaaggcctcatcagctctgtggagtgcccctttggaggagtgaagcagagcggcctgggccgggagggcagcaaatatggaattgatgagtacctggagctgaagtatgtgtgctatggaggcctgtag

SEQ ID NO: 143236 - DNA, 1608 bp, synthetic construct
  misc_feature 1..1608: note = Description of Artificial Sequence: Synthetic coding sequence
  source 1..1608: mol_type = other DNA
atggccacctgcatctggctgcggagctgtggggcccggcggctgggcagcaccttccctggctgccgcctgcggccccgggccggcggcctggtgcctgccagcggccctgcccctggccctgcccagctgcgctgctacgccggccgcctggccggcctgtctgctgccctgctgaggacagacagctttgtgggcggccgctggctgcctgctgctgccaccttccctgtgcaggaccctgccagcggggccgccctgggcatggtggccgactgtggggtgcgggaggcccgggctgctgtgcgggccgcctatgaggccttctgccgctggagggaggtgtctgccaaggagaggagcagcctgctgaggaagtggtacaacctgatgatccagaacaaggatgacctggcccgcatcatcacagctgagagcggcaagcccctgaaggaggcccacggggagatcctgtacagcgccttcttcctggagtggttcagcgaggaggcccggcgggtgtatggagacatcatccacaccccagccaaggaccggcgggccctggtgctgaagcagcccatcggcgtggccgctgtgatcaccccctggaacttccccagcgccatgatcaccaggaaggtgggcgccgccctggccgccggctgcaccgtggtggtgaagccagctgaggacacccccttcagcgccctggccctggccgagctggccagccaggccggcatccccagcggcgtgtacaacgtcatcccctgcagcaggaagaatgccaaggaggtgggggaggccatctgcacagaccccctggtgtccaagatctccttcaccggcagcaccaccaccgggaagatcctgctgcaccacgccgccaacagcgtgaagagggtgtccatggagctgggcggcctggcccccttcatcgtgtttgacagcgccaacgtggaccaggccgtggccggggccatggccagcaagttcaggaacacaggccagacctgtgtgtgcagcaaccagttcctggtgcagaggggcatccatgatgcctttgtgaaggcctttgctgaggccatgaagaagaacctgcgggtgggcaatggatttgaggagggcaccacccagggccccctcatcaatgagaaggctgtggagaaggtggagaagcaggtgaatgatgctgtgtccaagggggccaccgtggtgactggaggcaagaggcaccagctgggcaagaacttctttgagcccaccctgctgtgcaatgtgacccaggacatgctgtgcacccatgaggagaccttcggccccctggcccctgtgatcaagtttgacacagaggaggaggccatcgccatcgccaatgctgctgatgtgggcctggccggctacttctacagccaggaccctgcccagatctggagggtggccgagcagctggaggtgggcatggtgggcgtgaatgaaggcctcatcagctctgtggagtgcccctttggaggagtgaagcagagcggcctgggccgggagggcagcaaatatggaattgatgagtacctggagctgaagtatgtgtgctacggcggcctgtag

SEQ ID NO: 143237 - DNA, 1344 bp, synthetic construct
  misc_feature 1..1344: note = Description of Artificial Sequence: Synthetic coding sequence
  source 1..1344: mol_type = other DNA
atggtggccgactgtggggtgcgggaggcccgggctgctgtgcgggccgcctatgaggccttctgccgctggagggaggtgtctgccaaggagaggagcagcctgctgaggaagtggtacaacctgatgatccagaacaaggatgacctggcccgcatcatcacagctgagagcggcaagcccctgaaggaggcccacggggagatcctgtacagcgccttcttcctggagtggttcagcgaggaggcccggcgggtgtatggagacatcatccacaccccagccaaggaccggcgggccctggtgctgaagcagcccatcggcgtggccgctgtgatcaccccctggaacttccccagcgccatgatcaccaggaaggtgggcgccgccctggccgccggctgcaccgtggtggtgaagccagctgaggacacccccttcagcgccctggccctggccgagctggccagccaggccggcatccccagcggcgtgtacaacgtcatcccctgcagcaggaagaatgccaaggaggtgggggaggccatctgcacagaccccctggtgtccaagatctccttcaccggcagcaccaccaccgggaagatcctgctgcaccacgccgccaacagcgtgaagagggtgtccatggagctgggcggcctggcccccttcatcgtgtttgacagcgccaacgtggaccaggccgtggccggggccatggccagcaagttcaggaacacaggccagacctgtgtgtgcagcaaccagttcctggtgcagaggggcatccatgatgcctttgtgaaggcctttgctgaggccatgaagaagaacctgcgggtgggcaatggatttgaggagggcaccacccagggccccctcatcaatgagaaggctgtggagaaggtggagaagcaggtgaatgatgctgtgtccaagggggccaccgtggtgactggaggcaagaggcaccagctgggcaagaacttctttgagcccaccctgctgtgcaatgtgacccaggacatgctgtgcacccatgaggagaccttcggccccctggcccctgtgatcaagtttgacacagaggaggaggccatcgccatcgccaatgctgctgatgtgggcctggccggctacttctacagccaggaccctgcccagatctggagggtggccgagcagctggaggtgggcatggtgggcgtgaatgaaggcctcatcagctctgtggagtgcccctttggaggagtgaagcagagcggcctgggccgggagggcagcaaatatggaattgatgagtacctggagctgaagtatgtgtgctacggcggcctgtag

SEQ ID NO: 143238 - DNA, 1608 bp, synthetic construct
  misc_feature 1..1608: note = Description of Artificial Sequence: Synthetic coding sequence
  source 1..1608: mol_type = other DNA
atggccgccctgctggccgctgctgctgtgcgggcccgcatcctgcaggtgagcagcaaggtgaagagcagccccacctggtacagcgccagcagcttcagcagctctgtgcccaccgtgaagctgttcatcggcggcaagtttgtggagagcaagagtgacaagtggattgacatccacaacccagccaccaatgaagtcatcggccgggtgccccaggccaccaaggccgagatggatgctgccatcgccagctgcaagagggccttccctgcctgggccgacacctctgtgctgagccggcagcaggtgctgctgcgctaccagcagctgatcaaggagaacctgaaggagatcgccaagctgatcaccctggagcagggcaagaccctggctgatgctgaaggagatgtgttccggggcctgcaggtggtggagcacgcctgcagcgtgaccagcctgatgatgggagagaccatgcccagcatcaccaaggacatggacctgtacagctaccgcctgcccctgggcgtgtgtgccggcatcgcccccttcaacttccctgccatgatccccctgtggatgttccccatggccatggtgtgtggcaacaccttcctgatgaagcccagcgagcgggtgcctggggccaccatgctgctggccaagctgctgcaggacagcggggccccagatggcaccctgaacatcatccacggccagcacgaggccgtgaacttcatctgtgaccacccagacatcaaggccatcagctttgtgggcagcaacaaggccggggagtacatctttgagcggggcagccgccacggcaagagggtgcaggccaacatgggcgccaagaaccacggcgtggtgatgccagatgccaacaaggagaacaccctgaaccagctggtgggcgccgccttcggggctgctggccagcgctgcatggccctgagcacagctgtgctggtgggggaggccaagaagtggctgcctgagctggtggagcacgccaagaacctgcgggtgaatgctggggaccagcctggagctgacctgggccccctcatcaccccccaggccaaggagcgggtgtgcaacctgattgattctggcaccaaggagggcgccagcatcctgctggatggcaggaagatcaaggtgaagggctatgaaaatggaaactttgtgggccccaccatcatcagcaatgtgaagcccaacatgacctgctacaaggaggagatctttggacctgtgctggtggtgctggagacagagaccctggatgaggccatccagatcgtgaacaacaacccctatggaaatggaacagccatcttcaccaccaatggagccacagccaggaaatatgcccacctggtggatgtgggccaggtgggcgtgaatgtgcccatccctgtgcccctgcccatgttctccttcaccggcagccgcagcagcttccggggggacaccaacttctacggcaagcagggcatccagttctacacccagctgaagaccatcaccagccagtggaaggaggaggatgccaccctgagcagccctgctgtggtgatgcccaccatgggccgctag

SEQ ID NO: 143239 - DNA, 1620 bp, synthetic construct
  misc_feature 1..1620: note = Description of Artificial Sequence: Synthetic coding sequence
  source 1..1620: mol_type = other DNA
atgtggaggctgccccgggccctgtgtgtgcacgccgccaagaccagcaagctgagcggcccctggagcaggcctgctgccttcatgagcaccctgctgatcaaccagccccagtatgcctggctgaaggagctgggcctgcgggaggagaatgaaggagtgtacaacggctcctggggcggccgcggggaggtgatcaccacctactgcccagccaacaatgagcccatcgcccgggtgcggcaggcctctgtggccgactatgaggagaccgtgaagaaggcccgggaggcctggaagatctgggccgacatcccagcccccaagagaggagaaattgtgcggcagattggagatgccctgcgggagaagatccaggtgctgggcagcctggtgtccctggagatgggcaagatcctggtggagggcgtgggggaggtgcaggagtatgtggacatctgtgactatgctgtgggcctgagcaggatgattggaggccccatcctgcccagcgagaggagcggccacgccctgattgagcagtggaaccctgtgggcctggtgggcatcatcacagccttcaacttccctgtggccgtgtatggctggaacaatgccatcgccatgatctgtggaaatgtgtgcctgtggaagggggcccccaccaccagcctcatctctgtggccgtgaccaagatcatcgccaaggtgctggaggacaacaagctgcccggggccatctgcagcctgacctgtggcggcgctgacattggaacagccatggccaaggatgagcgggtgaacctgctgtccttcaccggcagcacccaggtgggcaagcaggtgggcctgatggtgcaggagcgcttcggccgcagcctgctggagctgggcggcaacaatgccatcatcgcctttgaagatgctgacctgagcctggtggtgcccagcgccctgtttgctgctgtgggcacagctggccagcgctgcaccacagcccggcggctcttcatccacgagagcatccatgatgaggtggtgaaccggctgaagaaggcctatgcccagatccgggtgggcaacccctgggaccccaacgtgctgtatggccccctgcacaccaagcaggccgtgtccatgttcctgggcgctgtggaggaggccaagaaggagggcggcaccgtggtgtatggaggcaaggtgatggacaggcctggcaactacgtggagcccaccatcgtgacaggcctgggccatgatgccagcatcgcccacacagagacctttgcccccatcctgtatgtgttcaagttcaagaatgaggaggaggtgtttgcctggaacaatgaggtgaagcagggcctgagcagcagcatcttcaccaaggacctgggccgcatcttccgctggctgggccccaagggcagtgactgtggcatcgtgaatgtgaacatccccaccagcggggctgagatcggcggggccttcggcggggagaagcacactggaggcggccgggagagcggcagtgatgcctggaagcagtacatgaggaggagcacctgcaccatcaactacagcaaggacctgcccctggcccagggcatcaagttccagtag

SEQ ID NO: 143240 - DNA, 1044 bp, synthetic construct
  misc_feature 1..1044: note = Description of Artificial Sequence: Synthetic coding sequence
  source 1..1044: mol_type = other DNA
atgtggaggctgccccgggccctgtgtgtgcacgccgccaagaccagcaagctgagcggcccctggagcaggcctgctgccttcatgagcaccagcctcatctctgtggccgtgaccaagatcatcgccaaggtgctggaggacaacaagctgcccggggccatctgcagcctgacctgtggcggcgctgacattggaacagccatggccaaggatgagcgggtgaacctgctgtccttcaccggcagcacccaggtgggcaagcaggtgggcctgatggtgcaggagcgcttcggccgcagcctgctggagctgggcggcaacaatgccatcatcgcctttgaagatgctgacctgagcctggtggtgcccagcgccctgtttgctgctgtgggcacagctggccagcgctgcaccacagcccggcggctcttcatccacgagagcatccatgatgaggtggtgaaccggctgaagaaggcctatgcccagatccgggtgggcaacccctgggaccccaacgtgctgtatggccccctgcacaccaagcaggccgtgtccatgttcctgggcgctgtggaggaggccaagaaggagggcggcaccgtggtgtatggaggcaaggtgatggacaggcctggcaactacgtggagcccaccatcgtgacaggcctgggccatgatgccagcatcgcccacacagagacctttgcccccatcctgtatgtgttcaagttcaagaatgaggaggaggtgtttgcctggaacaatgaggtgaagcagggcctgagcagcagcatcttcaccaaggacctgggccgcatcttccgctggctgggccccaagggcagtgactgtggcatcgtgaatgtgaacatccccaccagcggggctgagatcggcggggccttcggcggggagaagcacactggaggcggccgggagagcggcagtgatgcctggaagcagtacatgaggaggagcacctgcaccatcaactacagcaaggacctgcccctggcccagggcatcaagttccagtag

SEQ ID NO: 143241 - DNA, 1509 bp, synthetic construct
  misc_feature 1..1509: note = Description of Artificial Sequence: Synthetic coding sequence
  source 1..1509: mol_type = other DNA
atgggcagccctggccgcggggccggcctgtacttcagcagcagccagggcctgggcctcatccccagccctggcctgtccatgtggaggctgccccgggccctgtgtgtgcatgctgccaagaccagcaagctgagcggcccctggagcaggcctgctgccttcatgagcaccctgctgatcaaccagccccagtatgcctggctgaaggagctgggcctgcgggaggagaatgaaggagtgtacaacggctcctggggcggccgcggggaggtgatcaccacctactgcccagccaacaatgagcccatcgcccgggtgcggcaggcctctgtggccgactatgaggagaccgtgaagaaggcccgggaggcctggaagatctgggccgacatcccagcccccaagagaggagagatcgtgcggcagattggagatgccctgcgggagaagatccaggtgctgggcagcctggtgtccctggagatgggcaagatcctggtggagggcgtgggggaggtgcaggagtatgtggacatctgtgactatgctgtgggcctgagcaggatgattggaggccccatcctgcccagcgagaggagcggccacgccctgattgagcagtggaaccctgtgggcctggtgggcatcatcacagccttcaacttccctgtggccgtgtatggctggaacaatgccatcgccatgatctgtggaaatgtgtgcctgtggaagggggcccccaccaccagcctcatctctgtggccgtgaccaagatcatcgccaaggtgctggaggacaacaagctgcccggggccatctgcagcctgacctgtggcggcgctgacatcggcacagccatggccaaggatgagcgggtgaacctgctgtccttcaccggcagcacccaggtgggcaagcaggtgggcctgatggtgcaggagagatttggccgcagcctgctggagctgggcggcaacaatgccatcatcgcctttgaagatgctgacctgagcctggtggtgcccagcgccctgtttgctgctgtgggcacagctggccagcgctgcaccacagcccggcggctggtgatggaccggcccggcaactacgtggagcccaccatcgtgacaggcctgggccatgatgccagcatcgcccacacagagacctttgcccccatcctgtatgtgttcaagttcaagaatgaggaggaggtgtttgcctggaacaatgaggtgaagcagggcctgagcagcagcatcttcaccaaggacctgggccgcatcttccgctggctgggccccaagggcagtgactgtggcatcgtgaatgtgaacatccccaccagcggggctgagattggaggagcctttggaggagagaagcacactggaggcggccgggagagcggcagtgatgcctggaagcagtacatgagaagaagcacctgcaccatcaactacagcaaggacctgcccctggcccagggcatcaagttccagtag

SEQ ID NO: 143242 - DNA, 1314 bp, synthetic construct
  misc_feature 1..1314: note = Description of Artificial Sequence: Synthetic coding sequence
  source 1..1314: mol_type = other DNA
atggccggcaccaatgccctgctgatgctggagaacttcattgatggcaagttcctgccctgcagcagctacatcgacagctatgaccccagcactggagaggtgtactgccgggtgcccaacagcggcaaggatgaaattgaagctgctgtgaaggccgcccgggaggccttccccagctggagcagccgcagcccccaggagaggagccgggtgctgaaccaggtggccgacctgctggagcagagcctggaggagtttgcccaggccgagagcaaggaccagggcaagaccctggccctggcccggaccatggacatccccaggtctgtgcagaacttccgcttctttgccagcagcagcctgcaccacaccagtgaatgtacccagatggaccacctgggctgcatgcactacacagtgcgggcccctgtgggcgtgggcgtgcccccaggagtggtgaacatcgtgtttggcaccggcccccgggtgggggaggccctggtgagccaccctgaggtgcccctcatctccttcaccggcagccagcccacagctgagcgcatcacccagctgagcgccccccactgcaagaagctgagcctggagctgggcggcaagaacccagccatcatctttgaagatgccaacctggatgagtgcatcccagccaccgtgcgcagcagctttgccaaccagggcgagatctgcctgtgcaccagccgcatctttgtgcagaagagcatctacagcgagttcctgaagagatttgtggaggccaccaggaagtggaaggtgggcatccccagcgaccccctggtgtccatcggggccctgatcagcaaggcccacctggagaaggtgcgctcctatgtgaagagggccctggccgagggcgcccagatctggtgtggggagggcgtggacaagctgagcctgcctgccaggaaccaggccggctacttcatgctgcccaccgtcatcacagacatcaaggatgagagctgctgcatgacagaggagatctttggacctgtgacctgtgtggtgccctttgacagcgaggaggaggtgattgagcgggccaacaacgtgaagtatggcctggccgccaccgtgtggagcagcaatgtgggccgggtgcaccgggtggccaagaagctgcagagcggcctggtgtggaccaactgctggctgatccgggagctgaacctgccctttggaggcatgaagagcagcggcatcggccgggagggcgccaaggacagctatgacttcttcacagagatcaagaccatcaccgtgaagcactag

SEQ ID NO: 143243 - DNA, 1464 bp, synthetic construct
  misc_feature 1..1464: note = Description of Artificial Sequence: Synthetic coding sequence
  source 1..1464: mol_type = other DNA
atggccggcaccaatgccctgctgatgctggagaacttcattgatggcaagttcctgccctgcagcagctacatcgacagctatgaccccagcactggagaggtgtactgccgggtgcccaacagcggcaaggatgaaattgaagctgctgtgaaggccgcccgggaggccttccccagctggagcagccgcagcccccaggagaggagccgggtgctgaaccaggtggccgacctgctggagcagagcctggaggagtttgcccaggccgagagcaaggaccagggcaagaccctggccctggcccggaccatggacatccccaggtctgtgcagaacttccgcttctttgccagcagcagcctgcaccacaccagtgaatgtacccagatggaccacctgggctgcatgcactacacagtgcgggcccctgtgggcgtggccggcctcatcagcccctggaacctgcccctgtacctgctgacctggaagatcgccccagccatggctgctggcaacacagtcatcgccaagcccagcgagctgacctctgtgacagcctggatgctgtgcaagctgctggacaaggccggcgtgcccccaggagtggtgaacatcgtgtttggcaccggcccccgggtgggggaggccctggtgagccaccctgaggtgcccctcatctccttcaccggcagccagcccacagctgagcgcatcacccagctgagcgccccccactgcaagaagctgagcctggagctgggcggcaagaacccagccatcatctttgaagatgccaacctggatgagtgcatcccagccaccgtgcgcagcagctttgccaaccagggcgagatctgcctgtgcaccagccgcatctttgtgcagaagagcatctacagcgagttcctgaagagatttgtggaggccaccaggaagtggaaggtgggcatccccagcgaccccctggtgtccatcggggccctgatcagcaaggcccacctggagaaggtgcgctcctatgtgaagagggccctggccgagggcgcccagatctggtgtggggagggcgtggacaagctgagcctgcctgccaggaaccaggccggctacttcatgctgcccaccgtcatcacagacatcaaggatgagagctgctgcatgacagaggagatctttggacctgtgacctgtgtggtgccctttgacagcgaggaggaggtgattgagcgggccaacaacgtgaagtatggcctggccgccaccgtgtggagcagcaatgtgggccgggtgcaccgggtggccaagaagctgcagagcggcctggtgtggaccaactgctggctgatccgggagctgaacctgccctttggaggcatgaagagcagcggcatcggccgggagggcgccaaggacagctatgacttcttcacagagatcaagaccatcaccgtgaagcactag

SEQ ID NO: 143244 - DNA, 1302 bp, synthetic construct
  misc_feature 1..1302: note = Description of Artificial Sequence: Synthetic coding sequence
  source 1..1302: mol_type = other DNA
atggccggcaccaatgccctgctgatgctggagaacttcattgatggcaagttcctgccctgcagcagctacatcgacagctatgaccccagcactggagaggtgtactgccgggtgcccaacagcggcaaggatgaaattgaagctgctgtgaaggccgcccgggaggccttccccagctggagcagccgcagcccccaggagaggagccgggtgctgaaccaggtggccgacctgctggagcagagcctggaggagtttgcccaggccgagagcaaggaccagggcaagaccctggccctggcccggaccatggacatccccaggtctgtgcagaacttccgcttctttgccagcagcagcctgcaccacaccagtgaatgtacccagatggaccacctgggctgcatgcactacacagtgcgggcccctgtgggcgtggccggcctcatcagcccctggaacctgcccctgtacctgctgacctggaagatcgccccagccatggctgctggcaacacagtcatcgccaagcccagcgagctgacctctgtgacagcctggatgctgtgcaagctgctggacaaggccggcgtgcccccaggagtggtgaacatcgtgtttggcaccggcccccgggtgggggaggccctggtgagccaccctgaggtgcccctcatctccttcaccggcagccagcccacagctgagcgcatcacccagctgagcgccccccactgcaagaagctgagcctggagctgggcggcaagaacccagccatcatctttgaagatgccaacctggatgagtgcatcccagccaccgtgcgcagcagctttgccaaccaggtgcgctcctatgtgaagagggccctggccgagggcgcccagatctggtgtggggagggcgtggacaagctgagcctgcctgccaggaaccaggccggctacttcatgctgcccaccgtcatcacagacatcaaggatgagagctgctgcatgacagaggagatctttggacctgtgacctgtgtggtgccctttgacagcgaggaggaggtgattgagcgggccaacaacgtgaagtatggcctggccgccaccgtgtggagcagcaatgtgggccgggtgcaccgggtggccaagaagctgcagagcggcctggtgtggaccaactgctggctgatccgggagctgaacctgccctttggaggcatgaagagcagcggcatcggccgggagggcgccaaggacagctatgacttcttcacagagatcaagaccatcaccgtgaagcactag

SEQ ID NO: 143245 - DNA, 1557 bp, synthetic construct
  misc_feature 1..1557: note = Description of Artificial Sequence: Synthetic coding sequence
  source 1..1557: mol_type = other DNA
atgttcctgcgggccggcctggccgccctgagccccctgctgcggagcctgcggcccagccctgtggccgccatgagcacaggcacctttgtggtgtcccagcccctgaactaccggggcggggcccgggtggagccagcagatgccagcggcacagagaaggcctttgagcccgccaccggccgggtcatcgccaccttcacctgcagcggggagaaggaggtgaacctggccgtgcagaatgccaaggccgccttcaagatctggagccagaagagcggcatggagcgctgccgcatcctgctggaggccgcccgcatcatccgggagcgggaggatgaaattgccaccatggagtgcatcaacaacgggaagagcatctttgaggcccggctggacatcgacatctcctggcagtgcctggagtactatgccggcctggccgcctccatggccggggagcacatccagctgcccggcggcagctttggctacacccggcgggagcccctgggcgtgtgtgtgggcattggagcctggaactaccccttccagatcgcctcctggaagagcgccccagccctggcctgtggaaatgccatggtgttcaagcccagccccttcacccctgtgtctgccctgctgctggccgagatctacagcgaggccggcgtgcccccaggcctcttcaacgtggtgcagggcggggccgccaccggccagttcctgtgccagcacccagatgtggccaaggtgtccttcaccggctctgtgcccaccggcatgaagatcatggagatgtctgccaagggcatcaagcctgtgaccctggagctgggcggcaagagccccctcatcatcttcagtgactgtgacatgaacaatgctgtgaagggggccctgatggccaacttcctgacccagggccaggtgtgctgcaatggcaccagggtgtttgtgcagaaggagatcctggacaagttcacagaggaggtggtgaagcagacccagaggatcaagattggagaccccctgctggaggacaccaggatgggccccctcatcaaccggccccacctggagcgggtgctgggctttgtgaaggtggccaaggagcagggcgccaaggtgctgtgtggcggggacatctacgtgcctgaggaccccaagctgaaggatggctactacatgaggccctgtgtgctgaccaactgcagagatgacatgacctgtgtgaaggaggagatctttggacctgtgatgagcatcctgagctttgacacagaggccgaggtgctggagcgggccaatgacaccaccttcggcctggccgccggggtcttcacccgggacatccagagggcccaccgggtggtggccgagctgcaggccggcacctgcttcatcaacaactacaacgtgtcccctgtggagctgccctttggaggctacaagaagagcggcttcggccgggagaatggccgggtgaccatcgagtactacagccagctgaagacagtgtgtgtggagatgggagatgtggagagcgccttctag

SEQ ID NO: 143246 - DNA, 1275 bp, synthetic construct
  misc_feature 1..1275: note = Description of Artificial Sequence: Synthetic coding sequence
  source 1..1275: mol_type = other DNA
atggagcgctgccgcatcctgctggaggccgcccgcatcatccgggagcgggaggatgaaattgccaccatggagtgcatcaacaacgggaagagcatctttgaggcccggctggacatcgacatctcctggcagtgcctggagtactatgccggcctggccgcctccatggccggggagcacatccagctgcccggcggcagctttggctacacccggcgggagcccctgggcgtgtgtgtgggcattggagcctggaactaccccttccagatcgcctcctggaagagcgccccagccctggcctgtggaaatgccatggtgttcaagcccagccccttcacccctgtgtctgccctgctgctggccgagatctacagcgaggccggcgtgcccccaggcctcttcaacgtggtgcagggcggggccgccaccggccagttcctgtgccagcacccagatgtggccaaggtgtccttcaccggctctgtgcccaccggcatgaagatcatggagatgtctgccaagggcatcaagcctgtgaccctggagctgggcggcaagagccccctcatcatcttcagtgactgtgacatgaacaatgctgtgaagggggccctgatggccaacttcctgacccagggccaggtgtgctgcaatggcaccagggtgtttgtgcagaaggagatcctggacaagttcacagaggaggtggtgaagcagacccagaggatcaagattggagaccccctgctggaggacaccaggatgggccccctcatcaaccggccccacctggagcgggtgctgggctttgtgaaggtggccaaggagcagggcgccaaggtgctgtgtggcggggacatctacgtgcctgaggaccccaagctgaaggatggctactacatgaggccctgtgtgctgaccaactgcagagatgacatgacctgtgtgaaggaggagatctttggacctgtgatgagcatcctgagctttgacacagaggccgaggtgctggagcgggccaatgacaccaccttcggcctggccgccggggtcttcacccgggacatccagagggcccaccgggtggtggccgagctgcaggccggcacctgcttcatcaacaactacaacgtgtcccctgtggagctgccctttggaggctacaagaagagcggcttcggccgggagaatggccgggtgaccatcgagtactacagccagctgaagacagtgtgtgtggagatgggagatgtggagagcgccttctag

SEQ ID NO: 143247 - DNA, 4017 bp, synthetic construct
  misc_feature 1..4017: note = Description of Artificial Sequence: Synthetic coding sequence
  source 1..4017: mol_type = other DNA
atggaccgggccagcgagctgctcttctacgtgaatggaaggaaggtgattgagaagaatgtggaccctgagaccatgctgctgccctacctgaggaagaagctgcggctgaccggcaccaagtatggctgcggcggcggcggctgtggggcctgcaccgtgatgatcagccgctacaaccccatcaccaagaggatccgccaccacccagccaatgcctgcctgatccccatctgcagcctgtatggagctgctgtgaccaccgtggagggcatcggcagcacccacacccgcatccaccctgtgcaggagcgcatcgccaagtgccacggcacccagtgtggcttctgcaccccaggcatggtgatgagcatctacaccctgctgaggaaccaccctgagcccaccctggaccagctgacagatgccctgggcggcaacctgtgccgctgcaccggctaccggcccatcattgatgcctgcaagaccttctgcaagaccagcggctgctgccagagcaaagaaaatggagtgtgctgcctggaccagggcatcaatggcctgcctgagtttgaggagggcagcaagaccagccccaagctgtttgctgaggaggagttcctgcccctggaccccacccaggagctgatcttccccccagagctgatgatcatggccgagaagcagagccagaggaccagggtgtttggcagcgagaggatgatgtggttcagccctgtgaccctgaaggagctgctggagttcaagttcaagtacccccaggcccctgtgatcatgggcaacacctctgtgggccctgaggtgaagttcaagggcgtcttccaccctgtgatcatcagcccagacagaattgaggagctgtctgtggtgaaccacgcctacaacggcctgaccctgggcgccggcctgagcctggcccaggtgaaggacatcctggctgatgtggtgcagaagctgcctgaggagaagacccagatgtaccacgccctgctgaagcacctgggcaccctggccggcagccagatccggaacatggccagcctgggcggccacatcatcagccgccacccagacagcgacctgaaccccatcctggccgtgggcaactgcaccctgaacctgctgagcaaggagggcaagaggcagatccccctgaatgagcagttcctgagcaaatgtccaaatgctgacctgaagccccaggagatcctggtgtctgtgaacatcccctacagcaggaagtgggagtttgtgtctgccttccggcaggcccagaggcaggagaatgccctggccatcgtgaacagcggcatgagggtcttctttggagaaggagatggcatcatccgggagctgtgcatctcctatggaggagtgggccctgccaccatctgtgccaagaacagctgccagaagctgattggccgccactggaatgagcagatgctggacatcgcctgccgcctcatcctgaatgaggtgtccctgctgggcagcgcccctgggggcaaggtggagttcaagaggaccctcatcatctccttcctgttcaagttctacctggaggtgtcccagatcctgaagaagatggaccctgtgcactaccccagcctggccgacaagtatgaaagtgccctggaggacctgcacagcaagcaccactgcagcaccctgaagtaccagaacatcggccccaagcagcaccctgaggaccccatcggccaccccatcatgcacctgagcggcgtgaagcacgccaccggggaggccatctactgtgatgacatgcccctggtggaccaggagctgttcctgacctttgtgaccagcagccgggcccacgccaagatcgtgtccattgacctgtctgaggccctgtccatgcctggggtggtggacatcatgacagctgagcacctgagtgatgtgaacagcttctgcttcttcacagaagctgagaagttcctggccacagacaaggtgttctgtgtgggccagctggtgtgtgctgtgctggccgacagcgaggtgcaggccaagagagctgccaagagggtgaagatcgtgtaccaggacctggagcccctcatcctgaccatcgaggagagcatccagcacaacagcagcttcaagccagagaggaagctggagtatggaaatgtggatgaggccttcaaggtggtggaccagatcctggagggggagatccacatgggcggccaggagcacttctacatggagacccagagcatgctggtggtgcccaagggggaggaccaggagatggatgtgtatgtgtccacccagttccccaagtacatccaggacatcgtggccagcaccctgaagctgcctgccaacaaggtgatgtgccacgtgagaagagtgggcggggcctttggaggcaaggtgctgaagacaggcatcatcgctgctgtgacagcctttgctgccaacaagcacggccgggctgtgcgctgtgtgctggagcggggggaggacatgctgatcactggaggccgccacccctacctgggcaagtacaaggccggcttcatgaatgatggccgcatcctggccctggacatggagcactacagcaatgctggggccagcctggatgagagcctgtttgtgattgagatgggcctgctgaagatggacaatgcctacaagttccccaacctgcgctgccggggctgggcctgcaggaccaacctgcccagcaacacagccttccggggcttcggcttcccccaggccgccctgatcacagagagctgcatcacagaggtggccgccaagtgtggcctgagccctgagaaggtgcgcatcatcaacatgtacaaggagattgaccagaccccctacaagcaggagatcaatgccaagaacctgatccagtgctggagggagtgcatggccatgagcagctacagcctgaggaaggtggccgtggagaagttcaatgctgagaactactggaagaagaagggcctggccatggtgcccctgaagtttcctgtgggcctgggcagcagagctgctggccaggccgccgccctggtgcacatctacctggatggctctgtgctggtgacccacggcggcatcgagatgggccagggcgtgcacaccaagatgatccaggtggtgtcccgggagctgaggatgcccatgagcaatgtgcacctgcggggcaccagcacagaaacagtgcccaatgccaacatcagcggcggctctgtggtggccgacctgaatggcctggccgtgaaggatgcctgccagaccctgctgaagaggctggagcccatcatcagcaagaaccccaagggcacctggaaggactgggcccagacagcctttgatgagagcatcaacctgtctgctgtgggctacttccggggctatgaaagtgacatgaactgggagaagggggagggccagccctttgagtactttgtgtatggagctgcctgcagcgaggtggagattgactgcctgactggagaccacaagaacatcagaacagacatcgtgatggatgtgggctgcagcatcaacccagccattgatattggccagatcgagggcgccttcatccagggcatgggcctgtacaccatcgaggagctgaactacagcccccagggcatcctgcacacccggggccctgaccagtacaagatcccagccatctgtgacatgcccacagagctgcacatcgccctgctgccccccagccagaacagcaacaccctgtacagcagcaagggcctgggggagagcggggtcttcctgggctgcagcgtcttctttgccatccatgatgctgtgtctgctgcccggcaggagcggggcctgcacggccccctgaccctgaacagccccctgaccccagagaagatccgcatggcctgtgaggacaagttcaccaagatgatccccagagatgagcccggcagctatgtgccctggaatgtgcccatctag

SEQ ID NO: 143248 - DNA, 456 bp, synthetic construct
  misc_feature 1..456: note = Description of Artificial Sequence: Synthetic coding sequence
  source 1..456: mol_type = other DNA
atgctgctgccctacctgaggaagaagctgcggctgaccggcaccaagtatggctgcggcggcggcggctgtggggcctgcaccgtgatgatcagccgctacaaccccatcaccaagaggatccgccaccacccagccaatgcctgcctgatccccatctgcagcctgtatggagctgctgtgaccaccgtggagggcatcggcagcacccacacccgcatccaccctgtgcaggagagaattgccaagtgccacggcacccagtgtggcttctgcaccccaggcatggtgatgagcatctacaccctgctgaggaaccaccctgagcccaccctggaccagctgacagatgccctgggcggcaacctgtgccgctgcaccggctaccggcccatcattgatgcctgcaagaccttctgcaagaccagcggctgctgccagagcaaggagaactag

SEQ ID NO: 143249 - DNA, 858 bp, synthetic construct
  misc_feature 1..858: note = Description of Artificial Sequence: Synthetic coding sequence
  source 1..858: mol_type = other DNA
atggacctgtctgctgccagccaccgcatccccctgagtgatggcaacagcatccccatcatcggcctgggcacctacagcgagcccaagagcacccccaagggggcctgtgccacctctgtgaaggtggccatcgacaccggctaccgccacattgatggagcctacatctaccagaatgagcacgaggtgggggaggccatccgggagaagattgctgagggcaaggtgcggcgggaggacatcttctactgcggcaagctgtgggccaccaaccacgtgcctgagatggtgcggcccaccctggagaggaccctgcgggtgctgcagctggactatgtggacctgtacatcatcgaggtgcccatggccttcaagccaggagatgagatctaccccagagatgaaaatggcaagtggctgtaccacaagagcaacctgtgtgccacctgggaggtggagtgccacccctacttcacccagcccaagctgctgaagttctgccagcagcacgacatcgtcatcacagcctacagccccctgggcaccagcaggaaccccatctgggtgaatgtgagcagcccccccctgctgaaggatgccctgctgaacagcctgggcaagcgctacaacaagacagctgcccagatcgtgctgcgcttcaacatccagaggggcgtggtggtgatccccaagagcttcaacctggagcgcatcaaggagaacttccagatctttgacttcagcctgacagaggaggagatgaaggacatcgaggccctgaacaagaatgtgcgctttgtggagctgctgatgtggagggaccaccctgagtaccccttccatgatgagtactag

SEQ ID NO: 143250 - DNA, 873 bp, synthetic construct
  misc_feature 1..873: note = Description of Artificial Sequence: Synthetic coding sequence
  source 1..873: mol_type = other DNA
atggacctgtctgctgccagccaccgcatccccctgagtgatggcaacagcatccccatcatcggcctgggcacctacagcgagcccaagagcacccccaagggggcctgtgccacctctgtgaaggtggccatcgacaccggctaccgccacattgatggagcctacatctaccagaatgagcacgaggtgggggaggccatccgggagaagattgctgagggcaaggtgcggcgggaggacatcttctactgcggcaagctgtgggccaccaaccacgtgcctgagatggtgcggcccaccctggagaggaccctgcgggtgctgcagctggactatgtggacctgtacatcatcgaggtgcccatggccttcaagccaggagatgagatctaccccagagatgaaaatggcaagtggctgtaccacaagagcaacctgtgtgccacctgggaggccatggaggcctgcaaggatgctggcctggtgaagagcctgggcgtgagcaacttcaacagacggcagctggagctgatcctgaacaagccaggcctgaagcacaagcctgtgagcaaccaggtggagtgccacccctacttcacccagcccaagctgctgaagttctgccagcagcacgacatcgtcatcacagcctacagccccctgggcaccagcaggaaccccatctgggtgaatgtgagcagcccccccctgctgaaggatgccctgctgaacagcctgggcaagcgctacaacaagacagctgcccagatcgtgctgcgcttcaacatccagaggggcgtggtggtgatccccaagagcttcaacctggagcgcatcaaggagaacttccaggtggcccggagcagctag

SEQ ID NO: 143251 - DNA, 978 bp, synthetic construct
  misc_feature 1..978: note = Description of Artificial Sequence: Synthetic coding sequence
  source 1..978: mol_type = other DNA
atggccgccagctgtgtgctgctgcacacaggccagaagatgcccctgattggcctgggcacctggaagtctgagcccggccaggtgaaggctgctgtgaagtatgccctgtctgtgggctaccgccacatcgactgtgccgccatctatggaaatgaacctgagatcggggaggccctgaaggaggatgtgggccctgggaaggctgtgccccgggaggagctgtttgtgaccagcaagctgtggaacaccaagcaccacccagaagatgtggagcccgccctgaggaagaccctggccgacctgcagctggagtacctggacctgtacctgatgcactggccctatgcctttgagcggggggacaaccccttccccaagaatgctgatggcaccatctgctatgacagcacccactacaaggagacctggaaggccctggaggccctggtggccaagggcctggtgcaggccctgggcctgagcaacttcaacagccggcagattgatgacatcctgtctgtggcctctgtgcggcctgctgtgctgcaggtggagtgccacccctacctggcccagaatgagctgattgcccactgccaggcccggggcctggaggtgacagcctacagccccctgggcagcagtgaccgggcctggagggaccctgatgagcctgtgctgctggaggagcctgtggtgctggccctggccgagaagtatggccgcagccctgcccagatcctgctgcgctggcaggtgcagaggaaggtgatctgcatccccaagagcatcacccccagccgcatcctgcagaacatcaaggtgtttgacttcaccttcagccctgaggagatgaagcagctgaatgccctgaacaagaactggagatacatcgtgcccatgctgactgtggatggcaagagggtgcccagagatgctggccaccccctgtaccccttcaatgacccctactag

SEQ ID NO: 143252 - DNA, 978 bp, synthetic construct; identical to SEQ ID NO: 143251
  misc_feature 1..978: note = Description of Artificial Sequence: Synthetic coding sequence
  source 1..978: mol_type = other DNA

SEQ ID NO: 143253 - DNA, 444 bp, synthetic construct
  misc_feature 1..444: note = Description of Artificial Sequence: Synthetic coding sequence
  source 1..444: mol_type = other DNA
atggccgccagctgtgtgctgctgcacacaggccagaagatgcccctgattggcctgggcacctggaagtctgagcccggccaggtgaaggctgctgtgaagtatgccctgtctgtgggctaccgccacatcgactgtgccgccatctatggaaatgaacctgagatcggggaggccctgaaggaggatgtgggccctgggaaggctgtgccccgggaggagctgtttgtgaccagcaagctgtggaacaccaagcaccacccagaagatgtggagcccgccctgaggaagaccctggccgacctgcagctggagtacctggacctgtacctgatgcactggccctatgcctttgagcggggggacaaccccttccccaagaatgctgatggcaccatctgctatgacagcacccactacaaggagacctggaaggccctgtag

SEQ ID NO: 143254 - DNA, 951 bp, synthetic construct
  misc_feature 1..951: note = Description of Artificial Sequence: Synthetic coding sequence
  source 1..951: mol_type = other DNA
atggccagccggctgctgctgaacaatggagccaagatgcccatcctgggcctgggcacctggaagagccccccaggccaggtgacagaagctgtgaaggtggccattgatgtgggctaccgccacatcgactgtgcccacgtgtaccagaatgaaaatgaggtgggcgtggccatccaggagaagctgcgggagcaggtggtgaagcgggaggagctgttcatcgtgtccaagctgtggtgcacctaccacgagaagggcctggtgaagggggcctgccagaagaccctgagtgacctgaagctggactacctggacctgtacctgatccactggcccaccggcttcaagccaggcaaggagttcttccccctggatgagagcggaaatgtggtgcccagcgacaccaacatcctggacacctgggccgccatggaggagctggtggatgagggcctggtgaaggccatcggcatcagcaacttcaaccacctgcaggtggagatgatcctgaacaagccaggcctgaagtacaagccagctgtgaaccagatcgagtgccacccctacctgacccaggagaagctgatccagtactgccagagcaaaggaattgtggtgacagcctacagccccctgggcagcccagaccggccctgggccaagccagaggaccccagcctgctggaggacccccgcatcaaggccatcgccgccaagcacaacaagaccacagcccaggtgctgatccgcttccccatgcagaggaacctggtggtgatccccaagtctgtgaccccagagagaattgctgagaacttcaaggtgtttgattttgagctgagcagccaggacatgaccaccctgctgagctacaacagaaactggagggtgtgtgccctgctgagctgcaccagccacaaggactaccccttccacgaggagttctag

SEQ ID NO: 143255 - DNA, 618 bp, synthetic construct
  misc_feature 1..618: note = Description of Artificial Sequence: Synthetic coding sequence
  source 1..618: mol_type = other DNA
atgggcgtggtgtccctcttcctgtgcatcgtggagcagatcttcaccagcagcaagaagatccagttccggggcatcttcatggccaaggtgcccaagagcaaggccctggaggccaccaagctggccatcgaggccggcttccgccacattgattctgcccacctgtacaacaatgaggagcaggtgggcctggccatccgcagcaagattgctgatggctctgtgaagcgggaggacatcttctacaccagcaagctgtggtgcaacagccacaggcctgagctggtgcggcctgccctggagaggagcctgaagaacctgcagctggactatgtggacctgtacctgatccacttccctgtgtctgtgaagccaggagaggaggtgatccccaaggatgaaaatggcaagatcctgtttgacacagtggacctgtgtgccacctgggaggccgtggagaagtgcaaggatgctggcctggccaagagcattggagtgagcaacttcaacagacggcagctggagatgatcctgaacaagccaggcctgaagtacaagcctgtgtgcaaccagccccgggacaacagcatcttcagcctgagcccagactggtag

SEQ ID NO: 143256 - DNA, 972 bp, synthetic construct
  misc_feature 1..972: note = Description of Artificial Sequence: Synthetic coding sequence
  source 1..972: mol_type = other DNA
atggacagcaagtaccagtgtgtgaagctgaatgatggccacttcatgcctgtgctgggcttcggcacctacgccccagctgaggtgcccaagagcaaggccctggaggccaccaagctggccatcgaggccggcttccgccacattgattctgcccacctgtacaacaatgaggagcaggtgggcctggccatccgcagcaagattgctgatggctctgtgaagcgggaggacatcttctacaccagcaagctgtggtgcaacagccacaggcctgagctggtgcggcctgccctggagaggagcctgaagaacctgcagctggactatgtggacctgtacctgatccacttccctgtgtctgtgaagccaggagaggaggtgatccccaaggatgaaaatggcaagatcctgtttgacacagtggacctgtgtgccacctgggaggccgtggagaagtgcaaggatgctggcctggccaagagcattggagtgagcaacttcaacagacggcagctggagatgatcctgaacaagccaggcctgaagtacaagcctgtgtgcaaccaggtggagtgccacccctacttcaaccagaggaagctgctggacttctgcaagagcaaggacatcgtgctggtggcctacagcgccctgggcagccaccgggaggagccctgggtggaccccaacagccctgtgctgctggaggaccctgtgctgtgtgccctggccaagaagcacaagaggaccccagccctgattgccctgcgctaccagctgcagaggggcgtggtggtgctggccaagagctacaatgagcagaggatccggcagaatgtgcaggtgtttgagttccagctgaccagcgaggagatgaaggccattgatggcctgaacagaaatgtgcgctacctgaccctggacatctttgctggcccccccaactaccccttcagtgatgagtactag

SEQ ID NO: 143257 - DNA, 972 bp, synthetic construct; identical to SEQ ID NO: 143256
  misc_feature 1..972: note = Description of Artificial Sequence: Synthetic coding sequence
  source 1..972: mol_type = other DNA

SEQ ID NO: 143258 - DNA, 747 bp, synthetic construct
  misc_feature 1..747: note = Description of Artificial Sequence: Synthetic coding sequence
  source 1..747: mol_type = other DNA
tgaagcaagtaccagtgtgtgaagctgaatgatggccacttcatgcctgtgctgggcttcggcacctacgccccagctgaggtgggcctggccatccgcagcaagattgctgatggctctgtgaagcgggaggacatcttctacaccagcaagctgtggtgcaacagccacaggcctgagctggtgcggcctgccctggagaggagcctgaagaacctgcagctggactatgtggacctgtacctgatccacttccctgtgtctgtgaagccaggagaggaggtgatccccaaggatgaaaatggcaagatcctgtttgacacagtggacctgtgtgccacctgggaggccgtggagaagtgcaaggatgctggcctggccaagagcattggagtgagcaacttcaacagacggcagctggagatgatcctgaacaagccaggcctgaagtacaagcctgtgtgcaaccaggtggagtgccacccctacttcaaccagaggaagctgctggacttctgcaagagcaaggacatcgtgctggtggcctacagcgccctgggcagccaccgggaggagccctgggtggaccccaacagccctgtgctgctggaggaccctgtgctgtgtgccctggccaagaagcacaagaggaccccagccctgattgccctgcgctaccagctgcagaggggcgtggtggtgctggccaagagctacaatgagcagaggatccggcagaatgtgtag

SEQ ID NO: 143259 - DNA, 972 bp, synthetic construct
  misc_feature 1..972: note = Description of Artificial Sequence: Synthetic coding sequence
  source 1..972: mol_type = other DNA
atggacagcaagtaccagtgtgtgaagctgaatgatggccacttcatgcctgtgctgggcttcggcacctacgccccagctgaggtgcccaagagcaaggccctggaggccgtgaagctggccatcgaggccggcttccaccacattgattctgcccacgtgtacaacaatgaggagcaggtgggcctggccatccgcagcaagattgctgatggctctgtgaagcgggaggacatcttctacaccagcaagctgtggagcaacagccacaggcctgagctggtgcggcctgccctggagaggagcctgaagaacctgcagctggactatgtggacctgtacctgatccacttccctgtgtctgtgaagccaggagaggaggtgatccccaaggatgaaaatggcaagatcctgtttgacacagtggacctgtgtgccacctgggaggccatggagaagtgcaaggatgctggcctggccaagagcattggagtgagcaacttcaaccaccggctgctggagatgatcctgaacaagccaggcctgaagtacaagcctgtgtgcaaccaggtggagtgccacccctacttcaaccagaggaagctgctggacttctgcaagagcaaggacatcgtgctggtggcctacagcgccctgggcagccaccgggaggagccctgggtggaccccaacagccctgtgctgctggaggaccctgtgctgtgtgccctggccaagaagcacaagaggaccccagccctgattgccctgcgctaccagctgcagaggggcgtggtggtgctggccaagagctacaatgagcagaggatccggcagaatgtgcaggtgtttgagttccagctgaccagcgaggagatgaaggccattgatggcctgaacagaaatgtgcgctacctgaccctggacatctttgctggcccccccaactaccccttcagtgatgagtactag

SEQ ID NO: 143260 - DNA, 972 bp, synthetic construct; identical to SEQ ID NO: 143259
  misc_feature 1..972: note = Description of Artificial Sequence: Synthetic coding sequence
  source 1..972: mol_type = other DNA

SEQ ID NO: 143261 - DNA, 894 bp, synthetic construct
  misc_feature 1..894: note = Description of Artificial Sequence: Synthetic coding sequence
  source 1..894: mol_type = other DNA
atggacagcaagtaccagtgtgtgaagctgaatgatggccacttcatgcctgtgctgggcttcggcacctacgccccagctgaggtgcccaagagcaaggccctggaggccgtgaagctggccatcgaggccggcttccaccacattgattctgcccacgtgtacaacaatgaggagcaggtgggcctggccatccgcagcaagattgctgatggctctgtgaagcgggaggacatcttctacaccagcaagctgtggagcaacagccacaggcctgagctggtgcggcctgccctggagaggagcctgaagaacctgcagctggactatgtggacctgtacctgatccacttccctgtgtctgtgaaggccatggagaagtgcaaggatgctggcctggccaagagcattggagtgagcaacttcaaccaccggctgctggagatgatcctgaacaagccaggcctgaagtacaagcctgtgtgcaaccaggtggagtgccacccctacttcaaccagaggaagctgctggacttctgcaagagcaaggacatcgtgctggtggcctacagcgccctgggcagccaccgggaggagccctgggtggaccccaacagccctgtgctgctggaggaccctgtgctgtgtgccctggccaagaagcacaagaggaccccagccctgattgccctgcgctaccagctgcagaggggcgtggtggtgctggccaagagctacaatgagcagaggatccggcagaatgtgcaggtgtttgagttccagctgaccagcgaggagatgaaggccattgatggcctgaacagaaatgtgcgctacctgaccctggacatctttgctggcccccccaactaccccttcagtgatgagtactag

SEQ ID NO: 143262 - DNA, 420 bp, synthetic construct
  misc_feature 1..420: note = Description of Artificial Sequence: Synthetic coding sequence
  source 1..420: mol_type = other DNA
atggacagcaagtaccagtgtgtgaagctgaatgatggccacttcatgcctgtgctgggcttcggcacctacgccccagctgaggtgcccaagagcaaggccctggaggccgtgaagctggccatcgaggccggcttccaccacattgattctgcccacgtgtacaacaatgaggagcaggtgggcctggccatccgcagcaagattgctgatggctctgtgaagcgggaggacatcttctacaccagcaagctgtggagcaacagccacaggcctgagctggtgcggcctgccctggagaggagcctgaagaacctgcagctggactatgtggacctgtacctgatccacttccctgtgtctgtgaaggaggacatcggcatcctgacctggaagaagagccccaagcacaacagctag

SEQ ID NO: 143263 - DNA, 972 bp, synthetic construct
  misc_feature 1..972: note = Description of Artificial Sequence: Synthetic coding sequence
  source 1..972: mol_type = other DNA
atggacagcaagcaccagtgtgtgaagctgaatgatggccacttcatgcctgtgctgggcttcggcacctacgcccctcctgaggtgcccaggagcaaggccctggaggtgaccaagctggccatcgaggccggcttccgccacattgattctgcccacctgtacaacaatgaggagcaggtgggcctggccatccgcagcaagattgctgatggctctgtgaagcgggaggacatcttctacaccagcaagctgtggagcaccttccacaggcctgagctggtgcggcctgccctggagaacagcctgaagaaggcccagctggactatgtggacctgtacctgatccacagccccatgagcctgaagccaggagaggagctgagccccacagatgaaaatggcaaggtgatctttgatattgtggacctgtgcaccacctgggaggccatggagaagtgcaaggatgctggcctggccaagagcattggagtgagcaacttcaacagacggcagctggagatgatcctgaacaagccaggcctgaagtacaagcctgtgtgcaaccaggtggagtgccacccctacttcaacagaagcaagctgctggacttctgcaagagcaaggacatcgtgctggtggcctacagcgccctgggcagccagagggacaagcgctgggtggaccccaacagccctgtgctgctggaggaccctgtgctgtgtgccctggccaagaagcacaagaggaccccagccctgattgccctgcgctaccagctgcagaggggcgtggtggtgctggccaagagctacaatgagcagaggatccggcagaatgtgcaggtgtttgagttccagctgacagctgaggacatgaaggccattgatggcctggacaggaacctgcactacttcaacagcgacagctttgccagccaccccaactacccctacagtgatgagtactag

SEQ ID NO: 143264 - DNA, 615 bp, synthetic construct
  misc_feature 1..615: note = Description of Artificial Sequence: Synthetic coding sequence
  source 1..615: mol_type = other DNA
atgagcctgaagccaggagaggagctgagccccacagatgaaaatggcaaggtgatctttgacatcgtggacctgtgcaccacctgggaggccatggagaagtgcaaggatgctggcctggccaagagcattggagtgagcaacttcaacagacggcagctggagatgatcctgaacaagccaggcctgaagtacaagcctgtgtgcaaccaggtggagtgccacccctacttcaacagaagcaagctgctggacttctgcaagagcaaggacatcgtgctggtggcctacagcgccctgggcagccagagggacaagcgctgggtggaccccaacagccctgtgctgctggaggaccctgtgctgtgtgccctggccaagaagcacaagaggaccccagccctgattgccctgcgctaccagctgcagaggggcgtggtggtgctggccaagagctacaatgagcagaggatccggcagaatgtgcaggtgtttgagttccagctgacagctgaggacatgaaggccattgatggcctggacaggaacctgcactacttcaacagcgacagctttgccagccaccccaactacccctacagtgatgagtactag

SEQ ID NO: 143265 - DNA, 972 bp, synthetic construct
  misc_feature 1..972: note = Description of Artificial Sequence: Synthetic coding sequence
  source 1..972: mol_type = other DNA
atggaccccaagtaccagagggtggagctgaatgatggccacttcatgcctgtgctgggcttcggcacctacgcccctcctgaggtgcccaggaacagagctgtggaggtgaccaagctggccatcgaggccggcttccgccacattgattctgcctacctgtacaacaatgaggagcaggtgggcctggccatccgcagcaagattgctgatggctctgtgaagcgggaggacatcttctacaccagcaagctgtggtgcaccttcttccagccccagatggtgcagcctgccctggagagcagcctgaagaagctgcagctggactatgtggacctgtacctgctgcacttccccatggccctgaagccaggagagacccccctgcccaaggatgaaaatggcaaggtgatctttgacacagtggacctgagcgccacctgggaggtgatggagaagtgcaaggatgctggcctggccaagagcattggagtgagcaacttcaactgccggcagctggagatgatcctgaacaagccaggcctgaagtacaagcctgtgtgcaaccaggtggagtgccacccctacctgaaccagagcaagctgctggacttctgcaagagcaaggacatcgtgctggtggcccacagcgccctgggcacccagaggcacaagctgtgggtggaccccaacagccctgtgctgctggaggaccctgtgctgtgtgccctggccaagaagcacaagcagaccccagccctgattgccctgcgctaccagctgcagaggggcgtggtggtgctggccaagagctacaatgagcagaggatccgggagaacatccaggtgtttgagttccagctgaccagcgaggacatgaaggtgctggatggcctgaacagaaactaccgctacgtggtgatggacttcctgatggaccacccagactaccccttcagtgatgagtactag

SEQ ID NO: 143266 - DNA, 972 bp, synthetic construct; identical to SEQ ID NO: 143265
  misc_feature 1..972: note = Description of Artificial Sequence: Synthetic coding sequence
  source 1..972: mol_type = other DNA

SEQ ID NO: 143267 - DNA, 381 bp, synthetic construct
  misc_feature 1..381: note = Description of Artificial Sequence: Synthetic coding sequence
  source 1..381: mol_type = other DNA
atggaccccaagtaccagagggtggagctgaatgatggccacttcatgcctgtgctgggcttcggcacctacgcccctcctgaggtgcccaggaacagagctgtggaggtgaccaagctggccatcgaggccggcttccgccacattgattctgcctacctgtacaacaatgaggagcaggtgggcctggccatccgcagcaagattgctgatggctctgtgaagcgggaggacatcttctacaccagcaagctgtggtgcaccttcttccagccccagatggtgcagcctgccctggagagcagcctgaagaagctgcagctggactatgtggacctgtacctgctgcacttccccatggccctgaagagcaccacctag

SEQ ID NO: 143268 - DNA, 981 bp, synthetic construct
  misc_feature 1..981: note = Description of Artificial Sequence: Synthetic coding sequence
  source 1..981: mol_type = other DNA
atggacctgtctgctgccagccaccgcatccccctgagtgatggcaacagcatccccatcatcggcctgggcacctacagcgagcccaagagcacccccaagggggcctgtgccacctctgtgaaggtggccatcgacaccggctaccgccacattgatggagcctacatctaccagaatgagcacgaggtgggggaggccatccgggagaagattgctgagggcaaggtgcggcgggaggacatcttctactgcggcaagctgtgggccaccaaccacgtgcctgagatggtgcggcccaccctggagaggaccctgcgggtgctgcagctggactatgtggacctgtacatcatcgaggtgcccatggccttcaagccaggagatgagatctaccccagagatgaaaatggcaagtggctgtaccacaagagcaacctgtgtgccacctgggaggccatggaggcctgcaaggatgctggcctggtgaagagcctgggcgtgagcaacttcaacagacggcagctggagctgatcctgaacaagccaggcctgaagcacaagcctgtgagcaaccaggtggagtgccacccctacttcacccagcccaagctgctgaagttctgccagcagcacgacatcgtcatcacagcctacagccccctgggcaccagcaggaaccccatctgggtgaatgtgagcagcccccccctgctgaaggatgccctgctgaacagcctgggcaagcgctacaacaagacagctgcccagatcgtgctgcgcttcaacatccagaggggcgtggtggtgatccccaagagcttcaacctggagcgcatcaaggagaacttccagatctttgacttcagcctgacagaggaggagatgaaggacatcgaggccctgaacaagaatgtgcgctttgtggagctgctgatgtggagggaccaccctgagtaccccttccatgatgagtactag

SEQ ID NO: 143269 - DNA, 441 bp, synthetic construct
  misc_feature 1..441: note = Description of Artificial Sequence: Synthetic coding sequence
  source 1..441: mol_type = other DNA
atggccttcaagccaggagatgagatctaccccagagatgaaaatggcaagtggctgtaccacaagagcaacctgtgtgccacctgggaggccatggaggcctgcaaggatgctggcctggtgaagagcctgggcgtgagcaacttcaacagacggcagctggagctgatcctgaacaagccaggcctgaagcacaagcctgtgagcaaccaggtggagtgccacccctacttcacccagcccaagctgctgaagttctgccagcagcacgacatcgtcatcacagcctacagccccctgggcaccagcaggaaccccatctggaggcagctgcacaagctggccctgctggacctgcccatcctgcgggtgaccctgcacagcgtgcacaccctgcacagcgagaagctggtgactggagacctgcagtgccctggatag

SEQ ID NO: 143270 - DNA, 672 bp, synthetic construct
  misc_feature 1..672: note = Description of Artificial Sequence: Synthetic coding sequence
  source 1..672: mol_type = other DNA
atggcccaccgcttccctgccctgacccaggagcagaagaaggacagccagggcaagctgttcaggaacatcctgaaggagaagggcatcgtggtgggcatcaagctggaccagggcggggcccccctggccggcaccaacaaggagaccaccatccagggcctggatggcctgtctgagcgctgtgcccagtacaagaaggatggagtggactttgggaagtggagggctgtgctgagaattgctgaccagtgccccagcagcctggccatccaggagaatgccaatgccctggcccgctatgccagcatctgccagcagaatggcctggtgcccatcgtggagcctgaggtgatcccagatggagaccatgacctggagcactgccagtatgtgacagagaaggtgctggccgctgtgtacaaggccctgaatgaccaccacgtgtacctggagggcaccctgctgaagcccaacatggtgacagctggccacgcctgcaccaagaagtacaccccagagcaggtggccatggccaccgtgacagccctgcacaggacagtgcctgctgctgtgcccggcatctgcttcctgagcggcggcatgtctgaagaagatgccaccctgaacctgaatgccatccccaccagggtgcagtgccccccagcctag

SEQ ID NO: 143271 - DNA, 1095 bp, synthetic construct
  misc_feature 1..1095: note = Description of Artificial Sequence: Synthetic coding sequence
  source 1..1095: mol_type = other DNA
atggcccaccgcttccctgccctgacccaggagcagaagaaggagctgtctgaaattgcccagagcatcgtggccaacgggaagggcatcctggccgcagatgagagcgtgggcaccatgggcaaccggctgcagaggatcaaggtggagaacacagaggagaacagacggcagttccgggagatcctcttctctgtggacagcagcatcaaccagagcatcggcggcgtcatcctcttccacgagaccctgtaccagaaggacagccagggcaagctgttcaggaacatcctgaaggagaagggcatcgtggtgggcatcaagctggaccagggcggggcccccctggccggcaccaacaaggagaccaccatccagggcctggatggcctgtctgagcgctgtgcccagtacaagaaggatggagtggactttgggaagtggagggctgtgctgagaattgctgaccagtgccccagcagcctggccatccaggagaatgccaatgccctggcccgctatgccagcatctgccagcagaatggcctggtgcccatcgtggagcctgaggtgatcccagatggagaccatgacctggagcactgccagtatgtgacagagaaggtgctggccgctgtgtacaaggccctgaatgaccaccacgtgtacctggagggcaccctgctgaagcccaacatggtgacagctggccacgcctgcaccaagaagtacaccccagagcaggtggccatggccaccgtgacagccctgcacaggacagtgcctgctgctgtgcccggcatctgcttcctgagcggcggcatgtctgaggaggatgccaccctgaacctgaatgccatcaacctgtgccccctgcccaagccctggaagctgtccttctcctatggccgggccctgcaggccagcgccctggccgcctggggcggcaaggccgccaacaaggaggccacccaggaggccttcatgaagagggccatggccaactgccaggccgccaagggccagtatgtgcacacaggcagcagtggagctgccagcacccagagcctcttcaccgcctgctacacctactag

SEQ ID NO: 143272 - DNA, 951 bp, synthetic construct
  misc_feature 1..951: note = Description of Artificial Sequence: Synthetic coding sequence
  source 1..951: mol_type = other DNA
atggcccaccgcttccctgccctgacccaggagcagaagaaggagctgtctgaaattgcccagagcatcgtggccaacgggaagggcatcctggccgcagatgagagcgtgggcaccatgggcaaccggctgcagaggatcaaggtggagaacacagaggagaacagacggcagttccgggagatcctcttctctgtggacagcagcatcaaccagagcatcggcggcgtcatcctcttccacgagaccctgtaccagaaggacagccagggcaagctgttcaggaacatcctgaaggagaagggcatcgtggtgggcatcaagctggaccagggcggggcccccctggccggcaccaacaaggagaccaccatccagggcctggatggcctgtctgagcgctgtgcccagtacaagaaggatggagtggactttgggaagtggagggctgtgctgagaattgctgaccagtgccccagcagcctggccatccaggagaatgccaatgccctggcccgctatgccagcatctgccagcagaatggcctggtgcccatcgtggagcctgaggtgatcccagatggagaccatgacctggagcactgccagtatgtgacagagaaggtgctggccgctgtgtacaaggccctgaatgaccaccacgtgtacctggagggcaccctgctgaagcccaacatggtgacagctggccacgcctgcaccaagaagtacaccccagagcaggtggccatggccaccgtgacagccctgcacaggacagtgcctgctgctgtgcccggcatctgcttcctgagcggcggcatgtctgaggaggatgccaccctgaacctgaatgccatcaacctgtgccccctgcccaagccctggaagctgtccttctctggagtggcccggctgcagacccggcggcagccccggcggctgctgtag

SEQ ID NO: 143273 - DNA, 1947 bp, synthetic construct
  misc_feature 1..1947: note = Description of Artificial Sequence: Synthetic coding sequence
  source 1..1947: mol_type = other DNA
atggtgtccctgcccccaccccagagtgatgtgaccctgcccggccccacccggctggagggggagcggcagggcgacctgatgcaggcccctggcctgcccggcagccctgccccccagagcaagcacgccggcttcagctgcagcagctttgtgtctgatggccccccagagaggacccccagcctgcccccccacagcccccgcatcgccagccctggccctgagcaggtgcagggccactgcccagctggccctggccctggccccttccggctgagccccagcgacaagtacccaggcttcggctttgaggaggccgccgccagcagccctggccgcttcctgaagggcagccacgcccccttccacccctacaagaggcccttccatgaagatgtgtttcctgaggccgagaccaccctggccctgaagggccacagcttcaagaccccaggccccctggaggcctttgaggagatccctgtggatgtggccgaggccgaggccttcctgcccggcttctctgctgaggcctggtgcaatggcctgccctaccccagccaggagcacggcccccaggtgctgggcagcgaggtgaaggtgaagccccctgtgctggagagcggggccggcatgttctgctaccagccccccctgcagcacatgtactgcagcagccagccccccttccaccagtacagccctgggggcggcagctaccccatcccctacctgggcagcagccactaccagtaccagaggatggccccccaggccagcacagatggccaccagcccctcttccccaagcccatctacagctacagcatcctgatcttcatggccctgaagaacagcaagacaggcagcctgcctgtgtctgagatctacaacttcatgacagagcacttcccctacttcaagacagccccagatggctggaagaacagcgtgcgccacaacctgagcctgaacaagtgctttgagaaggtggagaacaagagcggcagcagcagcaggaagggctgcctgtgggccctgaacccagccaagattgacaagatgcaggaggagctgcagaagtggaagaggaaggaccccatcgctgtgaggaagtccatggccaagccagaggagctggacagcctgattggagacaagcgggagaagctgggcagccccctgctgggctgccccccacctggcctgagcggcagcggccccatccggcccctggcccctcctgctggcctgagcccccccctgcacagcctgcacccagcccctggccccatccctgggaagaaccccctgcaggacctgctgatgggccacacccccagctgctacggccagacctacctgcacctgagccctggcctggcccctcctggccccccccagcccctcttcccccagccagatggccacctggagctgcgggcccagcccggcaccccccaggacagccccctgcctgcccacaccccacccagccacagcgccaagctgctggccgagcccagccctgcccggaccatgcatgacaccctgctgcctgatggagacctgggcacagacctggatgccatcaaccccagcctgacagactttgacttccagggcaacctgtgggagcagctgaaggatgacagcctggccctggaccccctggtgctggtgaccagcagccccaccagcagctccatgcccccaccccagcccccaccccactgcttccccccaggcccctgcctgacagagaccggcagcggggccggggacctggccgcccctggcagcggcggcagcggggccctgggggacctgcacctgaccaccctgtacagcgccttcatggagctggagcccaccccacccacagccccagctggccccagcgtgtacctgagccccagcagcaagcctgtggccctggcctag

SEQ ID NO: 143274 - DNA, 1095 bp, synthetic construct
  misc_feature 1..1095: note = Description of Artificial Sequence: Synthetic coding sequence
  source 1..1095: mol_type = other DNA
atgccccacagctacccagccctgtctgctgagcagaagaaggagctgagtgacatcgccctgagaattgtggcccctgggaagggcatcctggccgcagatgagagcgtgggctccatggccaagaggctgagccagattggagtggagaacacagaggagaacagaaggctgtaccggcaggtgctcttcagcgcagatgacagagtgaagaagtgcatcggcggcgtcatcttcttccacgagaccctgtaccagaaggatgacaacggggtgccctttgtgaggaccatccaggacaagggcatcgtggtgggcatcaaggtggacaagggcgtggtgcccctggccggcacagatggagagaccaccacccagggcctggatggcctgtctgagcgctgtgcccagtacaagaaggatggagctgactttgccaagtggaggtgtgtgctgaagatcagcgagaggacccccagcgccctggccatcctggagaatgccaacgtgctggcccgctatgccagcatctgccagcagaatggaattgtgcccatcgtggagcctgagatcctgcctgatggagaccatgacctgaagcgctgccagtatgtgacagagaaggtgctggccgctgtgtacaaggccctgagtgaccaccacgtgtacctggagggcaccctgctgaagcccaacatggtgaccccaggccacgcctgccccatcaagtacaccccagaggagatcgccatggccaccgtgacagccctgcggaggacagtgcccccagctgtgcctggggtgaccttcctgagcggcggccagagcgaggaggaggccagcttcaacctgaatgccatcaaccgctgccccctgccccggccctgggccctgaccttctcctatggccgggccctgcaggccagcgccctgaatgcctggaggggccagagggacaatgctggggccgccacagaggagttcatcaagagagctgaggtgaatggcctggccgcccagggcaagtatgagggcagcggggaggatggaggagctgctgcccagagcctgtacatcgccaaccacgcctactag

SEQ ID NO: 143275 - DNA, 450 bp, synthetic construct
  misc_feature 1..450: note = Description of Artificial Sequence: Synthetic coding sequence
  source 1..450: mol_type = other DNA
atgccccacagctacccagccctgtctgctgagcagaagaaggagctgagtgacatcgccctgagaattgtggcccctgggaagggcatcctggccgcagatgagagcgtgggctccatggccaagaggctgagccagattggagtggagaacacagaggagaacagaaggctgtaccggcaggtgctcttcagcgcagatgacagagtgaagaagtgcatcggcggcgtcatcttcttccacgagaccctgtaccagaaggatgacaacggggtgccctttgtgaggaccatccaggacaagggcatcgtggtgggcatcaaggtggacaagggcgtggtgcccctggccggcacagatggagagaccaccacccagggcctggatggcctgtctgagcgctgtgcccagtacaagaaggatggagctgactttgccaagtggaggtag

SEQ ID NO: 143276 - DNA, 795 bp, synthetic construct
  misc_feature 1..795: note = Description of Artificial Sequence: Synthetic coding sequence
  source 1..795: mol_type = other DNA
atgcccagcatctttgcctaccagagcagcgaggtggactggtgtgagagcaacttccagtacagcgagctggtggccgagttctacaacaccttcagcaacatccccttcttcatcttcggccccctgatgatgctgctgatgcacccctatgcccagaagaggagccgctacatctacgtggtgtgggtgctcttcatgatcatcggcctcttctccatgtacttccacatgaccctgtccttcctgggccagctgctggatgagatcgccatcctgtggctgctgggcagcggctacagcatctggatgccccgctgctacttccccagcttcctgggcggcaacagaagccagttcatccggctggtgttcatcaccaccgtggtgtccaccctgctgtccttcctgcggcccaccgtgaatgcctatgccctgaacagcatcgccctgcacatcctgtacatcgtgtgccaggagtacaggaagaccagcaacaaggagctgcggcacctgattgaggtgtctgtggtgctgtgggccgtggccctgacctcctggatcagtgaccggctgctgtgcagcttctggcagaggatccacttcttctacctgcacagcatctggcacgtgctgatcagcatcaccttcccctacggcatggtgaccatggccctggtggatgccaactatgagatgcctggagagaccctgaaggtgcgctactggccccgggacagctggcctgtgggcctgccctacgtggagatcagaggagatgacaaggactgctag

SEQ ID NO: 143277 - DNA, 828 bp, synthetic construct
  misc_feature 1..828: note = Description of Artificial Sequence: Synthetic coding sequence
  source 1..828: mol_type = other DNA
atgggcgccccccactggtgggaccagctgcaggccggcagcagcgaggtggactggtgtgaggacaactacaccatcgtgcctgccatcgccgagttctacaacaccatcagcaatgtgctcttcttcatcctgccccccatctgcatgtgcctcttccggcagtatgccacctgcttcaacagcggcatctacctgatctggaccctgctggtggtggtgggcatcggctctgtgtacttccacgccaccctgtccttcctgggccagatgctggatgagctggccgtgctgtgggtgctgatgtgtgccctggccatgtggttcccccggcgctacctgcccaagatcttcagaaatgaccggggccgcttcaaggtggtggtgtctgtgctgtctgctgtgaccacctgcctggcctttgtgaagccagccatcaacaacatcagcctgatgaccctgggcgtgccctgcacagccctgctgattgctgagctgaagagatgtgacaacatgagggtcttcaagctgggcctcttcagcggcctgtggtggaccctggccctcttctgctggatcagtgaccgggccttctgtgagctgctgagcagcttcaacttcccctacctgcactgcatgtggcacatcctgatctgcctggccgcctacctgggctgtgtgtgctttgcctactttgatgctgccagcgagatccctgagcagggccctgtgatcaagttctggcccaatgagaagtgggccttcatcggcgtgccctacgtgtccctgctgtgtgccaacaagaagagctctgtgaagatcacctag

SEQ ID NO: 143278 - DNA, 423 bp, synthetic construct
  misc_feature 1..423: note = Description of Artificial Sequence: Synthetic coding sequence
  source 1..423: mol_type = other DNA
atgtgcctcttccggcagtatgccacctgcttcaacagcggcatctacctgatctggaccctgctggtggtggtgggcatcggctctgtgtacttccacgccaccctgtccttcctgggccagatgctggatgagctggccgtgctgtgggtgctgatgtgtgccctggccatgtggttcccccggcgctacctgcccaagatcttcagaaatgaccggggccgcttcaaggtggtggtgtctgtgctgtctgctgtgaccacctgcctggcctttgtgaagccagccatcaacaacatcagcctgatgaccctgggcgtgccctgcacagccctgctgattgctgagctgaagagacatgagaggaaccagaggcggcggcacaggaagggcggccagcagggcggcggggacaaggtgtag

SEQ ID NO: 143279 - DNA, 1587 bp, synthetic construct
  misc_feature 1..1587: note = Description of Artificial Sequence: Synthetic coding sequence
  source 1..1587: mol_type = other DNA
atgcagggcccctgggtgctgctgctgctgggcctgcggctgcagctgagcctgggcgtcatcccagctgaggaggagaacccagccttctggaaccggcaggccgctgaggccctggatgctgccaagaagctgcagcccatccagaaggtggccaagaacctgatcctcttcctgggagatggcctgggcgtgcccaccgtgacagccacccgcatcctgaagggccagaagaatggcaagctgggccctgagacccccctggccatggaccgcttcccctacctggccctgagcaagacctacaacgtggaccggcaggtgcctgattctgctgccacagccacagcctacctgtgtggggtgaaggccaacttccagaccatcggcctgtctgctgctgcccgcttcaaccagtgcaacaccaccagaggaaatgaggtgatctctgtgatgaacagagccaagcaggccggcaagtctgtgggcgtggtgaccaccaccagggtgcagcacgccagccctgctggcacctacgcccacacagtgaacagaaactggtacagtgatgctgacatgcctgccagcgcccggcaggagggctgccaggacatcgccacccagctgatcagcaacatggacattgatgtgatcctgggcggcggcaggaagtacatgttccccatgggcaccccagaccctgagtacccagcagatgccagccagaatggcatccggctggatggcaagaacctggtgcaggagtggctggccaagcaccagggcgcctggtacgtgtggaacagaacagagctgatgcaggccagcctggaccagagcgtgacccacctgatgggcctgtttgagcccggggacaccaagtatgagatccaccgggaccccaccctggaccccagcctgatggagatgacagaagctgccctgcggctgctgagcaggaacccccggggcttctacctgtttgtggagggcggcagaattgaccacggccaccatgaaggagtggcctaccaggccctgacagaggccgtgatgtttgatgatgccatcgagcgggccggccagctgaccagcgaggaggacaccctgaccctggtgacagctgaccacagccacgtgttctcctttggaggctacaccctgcggggcagcagcatcttcggcctggcccccagcaaggcccaggacagcaaggcctacaccagcatcctgtatggaaatggacctggctacgtgttcaacagcggcgtgcggccagatgtgaatgaaagtgaaagtggcagcccagactaccagcagcaggccgctgtgcccctgagcagcgagacccatggaggagaagatgtggccgtgtttgcccggggcccccaggcccacctggtgcatggagtgcaggagcagagctttgtggcccacgtgatggcctttgctgcctgcctggagccctacacagcctgtgacctggcccccccagcctgcaccacagatgctgcccaccctgtggccgccagcctgcccctgctggccggcaccctgctgctgctgggcgccagcgctgccccctag

SEQ ID NO: 143280 - DNA, 513 bp, synthetic construct
  misc_feature 1..513: note = Description of Artificial Sequence: Synthetic coding sequence
  source 1..513: mol_type = other DNA
atggaccgggccatcggccaggccggcagcctgaccagcagcgaggacaccctgactgtggtgacagctgaccacagccacgtgttcacctttggaggctacaccccccggggcaacagcatcttcggcctggcccccatgctgagtgacacagacaagaagcccttcaccgccatcctgtatggaaatggacctggctacaaggtggtgggcggggagagagaaaatgtgtccatggtggactatgcccacaacaactaccaggcccagagcgctgtgcccctgcggcatgagacccacggcggagaagatgtggccgtgttcagcaagggccccatggcccacctgctgcacggcgtgcatgagcagaactacgtgccccacgtgatggcctatgctgcctgcatcggggccaacctgggccactgtgccccagccagcagcgctggcagcctggccgccggccccctgctgctggccctggccctgtaccccctgtctgtgctcttctag

SEQ ID NO: 143281 - DNA, 513 bp, synthetic construct; identical to SEQ ID NO: 143280
  misc_feature 1..513: note = Description of Artificial Sequence: Synthetic coding sequence
  source 1..513: mol_type = other DNA

SEQ ID NO: 143282 - DNA, 1575 bp, synthetic construct
  misc_feature 1..1575: note = Description of Artificial Sequence: Synthetic coding sequence
  source 1..1575: mol_type = other DNA
atgatcagccccttcctggtgctggccatcggcacctgcctgaccaacagcctggtgcctgagaaggagaaggaccccaagtactggagggaccaggcccaggagaccctgaagtatgccctggagctgcagaagctgaacaccaacgtggccaagaatgtcatcatgttcctgggagatggcatgggcgtgtccacagtgacagctgcccgcatcctgaagggccagctgcaccacaaccctggagaggagacccggctggagatggacaagttcccctttgtggccctgagcaagacctacaacaccaatgcccaggtgcctgacagcgctggaacagccacagcctacctgtgtggggtgaaggccaatgaaggaacagtgggcgtgtctgctgccacagagaggagccgctgcaacaccacccagggcaatgaggtgaccagcatcctgcgctgggccaaggatgctgggaagtctgtgggcatcgtgaccaccaccagggtgaaccacgccaccccatctgctgcctatgcccacagcgctgaccgggactggtacagcgacaatgagatgcctcctgaggccctgagccagggctgcaaggacatcgcctaccagctgatgcacaacatccgggacattgatgtgatcatgggcggcggcaggaagtacatgtaccccaagaacaagacagatgtggagtatgaaagtgatgagaaggcccggggcacccggctggatggcctggacctggtggacacctggaagagcttcaagccccgctacaagcacagccacttcatctggaacagaacagagctgctgaccctggacccccacaacgtggactacctgctgggcctgtttgagcccggggacatgcagtatgagctgaacagaaataatgtgacagaccccagcctgtctgagatggtggtggtggccatccagatcctgaggaagaaccccaagggcttcttcctgctggtggagggcggcagaattgaccacggccaccacgagggcaaggccaagcaggccctgcacgaggccgtggagatggaccgggccatcggccaggccggcagcctgaccagcagcgaggacaccctgactgtggtgacagctgaccacagccacgtgttcacctttggaggctacaccccccggggcaacagcatcttcggcctggcccccatgctgagtgacacagacaagaagcccttcaccgccatcctgtatggaaatggacctggctacaaggtggtgggcggggagagagaaaatgtgtccatggtggactatgcccacaacaactaccaggcccagagcgctgtgcccctgcggcatgagacccacggcggagaagatgtggccgtgttcagcaagggccccatggcccacctgctgcacggcgtgcatgagcagaactacgtgccccacgtgatggcctatgctgcctgcatcggggccaacctgggccactgtgccccagccagcagcgctggcagcctggccgccggccccctgctgctggccctggccctgtaccccctgtctgtgctcttctag

SEQ ID NO: 143283 - DNA, 1575 bp, synthetic construct; identical to SEQ ID NO: 143282
  misc_feature 1..1575: note = Description of Artificial Sequence: Synthetic coding sequence
  source 1..1575: mol_type = other DNA

SEQ ID NO: 143284 - DNA, 1575 bp, synthetic construct; identical to SEQ ID NO: 143282
  misc_feature 1..1575: note = Description of Artificial Sequence: Synthetic coding sequence
  source 1..1575: mol_type = other DNA

SEQ ID NO: 143285 - DNA, 1344 bp, synthetic construct
  misc_feature 1..1344: note = Description of Artificial Sequence: Synthetic coding sequence
  source 1..1344: mol_type = other DNA
atgccctggagcttccgcagcagcacccccacctggctgaggatgagcagctgctcctgggagatgacctacaacaccaatgcccaggtgcctgattctgctggaacagccacagcctacctgtgtggggtgaaggccaatgaaggcaccgtgggcgtgtctgctgccacagagaggagccgctgcaacaccacccagggcaatgaggtgaccagcatcctgcgctgggccaaggatgctgggaagtctgtgggcatcgtgaccaccaccagggtgaaccacgccacccccagcgctgcctatgcccacagcgctgaccgggactggtacagcgacaatgagatgcctcctgaggccctgagccagggctgcaaggacatcgcctaccagctgatgcacaacatccgggacattgatgtgatcatgggcggcggcaggaagtacatgtaccccaagaacaagacagatgtggagtatgaaagtgatgagaaggcccggggcacccggctggatggcctggacctggtggacacctggaagagcttcaagccccgctacaagcacagccacttcatctggaacagaacagagctgctgaccctggacccccacaacgtggactacctgctgggcctgtttgagcccggggacatgcagtatgagctgaacagaaacaacgtgacagaccccagcctgtctgagatggtggtggtggccatccagatcctgaggaagaaccccaagggcttcttcctgctggtggagggcggcagaattgaccacggccaccacgagggcaaggccaagcaggccctgcatgaagctgtggagatggaccgggccatcggccaggccggcagcctgaccagcagcgaggacaccctgactgtggtgacagctgaccacagccacgtgttcaccttcggcggctacaccccccggggcaacagcatcttcggcctggcccccatgctgagtgacacagacaagaagcccttcaccgccatcctgtatggaaatggacctggctacaaggtggtgggcggggagcgggagaatgtgtccatggtggactatgcccacaacaactaccaggcccagagcgctgtgcccctgcggcatgagacccatggaggagaagatgtggccgtgttcagcaagggccccatggcccacctgctgcatggagtgcatgagcagaactacgtgccccacgtgatggcctatgctgcctgcattggagccaacctgggccactgtgccccagccagcagcgctggcagcctggccgccggccccctgctgctggccctggccctgtaccccctgtctgtgctcttctag

SEQ ID NO: 143286 - DNA, 1410 bp, synthetic construct
  misc_feature 1..1410: note = Description of Artificial Sequence: Synthetic coding sequence
  source 1..1410: mol_type = other DNA
atgttcctgggagatggcatgggcgtgtccacagtgacagctgcccgcatcctgaagggccagctgcaccacaaccctggagaggagacccggctggagatggacaagttcccctttgtggccctgagcaagacctacaacaccaatgcccaggtgcctgattctgctggaacagccacagcctacctgtgtggggtgaaggccaatgaaggcaccgtgggcgtgtctgctgccacagagaggagccgctgcaacaccacccagggcaatgaggtgaccagcatcctgcgctgggccaaggatgctgggaagtctgtgggcatcgtgaccaccaccagggtgaaccacgccacccccagcgctgcctatgcccacagcgctgaccgggactggtacagcgacaatgagatgcctcctgaggccctgagccagggctgcaaggacatcgcctaccagctgatgcacaacatccgggacattgatgtgatcatgggcggcggcaggaagtacatgtaccccaagaacaagacagatgtggagtatgaaagtgatgagaaggcccggggcacccggctggatggcctggacctggtggacacctggaagagcttcaagccccgctacaagcacagccacttcatctggaacagaacagagctgctgaccctggacccccacaacgtggactacctgctgggcctgtttgagcccggggacatgcagtatgagctgaacagaaacaacgtgacagaccccagcctgtctgagatggtggtggtggccatccagatcctgaggaagaaccccaagggcttcttcctgctggtggagggcggcagaattgaccacggccaccacgagggcaaggccaagcaggccctgcatgaagctgtggagatggaccgggccatcggccaggccggcagcctgaccagcagcgaggacaccctgactgtggtgacagctgaccacagccacgtgttcaccttcggcggctacaccccccggggcaacagcatcttcggcctggcccccatgctgagtgacacagacaagaagcccttcaccgccatcctgtatggaaatggacctggctacaaggtggtgggcggggagcgggagaatgtgtccatggtggactatgcccacaacaactaccaggcccagagcgctgtgcccctgcggcatgagacccatggaggagaagatgtggccgtgttcagcaagggccccatggcccacctgctgcatggagtgcatgagcagaactacgtgccccacgtgatggcctatgctgcctgcattggagccaacctgggccactgtgccccagccagcagcgctggcagcctggccgccggccccctgctgctggccctggccctgtaccccctgtctgtgctcttctag

SEQ ID NO: 143287 - DNA, 1608 bp, synthetic construct
  misc_feature 1..1608: note = Description of Artificial Sequence: Synthetic coding sequence
  source 1..1608: mol_type = other DNA
atgctgggcccctgcatgctgctgctgctgctgctgctgggcctgcggctgcagctgagcctgggcatcatccctgtggaggaggagaacccagacttctggaaccgggaggccgctgaggccctgggcgccgccaagaagctgcagcctgcccagacagctgccaagaacctgatcatcttcctgggagatggcatgggcgtgtccacagtgacagctgcccgcatcctgaagggccagaagaaggacaagctgggccctgagatccccctggccatggaccgcttcccctacgtggccctgagcaagacctacaacgtggacaagcacgtgcctgacagcggggccacagccacagcctacctgtgtggggtgaagggcaacttccagaccatcggcctgtctgctgctgcccgcttcaaccagtgcaacaccaccagaggaaatgaagtcatctctgtgatgaacagagccaagaaggccggcaagtctgtgggcgtggtgaccaccaccagggtgcagcacgccagccctgctggcacctacgcccacacagtgaacagaaactggtacagtgatgctgatgtgcctgccagcgcccggcaggagggctgccaggacatcgccacccagctgatcagcaacatggacattgatgtgatcctgggcggcggcaggaagtacatgttcaggatgggcaccccagaccctgagtacccagatgactacagccagggcggcacccggctggatggcaagaacctggtgcaggagtggctggccaagaggcagggcgcccgctacgtgtggaacagaacagagctgatgcaggccagcctggaccccagcgtgacccacctgatgggcctgtttgagcccggggacatgaagtatgagatccaccgggacagcaccctggaccccagcctgatggagatgacagaggccgccctgcggctgctgagcaggaacccccggggcttcttcctgtttgtggagggcggcagaattgaccacggccaccacgagagccgggcctaccgggccctgacagagaccatcatgtttgatgatgccatcgagagagctggccagctgaccagcgaggaggacaccctgagcctggtgacagctgaccacagccacgtgttctcctttggaggctaccccctgcggggcagcagcatcttcggcctggcccctgggaaggcccgggacaggaaggcctacacagtgctgctgtatggaaatggacctggctacgtgctgaaggatggagcccggccagatgtgacagagagcgagagcggcagccctgagtaccggcagcagagcgctgtgcccctggatgaggagacccatgctggagaagatgtggccgtgtttgcccggggcccccaggcccacctggtgcacggcgtgcaggagcagaccttcatcgcccacgtgatggcctttgctgcctgcctggagccctacacagcctgtgacctggcccccccagctggcaccacagatgctgcccaccctggccgctctgtggtgcctgccctgctgcccctgctggccggcaccctgctgctgctggagacagccacagccccctag

SEQ ID NO: 143288 - DNA, 1599 bp, synthetic construct
  misc_feature 1..1599: note = Description of Artificial Sequence: Synthetic coding sequence
  source 1..1599: mol_type = other DNA
atgcagggcccctgggtgctgctgctgctgggcctgcggctgcagctgagcctgggcatcatccctgtggaggaggagaacccagacttctggaaccggcaggccgctgaggccctgggcgccgccaagaagctgcagcctgcccagacagctgccaagaacctgatcatcttcctgggagatggcatgggcgtgtccacagtgacagctgcccgcatcctgaagggccagaagaaggacaagctgggccctgagaccttcctggccatggaccgcttcccctacgtggccctgagcaagacctacagcgtggacaagcacgtgcctgattctggggccacagccacagcctacctgtgtggggtgaagggcaacttccagaccatcggcctgtctgctgctgcccgcttcaaccagtgcaacaccaccagaggaaatgaggtgatctctgtgatgaacagagccaagaaggccggcaagtctgtgggcgtggtgaccaccaccagggtgcagcacgccagccctgctggggcctatgcccacacagtgaacagaaactggtacagtgatgctgatgtgcctgccagcgcccggcaggagggctgccaggacatcgccacccagctgatcagcaacatggacattgatgtgatcctgggcggcggcaggaagtacatgttccccatgggcaccccagaccctgagtacccagatgactacagccagggcggcacccggctggatggcaagaacctggtgcaggagtggctggccaagcaccagggcgcccgctacgtgtggaacagaacagagctgctgcaggccagcctggaccccagcgtgacccacctgatgggcctgtttgagcccggggacatgaagtatgagatccaccgggacagcaccctggaccccagcctgatggagatgacagaagctgccctgctgctgctgagcaggaacccccggggcttcttcctgtttgtggagggcggcagaattgaccacggccaccacgagagccgggcctaccgggccctgacagagaccatcatgtttgatgatgccatcgagcgggccggccagctgaccagcgaggaggacaccctgagcctggtgacagctgaccacagccacgtgttctcctttggaggctaccccctgcggggcagcagcatcttcggcctggcccctgggaaggcccgggacaggaaggcctacacagtgctgctgtatggaaatggacctggctacgtgctgaaggatggagcccggccagatgtgacagaaagtgaaagtggcagccctgagtaccggcagcagagcgctgtgcccctggatggagagacccacgccggggaggatgtggccgtgtttgcccggggcccccaggcccacctggtgcatggagtgcaggagcagaccttcatcgcccacgtgatggcctttgctgcctgcctggagccctacacagcctgtgacctggcccccagggctggcaccacagatgctgcccaccctggccccagcgtggtgcctgccctgctgcccctgctggccggcaccctgctgctgctgggcacagccacagccccctag

SEQ ID NO: 143289 - DNA, 474 bp, synthetic construct
  misc_feature 1..474: note = Description of Artificial Sequence: Synthetic coding sequence
  source 1..474: mol_type = other DNA
atggaccgcttcctggtgaagggggcccagggcggcctgctgaggaagcaggaggagcaggagcccactggagaggagcctgctgtgctgggcggggacaaggagagcaccaggaagaggccccggcgggaggcccctggaaatggaggccacagcgctggccccagctggaggcacatccgggcagagggcctggactgcagctacacagtgctgtttgggaaggccgaggctgatgagatcttccaggagctggagaaggaggtggagtacttcaccggcatcaagatggctgtgaccaccagcggcagcacagagatgatgaaggagaactggcccctgggcgcccccctgcccctgagccccagcgtgcctgctgagaccctgagcagcggcatccgcatccctgtgggcaaggcccctcctgggggctggcgctggagcggctgccgctggcccaccggggcctactag

SEQ ID NO: 143290 - DNA, 2958 bp, synthetic construct
  misc_feature 1..2958: note = Description of Artificial Sequence: Synthetic coding sequence
  source 1..2958: mol_type = other DNA
atgatcagacatgctggggccccagcccggggggaccccaccggccctgtgcctgtggtgggcaagggggaggaggaggaggaggaggatggcatgaggctgtgcctgcctgccaaccccaagaactgcctgccccacagaagaggcatcagcatcctggagaagctgatcaagacctgccctgtgtggctgcagctgagcctgggccaggccgaggtggcccgcatcctgcaccgggtggtggccggcatgttcctggtgcggcgggacagcagcagcaagcagctggtgctgtgtgtgcacttccccagcctgaatgaatcttctgctgaggtgctggagtacaccatcaaggaggagaagagcatcctgtacctggagggcagcgccctggtgtttgaggacatcttccgcctcatcgccttctactgtgtgtcccgggacctgctgcccttcaccctgcggctgccccaggccatcctggaggccagcagcttcacagacctggagaccatcgccaacctgggcctgggcttctgggacagcagcctgaaccccccccaggagcggggcaagccagctgagcccccccgggaccgggcccctggcttccccctggtgagcagcctgcggcccacagcccatgatgccaactgtgcctgtgaaattgagctgtctgtgggcaatgaccggctgtggtttgtgaaccccatcttcatcgaggactgcagcagcgccctgcccacagaccagccccccctgggcaactgcccagcccggcccctgccccccaccagtgatgccaccagccccaccagccgctgggccccccggcggcccccacctcctcctcctgtgctgcccctgcagccctgcagccctgcccagccccctgtgctgcctgccctggccccagccccagcctgccccctgcccaccagcccccctgtgcctgcccctcatgtgacccctcatgcccctggccccccagaccaccccaaccagccccccatgatgacctgtgagcggctgccctgccccacagctggcctgggccccctgcgggaggaggccatgaagccaggagctgccagcagccccctgcagcaggtgcctgccccacccctgcctgccaagaagaacctgcccacagccccacccaggagaagagtgtctgagcgggtgtccctggaggaccagagccctggcatggctgctgagggggaccagctgagcctgcccccccagggcaccagtgatggccctgaggacaccccccgggagagcacagagcagggccaggacacagaggtgaaggccagtgacccccacagcatgcctgagctgcccaggacagccaagcagccccctgtgcccccacccaggaagaagaggatcagccggcagctggccagcaccctgcctgcccccctggagaatgctgagctgtgcacccaggccatggccctggagacccccaccccaggccccccccgggagggccagagccctgccagccaggccggcacccagcaccccccagcccaggccacagcccacagccagagcagccctgagttcaagggcagcctggccagcctgagtgacagcctgggcgtgtctgtgatggccacagaccaggacagctacagcaccagcagcacagaggaggagctggagcagttcagcagccccagcgtgaagaagaagcccagcatgatcctgggcaaggcccggcaccggctgagctttgccagcttcagctccatgttccacgccttcctgagcaacaacaggaagctgtacaagaaggtggtggagctggcccaggacaagggcagctacttcggcagcctggtgcaggactacaaggtgtacagcctggagatgatggcccggcagaccagcagcacagagatgctgcaggagatccgcaccatgatgacccagctgaagagctacctgctgcagagcacagagctgaaggccctggtggaccctgccctgcacagcgaggaggagctggaggccatcgtggagagcgccctgtacaagtgtgtgctgaagcccctgaaggaggccatcaacagctgcctgcaccagatccacagcaaggatggcagcctgcagcagctgaaggagaaccagctggtgatcctggccaccaccaccacagacctgggcgtgaccacctctgtgcctgaggtgcccatgatggagaagatcctgcagaagttcacctccatgcacaaggcctacagccctgagaagaagatcagcatcctgctgaagacctgcaagctgatctatgacagcatggccctgggcaaccctgggaagccctacggggctgatgacttcctgcctgtgctgatgtatgtgctggcccggagcaacctgacagagatgctgctgaatgtggagtacatgatggagctgatggaccctgccctgcagctgggggagggcagctactacctgaccaccacctatggagccctggagcacatcaagagctatgacaagatcaccgtgacccggcagctgtctgtggaggtgcaggacagcatccaccgctgggagaggaggaggaccctgaacaaggcccgggccagccgcagctctgtgcaggacttcatctgtgtgtcctacctggagcctgagcagcaggcccggaccctggccagcagagctgacacccaggcccaggccctgtgtgcccagtgtgccgagaagtttgctgtggagcggccccaggcccaccggctgtttgtgctggtggatggccgctgcttccagctggctgatgatgccctgccccactgcatcaagggctacctgctgcggtctgagcccaagagggacttccactttgtgtaccggcccctggatggcggcggcggcggcggcggcggcagccccccctgcctggtggtgcgggagcccaacttcctgtag

SEQ ID NO: 143291 - DNA, 786 bp, synthetic construct
  misc_feature 1..786: note = Description of Artificial Sequence: Synthetic coding sequence
  source 1..786: mol_type = other DNA
atggaccgcttcctggtgaagggggcccagggcggcctgctgaggaagcaggaggagcaggagcccactggagaggagcctgctgtgctgggcggggacaaggagagcaccaggaagaggccccggcgggaggcccctggaaatggaggccacagcgctggccccagctggaggcacatccgggcagagggcctggactgcagctacacagtgctgtttgggaaggccgaggctgatgagatcttccaggagctggagaaggaggtggagtacttcaccggggccctggcccgggtgcaggtgtttgggaagtggcacagcgtgcccaggaagcaggccacctatggagatgctggcctgacctacaccttcagcggcctgaccctgagccccaagccctggatccctgtgctggagcgcatccgggaccacgtgtctggagtgacaggccagaccttcaactttgtgctgatcaaccgctacaaggatggctgtgaccacatcggggagcacagagatgatgagcgggagctggcccctggcagccccatcgcctctgtgtcctttggagcctgccgggactttgtgttccgccacaaggacagccggggcaagagccccagcagaagagtggccgtggtgcggctgcccctggcccacggcagcctgctgatgatgaaccaccccaccaacacccactggtaccacagcctgcctgtgaggaagaaggtgctggccccccgggtgaacctgaccttcaggaagatcctgctgaccaagaagtag

SEQ ID NO: 143292 - DNA, 786 bp, synthetic construct; identical to SEQ ID NO: 143291
  misc_feature 1..786: note = Description of Artificial Sequence: Synthetic coding sequence
  source 1..786: mol_type = other DNA

SEQ ID NO: 143293 - DNA, 786 bp, synthetic construct; identical to SEQ ID NO: 143291
  misc_feature 1..786: note = Description of Artificial Sequence: Synthetic coding sequence
  source 1..786: mol_type = other DNA

SEQ ID NO: 143294 - DNA, 453 bp, synthetic construct
  misc_feature 1..453: note = Description of Artificial Sequence: Synthetic coding sequence
  source 1..453: mol_type = other DNA
atggaccgcttcctggtgaagggggcccagggcggcctgctgaggaagcaggaggagcaggagcccactggagaggagcctgctgtgctgggcggggacaaggagagcaccaggaagaggccccggcgggaggcccctggaaatggaggccacagcgctggccccagctggaggcacatccgggcagagggcctggactgcagctacacagtgctgtttgggaaggccgaggctgatgagatcttccaggagctggagaaggaggtggagtacttcaccggggccctggcccgggtgcaggtgtttgggaagtggcacagcgtgcccaggaagcaggccacctatggagatgctggcctgacctacaccttcagcggcctgaccctgagccccaagccctggatccctgtgctggagcgcatccgggaccacgtgtctggagtgactggatag

SEQ ID NO: 143295 - DNA, 366 bp, synthetic construct
  misc_feature 1..366: note = Description of Artificial Sequence: Synthetic coding sequence
  source 1..366: mol_type = other DNA
atggaccgcttcctggtgaagggggcccagggcggcctgctgaggaagcaggaggagcaggagcccactggagaggagcctgctgtgctgggcggggacaaggagagcaccaggaagaggccccggcgggaggcccctggaaatggaggccacagcgctggccccagctggaggcacatccgggcagagggcctggactgcagctacacagtgctgtttgggaaggccgaggctgatgagatcttccaggagctggagaaggaggtggagtacttcaccggggccctggcccgggtgcaggtgtttgggaagtggcacagcgtgcccaggaagcaggccacctatggagatgctggcctgacctag

SEQ ID NO: 143296 - DNA, 483 bp, synthetic construct
  misc_feature 1..483: note = Description of Artificial Sequence: Synthetic coding sequence
  source 1..483: mol_type = other DNA
atggaccgcttcctggtgaagggggcccagggcggcctgctgaggaagcaggaggagcaggagcccactggagaggagcctgctgtgctgggcggggacaaggagagcaccaggaagaggccccggcgggaggcccctggaaatggaggccacagcgctggccccagctggaggcacatccgggcagagggcctggactgcagctacacagtgctgtttgggaaggccgaggctgatgagatcttccaggagctggagaaggaggtggagtacttcaccggggccctggcccgggtgcaggtgtttgggaagtggcacagcgtgcccaggaagcaggccacctatggagatgctggcctgacctacaccttcagcggcctgaccctgagccccaagccctggatccctgtgctggagcgcatccgggaccacgtgtctggagtgacaggccagaccttcaactttgtgctgatcaacagatag

SEQ ID NO: 143297 - DNA, 861 bp, synthetic construct
  misc_feature 1..861: note = Description of Artificial Sequence: Synthetic coding sequence
  source 1..861: mol_type = other DNA
atggaggagaagagaagaagagcccgggtgcagggcgcctgggccgcccctgtgaagagccaggccatcgcccagcctgccaccacagccaagagccacctgcaccagaagccaggccagacctggaagaacaaggagcaccacctgagtgaccgggagtttgtgttcaaggagccccagcaggtggtgcggcgggcccctgagcccagggtcatcgaccgggagggcgtgtatgagatcagcctgagccccactggagtgtcccgggtgtgcctgtacccaggctttgtggatgtgaaggaggccgactggatcctggagcagctgtgccaggatgtgccctggaagcagaggacaggcatccgggaggacatcacctaccagcagccccggctgacagcctggtacggggagctgccctacacctacagccgcatcaccatggagcccaacccccactggcaccctgtgctgcggaccctgaagaacagaattgaagaaaatacaggccacaccttcaacagcctgctgtgcaacctgtacagaaatgagaaggacagcgtggactggcacagtgatgatgagcccagcctgggccgctgccccatcatcgccagcctgagctttggagccaccaggacctttgagatgaggaagaagcccccaccagaagaaaatggagactacacctacgtggagcgggtgaagatccccctggaccacggcaccctgctgatcatggagggcgccacccaggccgactggcagcaccgggtgcccaaggagtaccacagccgggagccccgggtgaacctgaccttcagaacagtgtacccagaccccaggggggccccctggtag

SEQ ID NO: 143298 - DNA, 513 bp, synthetic construct
  misc_feature 1..513: note = Description of Artificial Sequence: Synthetic coding sequence
  source 1..513: mol_type = other DNA
atggaggagaagagaagaagagcccgggtgcagggcgcctgggccgcccctgtgaagagccaggccatcgcccagcctgccaccacagccaagagccacctgcaccagaagccaggccagacctggaagaacaaggagcaccacctgagtgaccgggagtttgtgttcaaggagccccagcaggtggtgcggcgggcccctgagcccagggtcatcgaggagggcgtgtatgagatcagcctgagccccaccggggtgtcccgggtgtgcctgtacccaggctttgtggatgtgaaggaggccgactggatcctggagcagctgtgccaggatgtgccctggaagcagaggacaggcatccgggaggacagcatcctgcagctgaccttcaagaagagcgcccctgtgtctggaacagccacagccccccagagctgctggtatgaaagacccagccccccccacatccctggccctgccatcctgaccaggacccggctgtgggccccctag

SEQ ID NO: 143299 - DNA, 183 bp, synthetic construct
  misc_feature 1..183: note = Description of Artificial Sequence: Synthetic coding sequence
  source 1..183: mol_type = other DNA
atggaggagaagagaagaagagcccgggtgcagggcgcctgggccgcccctgtgaagagccaggccatcgcccagcctgccaccacagccaagagccacctgcaccagaagccaggccagacctggaagaacaaggagcaccacctgagtgaccgggagtttgtgttcaaggagccccagtag

SEQ ID NO: 143300 - DNA, 909 bp, synthetic construct
  misc_feature 1..909: note = Description of Artificial Sequence: Synthetic coding sequence
  source 1..909: mol_type = other DNA
atggctgctgctgctgctgagaccccagaggtgctgcgggagtgtggctgcaagggcatccgcacctgcctgatctgtgagcggcagaggggcagtgaccccccctgggagctgcccccagccaagacctaccgcttcatctactgcagcgacaccggctgggccgtgggcacagaggagagtgactttgagggctgggccttccccttccctggggtgatgctgattgaagattttgtgacccgggaggaggaggccgagctggtgcggctgatggaccgggacccctggaagctgagccagagcggccgcaggaagcaggactatggccccaaggtgaacttcaggaagcagaagctgaagacagagggcttctgtggcctgcccagcttcagccgggaggtggtgcggaggatgggcctgtacccaggcctggagggcttccggcctgtggagcagtgcaacctggactactgcccagagcggggcagcgccatcgacccccacctggatgatgcctggctgtggggcgagcggctggtgtccctgaacctgctgagccccaccgtgctgtccatgtgccgggaggcccctggcagcctgctgctgtgcagcgcccccagcgctgcccctgaggccctggtggacagcgtgattgcccccagccgctctgtgctgtgccaggaggtggaggtggccatccccctgcctgcccggagcctgctggtgctgactggagctgcccggcaccagtggaagcacgccatccaccggcggcacatcgaggcccggcgggtgtgtgtgaccttccgggagctgtctgctgagtttggacctgggggccggcagcaggagctgggccaggagctgctgagaattgccctgtccttccagggccggcctgtgtag

SEQ ID NO: 143301 - DNA, 1377 bp, synthetic construct
  misc_feature 1..1377: note = Description of Artificial Sequence: Synthetic coding sequence
  source 1..1377: mol_type = other DNA
atggctgctgccagcggctacacagacctgcgggagaagctgaagtccatgaccagccgggacaactacaaggccggcagccgggaggccgctgctgctgctgctgctgctgtggccgctgctgctgctgctgctgctgctgctgagccctaccctgtgtctggggccaagaggaagtaccaggaggacagcgaccctgagaggagtgactatgaggagcagcagctgcagaaggaggaggaggccaggaaggtgaagagcggcatccggcagatgaggctcttcagccaggatgaatgtgccaagattgaggccagaattgatgaggtggtgtccagagctgagaagggcctgtacaatgagcacacagtggaccgggcccccctgaggaacaagtacttctttggagagggctacacctatggagcccagctgcagaagaggggccctggccaggagcggctgtacccacctggagatgtggatgagatccctgagtgggtgcaccagctggtgatccagaagctggtggagcacagggtcatccctgagggctttgtgaacagcgctgtgatcaatgactaccagcccggcggctgcatcgtgagccacgtggaccccatccacatctttgagcggcccatcgtgtctgtgtccttcttcagtgacagcgccctgtgcttcggctgcaagttccagttcaagcccatccgggtgtctgagcctgtgctgagcctgcctgtgagaagaggctctgtgacagtgctgagcggctacgccgcagatgagatcacccactgcatccggccccaggacatcaaggagcggcgggccgtcatcatcctgaggaagacccggctggatgccccccggctggagaccaagagcctgagcagctctgtgctgcccccatcctatgccagtgaccggctgagcggcaacaacagagatcctgccctgaagcccaagaggagccacaggaaggctgaccctgatgctgcccaccggccccgcatcctggagatggacaaggaggagaacagaagatctgtgctgctgcccacccacagaagaagaggcagcttcagcagcgagaactactggaggaagagctatgagagcagcgaggactgcagcgaggccgccggcagccctggcaacagcggcagcagcctgcggagctgccccagcttctgctttgagggctttgtgtttgtgcactggggcgtgtttgtgttctgcttcctgttcttcctgatcctgtacatcttcccctggttctgctgcctgctgggcctgaagaacagaattggccaggacctgggcagccacatcctgggcatccccccaggctggaagggctgctggcaccagtag

SEQ ID NO: 143302 - DNA, 1185 bp, synthetic construct
  misc_feature 1..1185: note = Description of Artificial Sequence: Synthetic coding sequence
  source 1..1185: mol_type = other DNA
atggctgctgccagcggctacacagacctgcgggagaagctgaagtccatgaccagccgggacaactacaaggccggcagccgggaggccgctgctgctgctgctgctgctgtggccgctgctgctgctgctgctgctgctgctgagccctaccctgtgtctggggccaagaggaagtaccaggaggacagcgaccctgagaggagtgactatgaggagcagcagctgcagaaggaggaggaggccaggaaggtgaagagcggcatccggcagatgaggctcttcagccaggatgaatgtgccaagattgaggccagaattgatgaggtggtgtccagagctgagaagggcctgtacaatgagcacacagtggaccgggcccccctgaggaacaagtacttctttggagagggctacacctatggagcccagctgcagaagaggggccctggccaggagcggctgtacccacctggagatgtggatgagatccctgagtgggtgcaccagctggtgatccagaagctggtggagcacagggtcatccctgagggctttgtgaacagcgctgtgatcaatgactaccagcccggcggctgcatcgtgagccacgtggaccccatccacatctttgagcggcccatcgtgtctgtgtccttcttcagtgacagcgccctgtgcttcggctgcaagttccagttcaagcccatccgggtgtctgagcctgtgctgagcctgcctgtgagaagaggctctgtgacagtgctgagcggctacgccgcagatgagatcacccactgcatccggccccaggacatcaaggagcggcgggccgtcatcatcctgaggaagacccggctggatgccccccggctggagaccaagagcctgagcagctctgtgctgcccccatcctatgccagtgaccggctgagcggcaacaacagagatcctgccctgaagcccaagaggagccacaggaaggctgaccctgatgctgcccaccggccccgcatcctggagatggacaaggaggagaacagaagatctgtgctgctgcccacccacagaagaagaggcagcttcagcagcgagaactactggaggaagagctatgagagcagcgaggactgcagcgaggccgccggcagccctgccaggaaggtgaagatgaggaggcactag

SEQ ID NO: 143303 - DNA, 1152 bp, synthetic construct
  misc_feature 1..1152: note = Description of Artificial Sequence: Synthetic coding sequence
  source 1..1152: mol_type = other DNA
atgaggcgctgcagaagaccctgcccagctggccgcggggagggcggcggcggccgcagccctgctgctgctgctgctgtggccgctgctgctgctgctgctgctgctgctgagccctaccctgtgtctggggccaagaggaagtaccaggaggacagcgaccctgagaggagtgactatgaggagcagcagctgcagaaggaggaggaggccaggaaggtgaagagcggcatccggcagatgaggctcttcagccaggatgaatgtgccaagattgaggccagaattgatgaggtggtgtccagagctgagaagggcctgtacaatgagcacacagtggaccgggcccccctgaggaacaagtacttcttcggggagggctacacctacggggcccagctgcagaagaggggccctggccaggagcggctgtacccacctggagatgtggatgagatccctgagtgggtgcaccagctggtgatccagaagctggtggagcacagggtcatccctgagggctttgtgaacagcgctgtgatcaatgactaccagcccggcggctgcatcgtgagccacgtggaccccatccacatctttgagcggcccatcgtgtctgtgtccttcttcagtgacagcgccctgtgcttcggctgcaagttccagttcaagcccatccgggtgtctgagcctgtgctgagcctgcctgtgcggcggggctctgtgacagtgctgagcggctatgctgctgatgagatcacccactgcatccggccccaggacatcaaggagaggagagctgtgatcatcctgaggaagacccggctggatgccccccggctggagaccaagagcctgagcagctctgtgctgccccccagctatgccagtgaccggctgagcggcaacaacagagatcctgccctgaagcccaagaggagccacaggaaggctgaccctgatgctgcccaccggccccgcatcctggagatggacaaggaggagaacagaagatctgtgctgctgcccacccacagaagaagaggcagcttcagcagcgagaactactggaggaagagctatgagagcagcgaggactgcagcgaggccgccggcagccctgccaggaaggtgaagatgagaagacactag

SEQ ID NO: 143304 - DNA, 717 bp, synthetic construct
  misc_feature 1..717: note = Description of Artificial Sequence: Synthetic coding sequence
  source 1..717: mol_type = other DNA
atggaggagcaggatgcccgggtgcctgccctggagcccttccgggtggagcaggcccctcctgtgatctactacgtgcctgacttcatcagcaaggaggaggaggagtacctgctgcggcaggtgttcaatgcccccaagcccaagtggacccagctgagcggcaggaagctgcagaactggggcggcctgccccacccccggggcatggtgcctgagcggctgcccccctggctgcagcgctacgtggacaaggtgagcaacctgagcctgtttggaggcctgcctgccaaccacgtgctggtgaaccagtacctgcctggagagggcatcatgcctcatgaagatggccccctgtactaccccaccgtgtccaccatcagcctgggcagccacacagtgctggacttctatgagcccaggaggccagaagatgatgaccccacagagcagccccggcccccaccccggcccaccaccagcctgctgctggagcccaggagcctgctggtgctgcggggccctgcctacacccggctgctgcacggcattgctgctgcccgggtggatgccctggatgctgccagcagccccccaaatgctgctgcctgccccagcgcccggcctggggcctgcctggtgcggggcaccagggtgtccctgaccatccggcgggtgccccgggtgctgcgggccggcctgctgctgggcaagtag

SEQ ID NO: 143305 - DNA, 801 bp, synthetic construct
  misc_feature 1..801: note = Description of Artificial Sequence: Synthetic coding sequence
  source 1..801: mol_type = other DNA
atggccggccggggcatgggcatgctgaacctggagattggaggagatgctgggggcagaattggctgcaaggagctggtgctgatggaggagcaggatgcccgggtgcctgccctggagcccttccgggtggagcaggcccctcctgtgatctactacgtgcctgacttcatcagcaaggaggaggaggagtacctgctgcggcaggtgttcaatgcccccaagcccaagtggacccagctgagcggcaggaagctgcagaactggggcggcctgccccacccccggggcatggtgcctgagcggctgcccccctggctgcagcgctacgtggacaaggtgagcaacctgagcctgtttggaggcctgcctgccaaccacgtgctggtgaaccagtacctgcctggagagggcatcatgcctcatgaagatggccccctgtactaccccaccgtgtccaccatcagcctgggcagccacacagtgctggacttctatgagcccaggaggccagaagatgatgaccccacagagcagccccggcccccaccccggcccaccaccagcctgctgctggagcccaggagcctgctggtgctgcggggccctgcctacacccggctgctgcacggcattgctgctgcccgggtggatgccctggatgctgccagcagccccccaaatgctgctgcctgccccagcgcccggcctggggcctgcctggtgcggggcaccagggtgtccctgaccatccggcgggtgccccgggtgctgcgggccggcctgctgctgggcaagtag

SEQ ID NO: 143306 - DNA, 717 bp, synthetic construct; identical to SEQ ID NO: 143304
  misc_feature 1..717: note = Description of Artificial Sequence: Synthetic coding sequence
  source 1..717: mol_type = other DNA

SEQ ID NO: 143307 - DNA, 666 bp, synthetic construct
  misc_feature 1..666: note = Description of Artificial Sequence: Synthetic coding sequence
  source 1..666: mol_type = other DNA
atggccggcaccggcctgctggccctgcggaccctgcccggccccagctgggtgcggggcagcggccccagcgtgctgagccggctgcaggatgctgctgtggtgcggcccggcttcctgagcacagctgaggaggagaccctgagccgggagctggagcctgagctgcggaggagaagatatgaatatgaccactgggatgctgccatccacggcttccgggagacagagaagagccgctggagcgaggccagccgggccatcctgcagagggtgcaggccgccgcctttggacctggccagaccctgctgagctctgtgcacgtgctggacctggaggcccggggctacatcaagccccacgtggacagcatcaagttctgtggggccaccatcgccggcctgagcctgctgagccccagcgtgatgaggctggtgcacacccaggagcctggagagtggctggagctgctgctggagcccggcagcctgtacatcctgcggggcagcgcccgctatgacttcagccatgagatcctgagagatgaggagagcttctttggagagcggcgcatcccccggggccgccgcatcagcgtcatctgccgcagcctgcctgagggcatgggccctggagagagcggccagcccccaccagcctgctag

SEQ ID NO: 143308 - DNA, 1995 bp, synthetic construct
  misc_feature 1..1995: note = Description of Artificial Sequence: Synthetic coding sequence
  source 1..1995: mol_type = other DNA
atggacagcaaccaccagagcaactacaagctgagcaagacagagaagaagttcctgaggaagcagatcaaggccaagcacaccctgctgcggcatgagggcattgaaacagtgtcctatgccacccagagcctggtggtggccaatggaggcctgggcaatggagtgtccaggaaccagctgctgcctgtgctggagaagtgtggcctggtggatgccctgctgatgccacccaacaagccctacagctttgcccgctaccgcaccacagaggagagcaagagggcctacgtgaccctgaatggcaaggaggtggtggatgacctgggccagaagatcaccctgtacctgaactttgtggagaaggtgcagtggaaggagctgcggccccaggccctgcccccaggcctgatggtggtggaggagatcatcagcagcgaggaggagaagatgctgctggagagcgtggactggacagaggacacagacaaccagaacagccagaagagcctgaagcaccggcgggtgaagcacttcggctatgagttccactatgagaacaacaacgtggacaaggacaagcccctgagcggcggcctgcctgacatctgtgagagcttcctggagaagtggctgaggaagggctacatcaagcacaagccagaccagatgaccatcaaccagtatgagcccggccagggcatcccagcccacatcgacacccacagcgcctttgaagatgaaattgtgtccctgagcctgggcagcgagatcgtgatggacttcaagcacccagatggcattgctgtgcctgtgatgctgccccggcgcagcctgctggtgatgactggagagagccgctacctgtggacccacggcatcacctgcaggaagtttgacacagtgcaggccagcgagagcctgaagagcggcatcatcaccagtgatgtgggggacctgaccctgagcaagaggggcctgcggaccagcttcaccttcaggaaggtgcggcagaccccctgcaactgcagctaccccctggtgtgtgacagccagaggaaggagaccccacccagcttccctgagagtgacaaggaggccagccggctggagcaggagtatgtgcaccaggtgtatgaggagattgctggccacttcagcagcaccaggcacaccccctggccccacatcgtggagttcctgaaggccctgcccagcggcagcatcgtggccgacatcggctgtggaaatggcaagtacctgggcatcaacaaggagctgtacatgattggctgtgacaggagccagaacctggtggacatctgccgggagcggcagttccaggcctttgtgtgtgatgccctggccgtgcctgtgcgcagcggcagctgtgatgcctgcatcagcattgctgtgatccaccactttgccacagctgagaggagagtggccgccctgcaggagatcgtgcggctgctgcggcctgggggcaaggccctgatctacgtgtgggccatggagcaggagtacaacaagcagaagagcaagtacctgcggggcaacagaaacagccagggcaagaaggaggagatgaacagcgacacctctgtgcagaggagcctggtggagcagatgagggacatgggcagccgggacagcgccagctctgtgccccgcatcaatgacagccaggagggcggctgcaacagccggcaggtgagcaacagcaagctgcctgtgcacgtgaacagaaccagcttctacagccaggatgtgctggtgccctggcacctgaagggcaacccagacaagggcaagcctgtggagcccttcggccccatcggcagccaggaccccagccctgtgttccaccgctactaccacgtgttccgggagggggagctggagggcgcctgcaggacagtgtctgatgtgcgcatcctgcagagctactatgaccagggcaactggtgtgtgatcctgcagaaggcctag

SEQ ID NO: 143309 - DNA, 2004 bp, synthetic construct
  misc_feature 1..2004: note = Description of Artificial Sequence: Synthetic coding sequence
  source 1..2004: mol_type = other DNA
atgtttgccatggacagcaaccaccagagcaactacaagctgagcaagacagagaagaagttcctgaggaagcagatcaaggccaagcacaccctgctgcggcatgagggcatcgagaccgtgtcctatgccacccagagcctggtggtggccaacggcggcctgggcaatggagtgtccaggaaccagctgctgcctgtgctggagaagtgtggcctggtggatgccctgctgatgccacccaacaagccctacagctttgcccgctaccgcaccacagaggagagcaagagggcctacgtgaccctgaatggcaaggaggtggtggatgacctgggccagaagatcaccctgtacctgaactttgtggagaaggtgcagtggaaggagctgcggccccaggccctgcccccaggcctgatggtggtggaggagatcatcagcagcgaggaggagaagatgctgctggagagcgtggactggacagaggacacagacaaccagaacagccagaagagcctgaagcacagaagagtgaagcacttcggctatgagttccactatgagaacaacaacgtggacaaggacaagcccctgagcggcggcctgcctgacatctgtgagagcttcctggagaagtggctgaggaagggctacatcaagcacaagccagaccagatgaccatcaaccagtatgagcccggccagggcatcccagcccacatcgacacccacagcgcctttgaagatgagatcgtgtccctgagcctgggcagcgagatcgtgatggacttcaagcacccagatggcattgctgtgcctgtgatgctgcccaggaggagcctgctggtgatgaccggggagagccgctacctgtggacccacggcatcacctgcaggaagtttgacacagtgcaggccagcgagagcctgaagagcggcatcatcaccagtgatgtgggggacctgaccctgagcaagaggggcctgcggaccagcttcaccttcaggaaggtgcggcagaccccctgcaactgcagctaccccctggtgtgtgacagccagaggaaggagaccccacccagcttccctgagagtgacaaggaggccagccggctggagcaggagtatgtgcaccaggtgtatgaggagattgctggccacttcagcagcaccaggcacaccccctggccccacatcgtggagttcctgaaggccctgcccagcggcagcatcgtggccgacatcggctgtggaaatggcaagtacctgggcatcaacaaggagctgtacatgattggctgtgacaggagccagaacctggtggacatctgccgggagcggcagttccaggcctttgtgtgtgatgccctggccgtgcctgtgcgcagcggcagctgtgatgcctgcatcagcattgctgtgatccaccactttgccacagctgagcggcgggtggccgccctgcaggagatcgtgcggctgctgcggcctgggggcaaggccctgatctacgtgtgggccatggagcaggagtacaacaagcagaagagcaagtacctgcggggcaacagaaacagccagggcaagaaggaggagatgaacagcgacacctctgtgcagaggagcctggtggagcagatgagggacatgggcagccgggacagcgccagctctgtgccccgcatcaatgacagccaggagggcggctgcaacagccggcaggtgagcaacagcaagctgcctgtgcacgtgaacagaaccagcttctacagccaggatgtgctggtgccctggcacctgaagggcaacccagacaagggcaagcctgtggagcccttcggccccatcggcagccaggaccccagccctgtgttccaccgctactaccacgtgttccgggagggggagctggagggcgcctgcaggacagtgtctgatgtgcgcatcctgcagagctactatgaccagggcaactggtgtgtgatcctgcagaaggcctag

SEQ ID NO: 143310 - DNA, 1995 bp, synthetic construct; identical to SEQ ID NO: 143308
  misc_feature 1..1995: note = Description of Artificial Sequence: Synthetic coding sequence
  source 1..1995: mol_type = other DNA

SEQ ID NO: 143311 - DNA, 675 bp, synthetic construct
  misc_feature 1..675: note = Description of Artificial Sequence: Synthetic coding sequence
  source 1..675: mol_type = other DNA
atggacagcaaccaccagagcaactacaagctgagcaagacagagaagaagttcctgaggaagcagatcaaggccaagcacaccctgctgcggcatgagggcattgaaacagtgtcctatgccacccagagcctggtggtggccaatggaggcctgggcaatggagtgtccaggaaccagctgctgcctgtgctggagaagtgtggcctggtggatgccctgctgatgccacccaacaagccctacagctttgcccgctaccgcaccacagaggagagcaagagggcctacgtgaccctgaatggcaaggaggtggtggatgacctgggccagaagatcaccctgtacctgaactttgtggagaaggtgcagtggaaggagctgcggccccaggccctgcccccaggcctgatggtggtggaggagatcatcagcagcgaggaggagaagatgctgctggagagcgtggactggacagaggacacagacaaccagaacagccagaagagcctgaagcaccggcgggtgaagcacttcggctatgagttccactatgagaacaacaacgtggacaaggacaagcccctgagcggcggcctgcctgacatctgtgagagcttcctggagaagtggctgaggaaggccgagaagaacctggaggtgggcatccactag

SEQ ID NO: 143312 - DNA, 1338 bp, synthetic construct
  misc_feature 1..1338: note = Description of Artificial Sequence: Synthetic coding sequence
  source 1..1338: mol_type = other DNA
atgaagaaccctgaggcccagcaggatgtgtctgtgtcccagggcttcaggatgctgttctacaccatgaagcccagcgagaccagcttccagaccctggaggaggtgcctgactatgtgaagaaggccacccccttcttcatcagcctgatgctgctggagctggtggtgtcctggatcctgaagggcaagcccccaggccgcctggatgatgccctgaccagcatctctgctggggtgctgagccggctgcccagcctcttcttccgcagcattgagctgaccagctacatctacatctgggagaactaccgcctcttcaacctgccctgggacagcccctggacctggtacagcgccttcctgggcgtggactttggctactactggttccacaggatggcccacgaggtgaacatcatgtgggccggccaccagacccaccacagcagcgaggactacaacctgagcacagccctgcggcagagcgtgctgcagatctacacctcctggatcttctacagccccctggccctcttcatcccccccagcgtgtatgctgtgcacctgcagttcaacctgctgtaccagttctggatccacacagaggtgatcaacaacctgggccccctggagctgatcctgaacacccccagccaccaccgggtgcaccacggcaggaaccgctactgcatcgacaagaactatgccggcgtgctgatcatctgggacaagatcttcggcacctttgaagcagaaaatgagaaggtggtgtatggcctgacccaccccatcaacacctttgagcccatcaaggtgcagttccaccacctgttcagcatctggaccaccttctgggccaccccaggcttcttcaacaagttcagcgtcatcttcaagggccctggctggggccctgggaagccccggctgggcctgtctgaggagatccctgaggtgacaggcaaggaggtgcccttcagcagcagcagcagccagctgctgaagatctacacagtggtgcagtttgccctgatgctggccttctatgaggagacctttgctgacacagctgccctgagccaggtgaccctgctgctgcgggtgtgcttcatcatcctgaccctgaccagcatcggcttcctgctggaccagaggcccaaggccgccatcatggagaccctgcgctgcctgatgttcctgatgctgtaccgcttcggccacctgaagcccctggtgcccagcctgagcagcgcctttgagatcgtgttcagcatctgcatcgccttctggggcgtgcgctccatgaagcagctgaccagccacccctggaagtag
